United States Patent Application Publication US 2004/0123343 A1 - sequence listing, part 39

SEQ ID NO: 113233 - protein, 1381 aa, Oryza sativa
  unsure (1)..(1381): unsure at all Xaa locations
  Clone ID: PAT_MRT4530_1703C.1.pep
MSNEVNHVGKAPMFNGTNYSTWKIKMSTHLKAMSFHIWSIVDVGFAINGTPLTEIDHRNLQLNAQAMNALFNSLSQEEFDRVSNLETAYEIWNKLAEIHEGTSEYKDAKLHFVKIQYETFSMLPHESVNDMYGRLNVIVNDLKGLGANYTDLEVAQKMLRALPEKYETLVTMLINSDKSRMTPASLLGKINTNDMYKLKKKEMEEASPSKKCIALQAEVEDKGKGKVNEANEDLEEEIALLARRFNDLLGRRKERGRGSNSNRRRNRRPNKTLSNLRCFECGEKGHFASKCPSKDDDGDKSSKKKSGGYKLMKKLKKEGKKIEAFIGEWDSNEESSASSGSEEEGGDDASSKKKKMAVVAIKEALSLFAPLCLMAKGSSKVTSLSDSESNDNCNDVSYDELVSMFEELHAYSEKKIVKFMALKKDHASLEVLYEELKTSHERLTMWILWLSGRSAASPLCRLVFATAIADNNNDFTXGPPPSPPSGASAYTAGLLCRRCWASTTSPPACLRRRRXRLRLHRRPASSAADWCXAYTAGLLCRRCWASTTSPTGRLVRRRLVSSPARLAYYAAAVGRLRLHRRRASVAAEWCLRLHGWPIMPPLLGVYDFTAGLPPSPPIGASAYTAGLLCRRCWASTTSPPACLRRRRVVPPPTRLAYYAAAVGRLRLHRRPASVAAEWCLRLHGWPIMPPLLGVYDFTAGLPPSPPIGASAYTAGLLCRRCWASTTSPPACLRRRRLVPPPTRLAYYAAAVGRLRLHRRPASVAADWCLRLHGWPIMPPLLGVYDFTAGLPPSPPSGVPAYTEWISQNITTGRLVRRRLVFSPARLAXMPPLLGVYVFTDRLAFAAADWCFRLHGWPLCRRCWASTSSPTGRLVRRRLVLPPARLAFMPPLLGVYVFTDXAASSAADWCFRLHGWPLCRRCWASTSSPTGLPSPLPTGVSACTAGLYAAVVGRLSLHRPAXLVRRRLVLPPARLAYYAAVVGRLRLHRPACLRRRRLVFPPARLAFMPPLLGVCVFTDRLAFAAADWCFRLHGWPLCRRCWASTSSPTGRLVRRRLVLPPARLAYYAAVVGRLRLHRPACXAAADWCFRLHGWPLCRRCWASTSSPTGLPSPPPTGVSACTAGLYAAVVGRLRLHRPAASSAADWCFRLHGWPIMPPLLGVYVVTDRPPRPPPTVKVLFGFIKQLIGYNIIAFCHPSTVFRFGKSTRETMTKMIEALGFGVICSCVSICDVSLVVENNELKEQVAKLNKSLERCFKGKNTLDKILSEQWCILNKEGLGFIPKKGKKPSHCATRFVKSNGKYCSKCREVGHLVNDCPGGYASNSKVYRVYNKNKGIVEETADVQFDETNGSQEGHENLDDVGDEGLMRAMKNMSIGDVKPIE

SEQ ID NO: 113234 - protein, 459 aa, Oryza sativa
  unsure (1)..(459): unsure at all Xaa locations
  Clone ID: PAT_MRT4530_17040C.1.pep
MELFPRMPFGISELDKIVKNLPIDRAPGPDGFNGLFVKKCWPIICQDYYKLAAEFYSGTLDLDPLNHSFIILVPKKPVREGINDYRPISLLRISLKILTKILADRLQKCHHSKREIVLLKLDIEKAFDTIEHEAILLGMEAMSFSVTWLGWIRKIFSSASSSVLINRVPGNNFHCKRGVRQGDPLSPLLFVLGAKLIQAIVNRAYSMGLLSKLLPSDIDPNFPIVQYADDTLLYLKASDRELFILKALLQTFQLGTGLKFNFNKSCLIPINVDEGKAQNLAAVFGCKLGYLPFTYLGLPLGTTKPXARRHCLWRXLSLAAWDKVCKPKCKGGLGVLNLSIQNQALLIKFLDKFYNKKNLPWVNLVWTSYYGNTIPHLSNLKGSFWWRDICKLMDVFRGLARCHLKSGNTGSFWYDVWNDQSPLFYSMPRLCSFAQDHNVSVSDFLSIEAEGNFTLPLSI

SEQ ID NO: 113235 - protein, 569 aa, Oryza sativa
  Clone ID: PAT_MRT4530_17041C.1.pep
MGNAAAGDSAAELLLRAAALVPPAHYALAALLLACALLYRFLELHLIGDLLRGLRGGRVALTFHPASHVYHRVASKCRSLHGRYLATPWLASPHLQTLFLSISGRPPSFTYRRQLYTVRDGGTIALDWLLASDCEEEDVGFCDGVISRDDSTPLVVVIPGLTSDSTAAVFGLPSLIVLNKMQLSVASDCFYNAGWTEDFREIVNYLHQKYPQAPLFAVGTSIGANILVKYLGEEGEGTPVAGAVSICSPWDLLVTNRFIQRKLVQRCYDKALAIGLKGYAKLHQPVLARLANWEDIRKSRSIREFDRHATCVVAKYETVDTFYRRCSSANYISNVSVPLLCISALDDPLCTREAIPWDECRANKNIVLATAPNGGHLAFFQGLTAGKLWWVGAVSEFLLALHDSPCMHRQKAQEHSLHTSLESSIDKSPYVNFMEDGMVTAVTNDDANNSDSDNPISNEMELRNGMVGVQQDGIATEIQNECDGNRSQENVTPAQGPVGSQEQPKQNIDKIQDAIAPVKISINQLIRSQGRSVWLLTYIAFVTSWPFLGALGFILFRKKFRNSLPAKRL

SEQ ID NO: 113236 - protein, 62 aa, Oryza sativa
  Clone ID: PAT_MRT4530_17042C.1.pep
SHRVVTRIFHLSPALPILIPLPLMSRILLALTIISRNLCSVGFRSKKVIRPDPVSEVFQKKK

SEQ ID NO: 113237 - protein, 323 aa, Oryza sativa
  Clone ID: PAT_MRT4530_17043C.1.pep
MARIFSIDVPAPPPPPAAAATDEPWITDTLPFVPYDNSMSYTNYCYYPEMFEDANPDISKEMATIGGEDLLVDNANQQDYFQAWTNSFDSVALMEPGALQEPSYLDLDPSYFDLGSYLDPDHQQMASSSCSDIALLSDTSFLQPLNMSNAPYVQLPMMDANINNEIGAATSSSELAQLIPQSSDHSLLQPLNINDETAYDQLPVIDTNSSNNNTGSEFPCVNFQSSNTGSLLGGSSNMFDGQDQQTSHIVLPEKSCPDPEKRQRAVQRYKEKKSNRRFVKQIMYASRKATADTRRRVRGRFVKASLEQGTSSNDNKQPKHEGN

SEQ ID NO: 113238 - protein, 155 aa, Oryza sativa
  unsure (1)..(155): unsure at all Xaa locations
  Clone ID: PAT_MRT4530_17044C.1.pep
CPPSSPAVETASYGCATSGNTHGRRHRSLLATGAPPPQPPPPLPSIGWRKKKTRRRREKEKRRRRKKKRKERLTGGKLMPSRXNIVIFTEAQFSLKTSGTPELLSLLITLRSERMGTKVHGTGKAYIYCSRNILKNIRIAVLAVIGHWDSQWHLG

SEQ ID NO: 113239 - protein, 35 aa, Oryza sativa
  Clone ID: PAT_MRT4530_17045C.1.pep
SSTPVSTYTYTSRAARSGTAASVHAMGRHENLGSA

SEQ ID NO: 113240 - protein, 89 aa, Oryza sativa
  Clone ID: PAT_MRT4530_17046C.1.pep
MAHKDQPEEQKCFELAITTCRLPLTNPWDTQQTKILTVKYYDLRAVNSWALGQAASGGSGTTWHGKASSGMGATRLGGGNVRQATVTVR

SEQ ID NO: 113241 - protein, 428 aa, Oryza sativa
  Clone ID: PAT_MRT4530_17047C.1.pep
MGNCMDTAAAAAAAPDTNNADPSKAASKTTYSSYPSTTKSGSSWTVPSYKDRSDLPTPRTEGEILSSSNLKAFTLSELKNATKNFKPDSLLGEGGFGYVYKGWIDEQTLAPARPGSGMVVAVKKLKPEGFQGHKEWLTEVDYLGQLHHENLVKLIGYCSDGDNRLLVYEYMPKGSLENHLFRRGADPLSWGIRLKVAIGAARGLSFLHDAENQVIYRDFKASNILLDSEFNAKLSDFGLAKAGPTGDRTHVSTQVMGTRGYAAPEYVATGRLSVKADVYSFGVVLLELLTGRRALDKSKPASEQNLVDWTRPYLGDKRRLYRIMDMKLGGQYPKKGAHAIATIALQCIRSEAKMRPQMSEVLEKLQQLQDPKYNVTSPQVDTRRRSSSGSVPRSPMRMQPSPRRLSASASPLPAAGSPLPACRTAQVH

SEQ ID NO: 113242 - protein, 103 aa, Oryza sativa
  unsure (1)..(103): unsure at all Xaa locations
  Clone ID: PAT_MRT4530_17048C.1.pep
RLQDYFTADCLKGYHDEFISTLGLAXGGVRCHIPYTKMTGYTPFDHYGLVDMERCHDLWLTSGGDIGAHICRGHENHDGNLGLALCGQTNMLNGVFYWNGQLL

SEQ ID NO: 113243 - protein, 81 aa, Oryza sativa
  Clone ID: PAT_MRT4530_1704C.1.pep
MARSADIHDDVSHNQCSTKQGGGGHDGGAGQQCGPSEGAVASYGSWLKHQFSPLPELAPSDTRRSTAGEKKMSYSSVQNAS

SEQ ID NO: 113244 - protein, 70 aa, Oryza sativa
  Clone ID: PAT_MRT4530_17050C.1.pep
PPKCSSVSPGSSCAKPTGSQSRRRKSGSPWYGADRVLYLGPLSGEPPSYLTGKFPGNYGGNTGGFSANPK

SEQ ID NO: 113245 - protein, 607 aa, Oryza sativa
  Clone ID: PAT_MRT4530_17051C.1.pep
MAELGLRLTGGDRVLTKQRNGGSEVQGAAETVVDGQRRQNSGVDVAGSTQGANCNFESTGVLEMSHRGCMREESGGNSPELGVASVVRNGGRSGVGGSGGRRRGRKKSGLDILLVRGDVESKCAKVDLRRRPATAMNSYSGDRSSSSSSSRPTTTSFDSYQFDFGVNSSRSSASRPLRPGPGAPAGGRLMLAIVNDYPPRAVMAQPFPPGPGKQPAKTTSWTHQPSPASAAAGAGSGPTSMVGDIFGRSWSSAAPSSGLGIPQANNPGLFSDLLGSALGSSSRGQPNAPLRSSAPQTYKPANANPNPSGSPFSMGGMASTLPKTTTGSPMSSGGGGYGTPSLGKPGSMNAAKKVIPVKPGSRFGAFQGVNSGGIAGLSGFQTADSGFGSFQSSGAVKPSSFTPLAPAPAPAPAAAAANSGVDHLDSLFASTTAAPTAVSNGGGGGDMFGEMDGWVDVEADFGSGDSGGATTELEGLPPPPSGLTASAAKSKGMDNYKGGQYADAIKWLSWAVVLIEKSGKYADIVEVLSSRASSYKEVGEYKKAIADCSKVLEKDKDNVSVLVQRALLYESSEKYRLGAEDLRLVLKIDPGNRLARSMIHRLNKMAD

SEQ ID NO: 113246 - protein, 99 aa, Oryza sativa
  Clone ID: PAT_MRT4530_17052C.1.pep
MAELGLRLTGGDRVLTKQRNGGSKVQGAAETVVDGQRRQNSGVDVAGGNSPELGVASVVRNGGRSGVGGSGGRRQGRKKSGLGILLVWGDVESKCAEVG

SEQ ID NO: 113247 - protein, 491 aa, Oryza sativa
  Clone ID: PAT_MRT4530_17053C.1.pep
TPTPATAPPPPPPPAPPPPPSTPTSSTSASTRPAPLRPAPSDRGPGPPRGAAAAGGVGVGGSAWTHQPAKTTSWTHQPSPASAAAGAGSGPTSMVGDIFGRSWSSAAPSSGLGIPQANNPGLFSDLLGSALGSSSRGQPNAPLRSSAPQTYKPANANPNPSGSPFSMGGMASTLPKTTTGSPMSSGGGGYGVGGRPMKPAGMASAAAAQPMMGQKKDPFGSIDPFAAKPGSMNAAKKANPVKPDQGFGAFQGVNSGGIAGLSGFQTADSGFGSFQSSGAVKPSSFTPLAPAPAPAPAAAAANSGVDHLDSLFASTTAAPTAVSNGGGGGDMFGEMDGWVDVEADFGSGDSGGATTELEGLPPPPSGLTASAAKSKGMDNYKGGQYADAIKWLSWAVVLIEKSGKYADIVEVLSSRASSYKEVGEYKKAIADCSKVLEKDKDNVSVLVQRALLYESSEKYRLGAEDLRLVLKIDPGNRLARSMIHRLNKMAD

SEQ ID NO: 113248 - protein, 131 aa, Oryza sativa
  unsure (1)..(131): unsure at all Xaa locations
  Clone ID: PAT_MRT4530_17054C.1.pep
MKASPKVFSPKLLKGLLLTTPGXMAGPVIVAEARTYKSQNPRFKGPGAPKTNWARVFNPEGFPHGYCPGVPPPGMCTKPCPCLMNHQLAHQLVPPPRAWVIVSIDRIQTALKIKKKVWLKRGFFLGENPSP

SEQ ID NO: 113249 - protein, 91 aa, Oryza sativa
  Clone ID: PAT_MRT4530_17055C.1.pep
AISGISVHSQSFPCLNYFCASCIVVLPRIRAESRLPRRAPPRRSSAWLGHRRRARSCSLSRAAPSLPPPAVPARVHQVEGVVEDGTSAHAS

SEQ ID NO: 113250 - protein, 125 aa, Oryza sativa
  Clone ID: PAT_MRT4530_17056C.1.pep
KSSSGDSDDELDIPFIATRGYDSVVWSRLYSQGPTEMTRHSWKLSSVVAERTLKSVGAKGMVVGHTPQTRGVNCKCDGKVWCVDVGMSYGVLYSRPEVLEIINDRPRVLKNRRDSYDEMEVLDFI

SEQ ID NO: 113251 - protein, 94 aa, Oryza sativa
  Clone ID: PAT_MRT4530_17057C.1.pep
AISGISVHSQSFPCLNYFCASCIVVLPRIRAESRLPRRAPPRRSSAWLGHRRRARSCSLSRAAPSLPSPAVPARVHQVEGVVLDSTSWRGRLKL

SEQ ID NO: 113252 - protein, 1368 aa, Oryza sativa
  Clone ID: PAT_MRT4530_17058C.1.pep
MPSLQLLQLTERGRGLLASRRKTLAVVSGALLAGGALAYARSSQGQRRRRSEGDDATTALARNGDRMGQNGVDGRLAGTKRRKGGLRSLHFLAAILLKKIGPNGTRYLLGLTLTAVLRTAVGHRLARVQGYLFRAAFLRRVPTFTRLIIENLILCFLQSAVYQTSKYLTGSLSLRFKKILTDLVHADYFQKLAHLLIIYLTPSIMIYNLNKNMVYYKISHVDHRISNPEQRIASDIPKFCSELSELVQDDLAAVAEGLIYTWRLCSYASPKYMLWIVGYILVAGGAIRNFSPAFGKLKSTEQQLEGDYRQLHSRLRTHAESVAFYGGENREAYYIMQRFQALIGHLNCVLHENWWFGMIQDFFLKYFGATVAVVLIIEPFFSGHLRPDSSTLGRAEMLSNLRYHTSVIISLFQSLGILSISTRRLNILRNNGLVHFVAKINITKICGYADRIRELLDVSRELSGVRDKSLNHNSSAGNYISEANHIEFSGVKVVTPASNVLVDDLTLRVERGSNLLITGPNGSGKSSLFRVLGGLWPLVSGHIVKPGVGSDLNKEIFYVPQRPYTAVGTLREQLIYPLTADQEIEPLSYDGMVDLLKNVDLEYLLERYPLDKEVNWGDELSLGEQQRLGMARLFYHKPKFAILDECTSAVTIDMEERFCKKVRAMGTSCITISHRPALVAFHDIVLSLDGEGGWDVQHRRDDSSFSTEESDYTLLETDRKSDALTVQRAFMGRAKSNASSRSKEHCYTTKVIATSPKLEIEQTIQTHRVPHLRCFPRPLPARVAAMVKILVPKLLDKQGGQLLAVALLVFSRTWISDRIASLNGTTVKFVLEQDKAAFIRLIGISVLQSSANSFVAPSLRTLTGRLALGWRIRLTNHLLQYYLKRNAFYKVFNMSGKSIDADQRLTLDVDKLTTDLAGLVTGMVKPLVDILWFTWRMKLLSGRRGVAILYAYMLLGLGFLRAVSPDFGHLAGQEQELEGTFSFNLVNYVTRFMHSRLRTHAESIAFFGGGSREKAIVEAKFMKLLDHSKILLRKQWLYGIVDDFVTKQLPHNVTWGLSLLYALEHKGDRALTSTQGELAHALRFLASVVSQSFIAFGDILDLHKKFLELSGGINRIFELEELLRVSQRDTFVPSDATSAEETISFHEVDIVTPSQKLLASKLSCNVVQGKSLLLTGPNGSGKSSIFRVLRDLWPVCSGRVTKPSDGMFHVPQRPYTSLGTLRDQIIYPLSREEAEMKICSLYNDGNGSSASNLLDDHLKTILVNVRLVYLLEREGWDSTSNWEDVLSLGEQQRLGMARLFFHHPKFGILDECTNATSVDVEEHLYKLATSMGITVITSSQRPALIPFHSLELKLIDGEGNWELCEIHQ

SEQ ID NO: 113253 - protein, 817 aa, Oryza sativa
  Clone ID: PAT_MRT4530_17059C.1.pep
RTGATSANADSSRSHCVFTCVIKSESKNLEDGSNSTRTSRINLVDLAGSERQKLTHAFGDRLKEAGNINRSLSQLGNLINILAEISQSGKQRHVPYRDSKLTFLLQESLGGNAKLAMICAVSPSQSCKSETLSTLRFAQRAKSIKNNAVVNEQKEEDVNMLREQIRQLKDELHRMKSGGSDGSNGSFSTGWNARRSLHLLKMSLSRPTTFQTIHEDSGDVEMEIDENDVEKPYNQDNMVISPPGDKECKELQASLKINGGTSLDVFDGENLMPTKRSCSDDRYKLNLAASIQRGLQVIENHQNNGAWRRASVGFNARIVDVQPCKVDVAIQTEPEESEARDNPLALISSHVLGTSATVSNDPNACRDLQLVQYDAGITRDEPKQQQILKAVEKVLAGAIRREMARDEQCVKQAAEIQQLNRLVQQYKHERECNAVIAQTREGKIARLESLMDGTLPTEEFINEEYLSLMNEHKILQQKYENHPELLRAEIELKRLQEELELCRNYIDEKEVLQEEIQDLKSHLHFMLSSSASIRRLWPPVQLSHGVGPSPVTNDADGDNNAVDTPDWAEAESKWVTLTEELRVELEANKSLVGRLRSELESEKKCSEEVKEALQTAMQGHARILEQYAELEERHIGLLAMHRKIREGVEDVKARAAKAGVKGAELRFINSLAAEMAVLRAENKGLQDQLGDTAEAVQAAGELLVRLKEAEEAEALAQRRALLAEQETEKAYQEIDNLKKNYDQEIVALNQRLSESSHHQETTLAIEACDMETTKYDTAGSPGDQQWREEFNQQGGSFEVSKSTDLNSWFSGYDKCNI

SEQ ID NO: 113254 - protein, 246 aa, Oryza sativa
  unsure (1)..(246): unsure at all Xaa locations
  Clone ID: PAT_MRT4530_1705C.1.pep
RLGQARSVVPSDSVFPEVELAEDDAVVCSRVTPDGGGEVVAWCKIRRGGDVSAATIWNLSLDAIIVDGRVIQQEAVDIKPGSEIVPGPQKDGYLLYTFDITGLNDXDKNNIKIVLGIENAKCSICLNLWHDVVTVASCLHNFCNGCFFEWLRRSSANSRDKSQSAACPQCRTAVQSVGGNHFLHNIEEAILQVFSSLQRSDEEIALLESYAPVKTNIVRHAFIPFPWSYAGAMILRSTMGINISRG

SEQ ID NO: 113255 - protein, 92 aa, Oryza sativa
  Clone ID: PAT_MRT4530_17060C.1.pep
GPLWRMETPPPLKAPFSIGVPPESGKSPIPKKVIPVNWMPNPLLVSNGPFFLDRAETTPPIYFPINLFKRFPSKTQIFPVVKNGSLSPYSLL

SEQ ID NO: 113256 - protein, 56 aa, Oryza sativa
  Clone ID: PAT_MRT4530_17061C.1.pep
MGRACTCLNMKAWLLFICQLCTLLILAQMCTCTIVCLVDASWKRVYISSPSFKRHQ

SEQ ID NO: 113257 - protein, 47 aa, Oryza sativa
  Clone ID: PAT_MRT4530_17062C.1.pep
SSTLVRSKFDSFTQPLFFFNYPGFPFVKSIRLFYFHFFFYSEFVLLS

SEQ ID NO: 113258 - protein, 1045 aa, Oryza sativa
  Clone ID: PAT_MRT4530_17063C.1.pep
MAAPPPSATVGLIPNLAGRGVLLPASAPDSSACHGFVVPTRRRRRVSVAPFGWGLARRGRVSDARADGFGAMCAVAGGEAGPGSSELRHVEKELTFSPTFTDYVKIMESVKLDRSKSLESTESDGRSSRRRFTGDGDAPVVRRGDERSGDGRSTSFDRQKGSQRNRGDVNERSMANNDIQNNSIRLVEKKKPGDVEKRRGRQGKVDEYVQRRIVRGEISEDEGNVDKNERKQFTLQLKMKDTRGSMVAHQSERNMHVQSNARKGLQRQSTSMVSHISSPSNSRIILENTKSLVKRGKENFSSPARSIYENNFKYPRERKFTNYDVNADDKFQRYQQTTENSGRGVVVGRFGEGDIDYNKATVSKRYGNRQATSGHDGHPTVSLKRGKPEAIRMQRGENVQTGKFIRRDAKAIDLDDRAAFKTFEVFTDVRNRPRVLQMELEDRIQKLASRLNATDVNTPEWKFSKMIHDAKIKFSDHSILRVVQILGRYGNWKRVLQVVEWLQSRERFKSYKSRYIYTTVLDVLGKAKRPFEALNVFYTMLDQLSSYPDMAAYHCIAVTLGQSGLVKELFDVIDRMRSPPKKFKLSPIQNWDPRLEPDLIVYNAVLNACVQQKQWEGAFWVLQQLKEKNIRPGNTTYGLVMEVMLVCGKYNLVYEFFNKVEKTSIPGTLNYKVLINALWREGKIDEAVMAVKGMESRGIVGSASLYYDLARCLCSGGRCKEALLQVEKICKVANKPLVVTYTGLIQTCIDNGSMENAKYIFDEMCKYCSPNNITCNIMLKSYTEHGMFEDAKDLLENILSGRIRSKVESSQKAIADKFTFNIFMEACAEAKRWNDFEYAFRKMLSSGYHFDERRHLRMVLDAYRNGKEQLLEDVWDYMCQYGRVPPAPMIMERFCLKLRQGDTVAAMSCINTFQESKIRNVSSMSWFNLLNRNGDRLKEDIIIKLLHELNNLVSSSGHSDSLYQNIISSCTEFLSVSTSVEKASSDQQMLPCSLWLFRQNFDTFSWYTKEHMEKSYRCENFWVNYTHRCPRIMNLRMQPIGNSRA

SEQ ID NO: 113259 - protein, 59 aa, Oryza sativa
  Clone ID: PAT_MRT4530_17064C.1.pep
MAALRSRRLQNTPAGGLLYFPNAVLYLPMHGGMDYQTMLLCEGGRWCKFKRSLTVVEPG

SEQ ID NO: 113260 - protein, 91 aa, Oryza sativa
  unsure (1)..(91): unsure at all Xaa locations
  Clone ID: PAT_MRT4530_17065C.1.pep
QGLVKVWSISSGGWTPEVSFNGNQFPFCVFPPGFPGFLVFGGSPFLELWDLVKNPSLPVPGHXGFIPALGPSPISGMVGFAGPGNFVPLWK

SEQ ID NO: 113261 - protein, 162 aa, Oryza sativa
  unsure (1)..(162): unsure at all Xaa locations
  Clone ID: PAT_MRT4530_17066C.1.pep
IRVFTSISKRGISPKGCRVLGKGSGRGCTILPSIQWIKTLEEQASATVFLKKLXDSAGILNMVNTGPDHIRAAVISLIFGEAYGRIVNQIYGSVGLIWSGQRQACQASFETVLKGDPVVQVSSEAXALAQATQPLMACDIPHVSKYAEADAATNMIRVARGG

SEQ ID NO: 113262 - protein, 360 aa, Oryza sativa
  unsure (1)..(360): unsure at all Xaa locations
  Clone ID: PAT_MRT4530_17067C.1.pep
MAATAASSLSAAAAAARRSFPSRLRLLARRRRLPFSSTASFSAAAPPAAAASFGWEDALRVAADDRRGDESDLSGYSRKVDTCNRGMDKKGEFVAFMVEDQVVGYIHQGFVEHLRDFRDVFTIASGSNGSNNVEHVTLHSSLRTPDERTNAVGSVIRSLGDLXQLFPITSSYGMPVYFSLERAAAPFFGIKAYGVHMNGYVEKEGQKFLWIAKRSDTKQTFPGMLDHLVAGGLPYGISCEENVIKECEEEAGIPRSISSNATSVGAISYMDIEGFRYKRDVLFCYDLKLPPDFVPNNEDGEVGSFRLIPVPHAANIIRRTHFFKPNCNLVIIDFLFRHGYHXINPDYHGYLKLLQSLRRG

SEQ ID NO: 113263 - protein, 144 aa, Oryza sativa
  Clone ID: PAT_MRT4530_17068C.1.pep
DRLFPLPSFTFGVRTKCLFQAAVFRINTLRGGEVHSLALPSSTHTLGDWKKGLDAVIERLDAICGQISDVDNQQQSHHVAIQHLEHAHRDADGDRGDDGLHSGGRCSIREAVVVAIVPEEAESTMATATGGEEDGGRSPHLLRH

SEQ ID NO: 113264 - protein, 258 aa, Oryza sativa
  Clone ID: PAT_MRT4530_17069C.1.pep
MNVVRLRHGSYYVNWNVGVGPAASFVQAITRLAVEAISEVWGPFDPVIKVQLMKPPPPEEAGEIHESFVMRLDQQLAAAVAEQLGLLNNDQEYRERKEAHEEARYFSWGSVESYGTRPDYADLRRRINAILSSNKYLLVVENLYEPMTPYYFVYSVGLPFPNYSFTDSRWLISTVSQKVCDKSKSARDQVYGPFDDDDTMVLILSSLHQSAKDISKAVVGHDDDEEHWHRAALRCFHYALLQLLIPCEQDNNSNTTSH

SEQ ID NO: 113265 - protein, 1671 aa, Oryza sativa
  Clone ID: PAT_MRT4530_1706C.1.pep
MSNEVNHVGKASMFNGTNYSTWKIKMSTHLKAMSFHIWSIVDVGFDITGTPLTESDHRNLQLNAQAMNALFNSLSQEEFDRVSNLETAYEIWNKLAEIHEGTSEYKDAKLHFLKIQYETFSMLPHESVNDMYGRLNVIVNDLKGLGANYTDLEVAQKMLRALPEKYETLVTMLINSDMSRMTPASLLGKINTNDMYKLKKEMEEASPSKKCVALQAKVEDKSKSKVNEVNEDLRKERGRGSNSNRRRNRRPNKTLSNLRCFECGEKGHFASKCPSKDDDGDKSSKKKTGGYKLMKKLKKEGKKIEAFIGEWDSNEESSVSSGSEEEGGDDASSKKKKMAVVPIKEAPSLFAPLCLMAKGSSKVTSLSDSESDDDCDDVSYDELVSMFEELHAYSEKEIVKFKALKKDHVSLEVLYEELKTSHERLTISHEKLKEAHDNLLSTTQHGAHIDVGISCDLLDDSATCHIAHIASSSISTSWDDLMDMPSPSSSSSSCVSICDASLIVENNELKEQVAKLNKSLERCFKGKNTLDKILSEQRCILNKEGLGFTPKKGKKPSHHATRFVKSNGKYCSKCCEVGHLVNYRTGGSHWVLDSGYTQHMTGDRAMFTTFEVGENEQEKVTFGDNSKGKVIGLVAKTSLGWLWHRRLAHVGMNQLSKLSKRDLVVGLKDLKFEKDKLCSACQAGKQVAGSHSTKSIMSTSRPLELLHMNLFGPTTYKSIGGNSHCLVIVDDYSRYTWVFFLHDKSIVAEFFKKFAKRAQNEFSCTLVKIRSDNGSEFKNTNIEDYCDDLHIKHELSATYSPQQNGVVERKNRTLIEMARTMLDEYGVSDSFWAEAINTACHATNRLYLHRLLKKTFYELIVGRKPNVAYFRVFGCKCYIYRNGVRLTKFESRCDEGFLLGYASNSKAYRVYNKNKSIVEETDDVQFDETNGSQEGHENLDDVGDEGLMRAMKNMSIGDVKLIEVEDKPSTSTQDEPSISATPSQAQVEVEEEKAQDPPMPPRIHTALSKDHPIDQVLGDINEALCDPDWMNAMHEELNNFARNKVWTFIERPRDHNVIGTKWVFRNKQDENGLVVRNKARLVAQAFTRVEGLDFGETFAPVTRLEVIRILLAFASCFDIKLFQMDVKSAFLNGEIAELVFVEQPPGFEDPKNPNHIYKFSKALYGLKQAPRVWEFEISMIGELSFFLTLQIKQLKDGMFVSQTKYIKYLLKRFGLEDAKPIKTPMATNGHLDLDGGGKPGAARSDRPYRAVLTGVAEADYAQIDEEVEVNVEGLVRRKVEMMSVEVERMRMKEDLFRTIGIDRIVTLKQDYNEDLIRQFYATVWVAEDYSEMEWMSDTLQCSFSRRQFRRLLNILLDFGDDLHEEHPHNPLSIDYLSQFYEDGVRYTHGNVAGLRTIPSVVNRIVRATILPRLGNNDDIRGVAWHVIDAISQARQFDIVTLMMQEIAISKGTFTQGIYYAPYIMRLIQDKLGATGQNLKKHKQYKPRLQLGAPHAPRAAPSSHPGASSSSARPPPPGYNPNAFFHPQYAYFGMQPNEYFNPRNKRGGSCGAAEDPTAPAGQAAALRRRRRAAVVRQRWATAQRRVAAAVVRSAQRQGGCGVRRWAAAVVVEAKWRAMRGGGEEGSTACGGEEEVGGGAAASIPDRRGPSPSPTAGLQELGVTGAKLERRRR

SEQ ID NO: 113266 - protein, 60 aa, Oryza sativa
  Clone ID: PAT_MRT4530_17070C.1.pep
SYGELQRHNRMTAVIAIGMCYTACWNSEDASFTSPASRPMAITLESSTITAETKTIYPVD

SEQ ID NO: 113267 - protein, 52 aa, Oryza sativa
  Clone ID: PAT_MRT4530_17071C.1.pep
YAFLPVETAPQLSSTGASMKTIVFVRPHAVRIADGTVYCISSFLTPSFLACL

SEQ ID NO: 113268 - protein, 87 aa, Oryza sativa
  unsure (1)..(87): unsure at all Xaa locations
  Clone ID: PAT_MRT4530_17072C.1.pep
YPVVKKARISGCAYIALKTDPNCMVTLSPGESSLCRALXNDVLAPCIRLLLTYEGHRPQDQAGFAFGAPSPIRINRCQNVDNRAISS

SEQ ID NO: 113269 - protein, 642 aa, Oryza sativa
  Clone ID: PAT_MRT4530_17073C.1.pep
RLSLRQLQGLEVDWWRVEVRAAECGHCLARRPGATGQGRRRVGNGGLRGGRPGGTDARREIGSRCCAAASWALPPLRTRGQLNRQKKCLEPSKPRRTTHSGTGAGAHQGACAQCPPLFRIFDVFLNGNIRLIGYSFKRLWEASVFIALPHTRTELGFRGAVRVLVFTIVLCPLFLLYMFGLTISAYEENKLVRNVADAYGFDEASRGSVLDYLHEIKVGCEKDPSFAGGRNMITYAAQLMESTSPNRYLSGVRILDTLIRFNSGAIGSGFPGQSMLISNTIGSASSGSILHNLVQMLDSKSPYDEEIRLRAARIVEHFVIDIRLDKILQGIQCISSLLDLKPFHQPDEPLEEYGHRISVGEEGQMQVRGIQILLKLSDDENNLRIMSNTDDLVWKIVALINDKELHLRKHDKWSRDIVDPGVKLIKRFMSATTRSNNILWREISTSLEAISSLESIIDCDKCDEEVKKQAIRVLAQICWDTSSVMGDQNKERFIGSLIDMFLHKSKGSQFENLAGEELAQLSFGFGSCATIILEKYGPNMIDCIGKTDSGLYNSIHRKIAADVLKHLYGNYSIDDEHFQNLKEAMIDLLPKFYLDKRTPTDINTRPLGEEGTRNNRSRHKINIQANMRQDKTPDIDFRDRHG

SEQ ID NO: 113270 - protein, 144 aa, Oryza sativa
  unsure (1)..(144): unsure at all Xaa locations
  Clone ID: PAT_MRT4530_17074C.1.pep
VKTXPPTWDGPLCKNPAELSFFWKXVXTVPYSDKLKRXVNSIDLYAHHFRCSTXASYYISFLMCDLHNFLLRFQPYFCTLRLGNCMLAQYSLRIAVSVXLPSNVQISYFYLLVMVAYHSTISSYXYHVIXQILVHGIMFNSKDT

SEQ ID NO: 113271 - protein, 226 aa, Oryza sativa
  Clone ID: PAT_MRT4530_17075C.1.pep
MFLSGISPAVHHDLQPGGRSPYDGDDGDRTLVVLLTFGIFFSFVILYLVAGLIWAVVITAAAVVLSFLYLRVRRRRAAVGGTAAAAAPNDVVFIVGAHQAARSTGSSGGGGDVAAAAIVSAIPAFEYKRVNGGGGEDGGAAAGSGWAQCVICLGLVQVGEVVRRLPACKHMFHVECIDAWLSSHSTCPICRADVVDELAAAAAGGRLSLSPYGTELIHMKFITEFL

SEQ ID NO: 113272 - protein, 642 aa, Oryza sativa
  Clone ID: PAT_MRT4530_17076C.1.pep
MPSSPSHPHVAVVAFPFSSHAPKLLAVARALATAAPSATFSFLSTADSLARLPATAVVPAGNNNLRFVEVPTDGDQEETWPVWRRMEMFVEAAEGGGLRRAMEAAGDAAGGVAVSCVVGDAFMSMAAEVGVPWVAVWTGGPCALLAHIVGDAIREDIGDDDDLHGARGDELLTSYPGLGSYRVRDLPFGGGGVGGDMHRVMTMLLGRVARRLPRAATAVAINAFPGLFPPDVSAALADALPNCLPIGPYHLLPGAAATQANDDDPHGCLAWLARRPAGSVAYVSFGTVAAPPPDELRELAAGLEASGAPFLWSLREDSWPLLPPEFLDRATKAGDSAAGLVVAWTPQAAVLRHPAVGAFVTHSGWGAVLEAMSGGVPMACRPFFGDQHMNARAVARLWCFGMAFDDDNDGGGKPSMMTRGRVAEAVASLLAGEEEGARMMRARARELQAMVVSAFEPDERREVAPDLILHEWLVGRGKEVRSPARAARRRLSPPPPANCRRRLASSTAALASSTVTLTSSAAPRCRSPRLASSSVSSRRPSPPPLSPQPRLAPSAAPRRRSLLHPPPLAAAALPPPPLPPLALPPPPHPAAATAAAPPPATVRVLLQPRDAVAVDDASSLRTGMLPRAAPMRYSNNDAIHCC

SEQ ID NO: 113273 - protein, 352 aa, Oryza sativa
  Clone ID: PAT_MRT4530_17077C.1.pep
MSAAACISSFPPPPMAAAAAPAPETTIDVFVVANHTPVTAAADKSSCEGDVVAGGGRTVRRPRAVARTLECERRVVGEGFAVRRGIGRKELDSLDPFISLDEFEFSPPAGFHDHPHRGFENVTYMLEGGFSYHDFSGHKGTINTGDVQWMTAGRGVVHAEMPGGHGVQRGINLWINLSSKDKMVEPRYQELASHDIPAAERDGVSVKVIAGEALGARSPLQTRTPALCLDVAMRPGARLRAPVPPGWSACSYVIDGEAVFGDEAAAAGAHTCVVFGGGGDGVAARATERSAARFLLVAARPHGEAVVKDGPFVMNTREEVEQAREDYRNRRNGFEMAAGWSSDHVATAAAAH

SEQ ID NO: 113274 - protein, 136 aa, Oryza sativa
  Clone ID: PAT_MRT4530_17078C.1.pep
MSRLIRSGLLCGEGVRPISVSTSTSSATCAAVLAQNWFTISHGPRPRGSLAPRGLPRAGDAEMPSSPLVSRSTGRMHATRGAARGFCPSGDFAGQRQPLGTSGDRVVRAVLGACVVRESTQPDAKPPGAGTSCGGA

SEQ ID NO: 113275 - protein, 109 aa, Oryza sativa
  Clone ID: PAT_MRT4530_17079C.1.pep
MAAAPSPPPDLAGGRRQDGKPRRPLVMEAPAPSPPPYPVGGQMADLGDGVEKNARCHRVVDVGHFYFLDVFVFMGIVDVYVFMCSLILNVFFDLVRIKASYSMDRLKSR

SEQ ID NO: 113276 - protein, 139 aa, Oryza sativa
  unsure (1)..(139): unsure at all Xaa locations
  Clone ID: PAT_MRT4530_1707C.1.pep
GGGTGKGGGLPTAAQGEATLGAAYDAARRHRGRRRARQRHGTQGGEGTIARRQDGRRDGVRTGDATATTEQGSRRRQRARRGSGDGDAARQRRGARGGDXTATTAIATAKARGGTGLETATVRQRRHGSRSGDGTRSNI

SEQ ID NO: 113277 - protein, 47 aa, Oryza sativa
  unsure (1)..(47): unsure at all Xaa locations
  Clone ID: PAT_MRT4530_17080C.1.pep
SLSLSLSLSLSSHHHHHHHHHHHHHHHRRPDHRXVEKPTSLISIPYY

SEQ ID NO: 113278 - protein, 138 aa, Oryza sativa
  Clone ID: PAT_MRT4530_17081C.1.pep
MAAPTVAEGGRKRRGEGTGRQGGVARGKRRQSSGGKAKIGAAVRLRSGAVIDWGKSGRALTQAESDTAPLERRTPAVRARGPTVRFRGAPHLDVHVAQAAAPGAGVIICSPESLATRGGTHRWGPVEVDARRVRKGSR

SEQ ID NO: 113279 - protein, 51 aa, Oryza sativa
  unsure (1)..(51): unsure at all Xaa locations
  Clone ID: PAT_MRT4530_17082C.1.pep
AMKLCFYQHLHTSGTTHIAXNHLVFQPYVLYRLYVNVGKNKVTSLISESLT

SEQ ID NO: 113280 - protein, 193 aa, Oryza sativa
  unsure (1)..(193): unsure at all Xaa locations
  Clone ID: PAT_MRT4530_17083C.1.pep
NGIGDEWSFIWNSDKYTAKRFYKLTYSNVHVPRPFVWIWKTKCVMKIKVFAWLLFRDRLNTRDMLDRRHCAKENDDLTCELCQNNIRETREHLFFFCPFSKLCWQHLGITWNPDLEFFQMVVLARIQFNXKGFLEVFFIAAWHIWKQRNGKIFRNELPSFSSWRALFRAEVLLHLCRMKDPLKQIVSDWLQTV

SEQ ID NO: 113281 - protein, 160 aa, Oryza sativa
  unsure (1)..(160): unsure at all Xaa locations
  Clone ID: PAT_MRT4530_17084C.1.pep
GTIXXCXXXFFRXKTGGTXXKTGGKGKGETISSQXXFLGLIWYXRAKXXEQXGXGGGERGGGXQXFFSXSNVXKXFGVSXTGXEXCNKNTNXGAREMACXIYSGGXILHPIHDAVAGHXXXPXKRXVQSVLPFLRFFXWAPFAAXTHYVQIQRDHTAASR

SEQ ID NO: 113282 - protein, 1077 aa, Oryza sativa
  Clone ID: PAT_MRT4530_17085C.1.pep
MAIPILRRIIPLLMLLLTLWPVPSSSLPDEYSDREALLQFRAALSVSDQLGSLSSWNGSTGSDFCRWGGVTCSRRHPGRVTSLNLSSLGLAGSISPVIGNLTFLQSLDLFNNTLSGDVYFTSQLHRLHYLELAYNDFSGDLPVGLCNCSNLVFLSVEANELHGAIPSCLGSLLQLKVLYLGENNLTGTVPPSLGNLTMLLQIALYQNQLEGTIPEGLSGLRYLQYIQASRNSLSGTLPPLFFNISSLQYLGFSSNKLHGRLPPDAGTRLPNLQVLRLGGIGNNFSGTIPASLSNATEIQVLGLARNSFEGRIPPEIGKLCPVSVQMGSNKLQANDAGDWEFLRYFTNCTRLQVIDLSDNTLGGILPSFIANLSRSIQWLSMAKNQISGIIPPGIGSLKGIEDLEFQGNNLFGDIPGDIGRLRNLKVLWLNMNNMSGGIPFSIGNLTQLLTLDLSNNQLNGSIPKSLGSMERLTNLDLSSNRLVESIPDVIFSLPSLTDSLLLSDNYLSGALPPKVGNLRRATTLSLSRNNLSGKIPTTLGDCASLVYLALDSNHFTGSIPPSLGNLRGLSILNLTRNALSGSIPQQLSNIHGLQQLYLAHNNLSGTIPQFLEKSSALIELDLSYNHLSGEVPSHGLFANMSGFSVLGNYALCGGIAELNLPPCEVKPHKLQKQMLLRILLLVSGIVICSSLLCVALFLFKGRKQTDRKNATSDLMLNEKYPRVSYHELFEATDGFAPANLIGAGKYGSVYRGNLSLPSAVNVVVAVKVFTLQHASSSRSFMAECEALRNVKHRNLIKIITCCSSMDSRGNDFRALVFEFMPKYSLDRWLHPRIHEQTHKLSIAQLLNIAVDVADAIDHLHNNSCPTVIHCDLKPSNILLSADWTAYVADFGLAKLVGESIEKSGLSAGDSSTVGIRGTIGYVAPEYGAGGQASVVGDAYSFGITLLEMFTGKAPTDNMFREGLTLHLHAEMTLPEKISEIIDPALLHVEQYDTDAEILTCLSSVIEVGVSCSKENPSERMDMKHAAAKLNRIREEMRYDTIVRVLIPYLAIPKPSGSSLPPPQHRQTTQASIRIWMQ

SEQ ID NO: 113283 - protein, 171 aa, Oryza sativa
  Clone ID: PAT_MRT4530_17086C.1.pep
MKVAMPKDAVIIRPKKLDTRVSSAVPVRLLTADRHQDWPLRLTASAFYQLSLPRNAELASFALPSTDLSSESGKKPGNGRCSFGSPSLPLLTYRYPHLPIEHPIENGRCSTSRDDTRPTSRETSLPAASILYPATNFPMCCLRSPPLCYPPASLSNPAKESPELGHAASVT

SEQ ID NO: 113284 - protein, 50 aa, Oryza sativa
  Clone ID: PAT_MRT4530_17087C.1.pep
MASPAALHRRHIPSPAIRRRPKAAAQPCTGSSAALPLEFSAAGLLCKCVA

SEQ ID NO: 113285 - protein, 44 aa, Oryza sativa
  Clone ID: PAT_MRT4530_17088C.1.pep
MAVEIDSDEQWWASGGEVGDLCGKKRSRAREVRADTVKKVTHDL

SEQ ID NO: 113286 - protein, 64 aa, Oryza sativa
  Clone ID: PAT_MRT4530_17089C.1.pep
RLASRRGLRPARTGGFSPSSGFRGAFLFLGSTVNLKVLFLGSVAMKNWLLVLSLKLRHDDAHVL

SEQ ID NO: 113287 - protein, 444 aa, Oryza sativa
  Clone ID: PAT_MRT4530_1708C.1.pep
MRPSAAAGGGGGGGGRRKAAAAAAAASREWLVVPASGQARVEEAGKHAVMARTGLPARDLRVLDPLLSYPSTILGRERAIVVNLERVKAVITAAEVLLPNSKDPAFASFVCDLQARVLASSSDQAAEFTDMEGESSAVTSPFPALTSTTPNELEMTNKNSNVVGGMTHSNSMPTLTAAKDGNTKVLPFEFRALEVCLESACRSLEEETSTLEQEAYPALDELTSKISTLNLERVRQIKSRLVAISGRVQKVRDELEHLLDDEMDMAEMYLTEKLTRQEISETSSRVEVDDPSQLEVDRDEDYRSEADVSNGTFIGYKPHIEELEMLLEAYFVQIDGTLNKLSHLREYVDDTEDYINIMLDDKQNQLLQMGVMLSTATVVITAGVAVVGLFGMNIGISLYADPTNEEEKRASNMKFWETTLGTIAGCTVMYIVAMGWGKRSGLLQ

SEQ ID NO: 113288 - protein, 77 aa, Oryza sativa
  Clone ID: PAT_MRT4530_17090C.1.pep
KAKRSNKHAPFNCSTEHHDRRLSSSPPLQIGCQHSSPGPQAAVEDWDKGLHGGRDDDGVELLWRRWRRGYCSPPCIV

SEQ ID NO: 113289 - protein, 105 aa, Oryza sativa
  Clone ID: PAT_MRT4530_17091C.1.pep
HRIITVLNRVIVVSIAERASWVRVAIARRLPMVFGLGVYGHYRRGAYGHSNGDADVVLLIASLTRLATGISELSGGKRHVLREQEERRRHDEQHHHGLGRHDHRT

SEQ ID NO: 113290 - protein, 90 aa, Oryza sativa
  unsure (1)..(90): unsure at all Xaa locations
  Clone ID: PAT_MRT4530_17092C.1.pep
KAILAEHEVADNGINYLLXRERVMPTGWNMLXRLWLTVDGVLMQLRTHHMYCSIGSDXAKPMVLRDXVANXGTFASVPAKGYMFDSAAYQ

SEQ ID NO: 113291 - protein, 90 aa, Oryza sativa
  Clone ID: PAT_MRT4530_17093C.1.pep
RAFHHMGIMGQEAWRPQRVLPERSVNILRSWLLEHLLHPYPSDADKHLLARQTGLSRNQVSNWFINARVRLWKPMIEEMYQQECKELEGS

SEQ ID NO: 113292 - protein, 82 aa, Oryza sativa
  Clone ID: PAT_MRT4530_17094C.1.pep
FCYFTALRFDYSAGDSCWHLLHLGILSWLSSQDYSLELIRLIPESEGLEGIGQRCLPHGVGQQILMHYSFRQMLNWEKNVRN

SEQ ID NO: 113293 - protein, 232 aa, Oryza sativa
  Clone ID: PAT_MRT4530_17095C.1.pep
MRINYGEKEITNGTGVRSSAVFTAPHVEIEGRDQTKLYTLVMVDPDAPSPSKPEYREYLHCSRTPYLDNLQDWNAALSKRRGVFLIQPSTAEELLFYMLLVFKKAPYQLLMEKVGDRHPRGNRCTFWWAGVWGVKVEIYEGVTYAKEARQTVYAPGWRQNFNVRDFSAFYNLGPPVAALYFNCQKESGVGGRRNKPSRILFNAEQLFYSLYTLPVSGTKLKAGCNIIQDYKT

SEQ ID NO: 113294 - protein, 192 aa, Oryza sativa
  unsure (1)..(192): unsure at all Xaa locations
  Clone ID: PAT_MRT4530_17096C.1.pep
XCPAVDPRVRMFKLSQDDSTQQECTEAELAYRNRATQYACSLIAKSQELDESRKIFWDTLETGEKALDVFWGVRSLRSQAAKDVSKRDKKKKKSSKGPSTKKAKPTPATSSAVPELLAQTNVHQFQSAQDAQGNTTIGRPLYYQAFSSAPIQPNQIYMHPNMHTMPLCAPQQDFSAYSAMRPNSNFGGAKNV

SEQ ID NO: 113295 - protein, 105 aa, Oryza sativa
  Clone ID: PAT_MRT4530_17097C.1.pep
MTVLAKPTFFPFCNGIISNFYKRQNSSQGSNLTRYMYRTLLLLSKGSKQILCAARRLAIGREWEAGKQYLINEEGDAKDEPSKLAQVKSAWIRGGVAPLSVIGDD

SEQ ID NO: 113296 - protein, 550 aa, Oryza sativa
  Clone ID: PAT_MRT4530_17098C.1.pep
MSKHGFLFFLLFFVQHLHTIISLLDSPGGSLASLPEWQPMPCKSVSVNPLCSSYLYVTPEGRNLSKVASDFSGNASLFQRITRLSGSEDLLVNVPCVCEAINATMTGLFHDTNYRVKDGDMGDIINSKTFSGLALNVGDGQILHKEEKLIIHLPCGCSSTAPEGVLSYAVQDGDTLGNIASLFRSSWKDILDLNPRVANPDFIKPGWILFIPMGVAGPSNKKIDPFQTERPVIFSLRAIEDATSNFDEKRKIGEGGYGSVYLGFIGTHEIAVKKMKASKSKEFFAELKVLCKIHHINVVELIGYAAGDDHLYLVYEYVQNGSLSEHLHDPLLKGHQPLSWTARTQIAMDSARGIEYIHDHTKTCYVHRDIKTSNILLDNGLRAKVADFGLVKLVQRSDEDECLATRLVGTPGYLPPESVLELHMTTKSDVYAFGVVLAELITGLRALVRDNKEANKTKSLISIMRKAFKPEDLESSLETIVDPYLKDNYPIEEVCKLANISMWCLSEDPLHRPEMREVMPILAQIHMASIEWEASLGGDGEVFSGVSNGR

SEQ ID NO: 113297 - protein, 59 aa, Oryza sativa
  Clone ID: PAT_MRT4530_17099C.1.pep
HQLLLLCVTLSARSLIYSCSQSTMLSVVPMSSISQDISREHVLYSAMREHSNQSVNQPE

SEQ ID NO: 113298 - protein, 56 aa, Oryza sativa
  Clone ID: PAT_MRT4530_1709C.1.pep
TTRTESSSFFPFVIEISSLVCKLSKIIPVSITGTLQTKPSFSLSLASTIAHLQNPP

SEQ ID NO: 113299 - protein, 116 aa, Oryza sativa
  unsure (1)..(116): unsure at all Xaa locations
  Clone ID: PAT_MRT4530_170C.1.pep
KKKGFPPNKVAKAIKKIYFSKNKFFQRRVGSFFKPVCWPTQGLLKKRALSXKPPKTVVYKKTKGAGGKKKLVCLGPFPTKPPGRVFSIFTPLFGTPPPFDVFFVSSKPKVPNFVEL

SEQ ID NO: 113300 - protein, 56 aa, Oryza sativa
  Clone ID: PAT_MRT4530_17100C.1.pep
PRLLIADAPHIQVILDLESDRLGTSTHGGVSVCVHMIHPIHSSALLAAVHGSAHVI

SEQ ID NO: 113301 - protein, 151 aa, Oryza sativa
  unsure (1)..(151): unsure at all Xaa locations
  Clone ID: PAT_MRT4530_17101C.1.pep
MLTLSAFSMLAMQDYTAKLSDFGLAKGGPXGDATHVTTRVIGTHGYAAPEYILTGHLTAKSDVXVLLELLTGRRGGREQNLVDXARPERVKDPSLEGGYSNKAASKAAMVAYHCLHSVPRSRPHMRDVVAALEXLQTCGDVPAGPFVYTVP

SEQ ID NO: 113302 - protein, 125 aa, Oryza sativa
  unsure (1)..(125): unsure at all Xaa locations
  Clone ID: PAT_MRT4530_17102C.1.pep
KKTGGGGPPGLPPKFPPPPXKFXSSLXFNQNXPPXXPXXXFLTKPFPLEXGXKKTPWGXFFPPTLLNSPPFGXXKNXPPLFPPXPXGGFFFXXKKKGPPPPNFSPPXPQKNFXPPPXXKLGKMEK

SEQ ID NO: 113303 - protein, 403 aa, Oryza sativa
  Clone ID: PAT_MRT4530_17103C.1.pep
MAAARALLPVGGAAAVAVPRRLRSREASSTSLSGPVSDGARLVRRMQLRPAPLLGSSTCALPSLRGKRLIRTPAASSSSSLDSTGEAKPVGFAERYPALVTGFFFFMWYFLNVIFNILNKKIFDYFPYPYFVSVSHLLVGVLYCLVGWSFGLPKRAPINSTVLKLLFPVAVCHAIGHVTSTVSFAAVAVSFAHTIKALEPFFNAAASQFILGQQVPLTLWLSLAPVVIGVSMASLTELSFNWTGFVNAMISNISFTLRSVYSKKAMTDMDSTNLYAYISIIALLVCIPPAIIIEGPQLVQHGFKDAIAKVGLAKLVSNLLVVGLFYHLYNQVATNTLERVTPLTHAVGNVLKRVFVIGFSIIAFGNKITTQTGIGTCIAIAGVALYSYIKAKIEEEKTQMKSA

SEQ ID NO: 113304 - protein, 88 aa, Oryza sativa
  Clone ID: PAT_MRT4530_17104C.1.pep
WVIVGVKCFKSCYTCLFNPNKWTELDLLATYCLQAFQAINDPARNFKKLTKSCCLSRKHTFSREAFMSQARYIVRQSLSLDTSIFYFF

SEQ ID NO: 113305 - protein, 120 aa, Oryza sativa
  unsure (1)..(120): unsure at all Xaa locations
  Clone ID: PAT_MRT4530_17105C.1.pep
VGDASGVDHLHCALSHYKFVLAIDNTGTESCVTEKLFYAFXAASLPIYFGAPNGWDFIPANSIIDAXKFISLRQVALYAKSGANEPLXYSGYHAWRRCCTLGNFGRSGEKSLYTLPLPTF

SEQ ID NO: 113306 - protein, 544 aa, Oryza sativa
  Clone ID: PAT_MRT4530_17106C.1.pep
LSEMDFFTEYGEGNRYKIEEVIGKGSYGVVCSALDTHTGEKVAIKKINDIFEHVSDATRILREIKLLRLLRHPDIVEIKHILLPPSRREFKDIYVVFELMESDLHQVIKANDDLTPEHYQFFLYQLLRGLKYIHTANVFHRDLKPKNILANADCKLKICDFGLARVAFSDDTLCDASLLRVHIRELIYREILEYHPKMLRAIDIWSIGCIFAELLTGKPLFPGKNVVHQLDIITDLLGTPSPETISRIRNEKARRYLNSMRRKKPIPFTQKFPNADPLAMRLLERMLAFDPKDRPSAEEALADPYFKNIANVDREPSAQPITKLEFEFERRRITKEDIRELIYREILEYHPKMLREFLEGTESTGFMYPSAVDHFKKQFAYLEEHYAKGSTAAPPERQHNSLPRPCVVYSDNRPQSTASVTEDLSRCLIRDNNLKSQDSASVGASRIPQGAAARPGKAVGSVLRYGNCSTSAAEQQYEQRRVVRNPAIAPNSSVPLGSSYPRRNQTCKSETGDVERIDSSQTGPPKPYVANKLPATVDGRSGHW

SEQ ID NO: 113307 - protein, 92 aa, Oryza sativa
  Clone ID: PAT_MRT4530_17107C.1.pep
MGSAAIALGEDKEQRRLRHSNAGELQPAIRTEDGFLELAHPREIATAEEACYAKSEKNPTPFLLTSSCRRKVKEVGELMTGKPVTEALVGRS

SEQ ID NO: 113308 - protein, 75 aa, Oryza sativa
  Clone ID: PAT_MRT4530_17108C.1.pep
TQHVTPSINKAWTQHRRQIQLAAQSASTSMNKASTSTTNSDLSPHHHPVKYHTSTCKNKLSREIKILIGEEIKQK

SEQ ID NO: 113309 - protein, 45 aa, Oryza sativa
  Clone ID: PAT_MRT4530_17109C.1.pep
SLIIQSIAKHHEYHPKVESERQSLYYPTALIIVPRTYFIKQTKYK

SEQ ID NO: 113310 - protein, 307 aa, Oryza sativa
  unsure (1)..(307): unsure at all Xaa locations
  Clone ID: PAT_MRT4530_1710C.1.pep
MAKKTLCKFVAPSAGNMPDGTHASMGDGDFDMKISLVKMAQACPFCGKPKEDAKQCFYINRATVNTRNKRSTAFLSKFFPMGKTNALHGRISSFQQMRDETILEAWERLQEYVTTRPHHGMDEWLILQNFFKGLTPSSWDHLDAVAGGTFFSRTRLDNNDKDAKMGTVKALGSHMACEVYGNDGHSRTDRPKTRENVMLMNNNNGYRPQGDQGWSITPWGRSRTERTHKKVKVKPQRTDSLNAFVMNFLEQEETRNRQHLRPASKKLGIQAGQLMFPATKRQLPAPKTKKVWRVKEKTXFLYLQNWL

SEQ ID NO: 113311 - protein, 89 aa, Oryza sativa
  Clone ID: PAT_MRT4530_17110C.1.pep
GSVKRRPIAAKPTSSPVDVRQGCHVDARRRDTASPPGRGRQCSANSKAMSVSLTRLSRPRSAHSYAIVGWYVFVRAAHTDYPIFTTSED

SEQ ID NO: 113312 - protein, 46 aa, Oryza sativa
  Clone ID: PAT_MRT4530_17111C.1.pep
KRSPEIPGSSKLPIHRTNFGRNLTCVGNTDLSWETKQGSTYHCIQN

SEQ ID NO: 113313 - protein, 95 aa, Oryza sativa
  Clone ID: PAT_MRT4530_17112C.1.pep
GLSPLHGSCNAAPSASSTYPTTSMRGPSLAPSLYSPPSVSSTSLATASPTGSPHTSSPIKTSSCSCSRTSSPNHRGNNQTVSGRRAASGRRSGGG

SEQ ID NO: 113314 - protein, 179 aa, Oryza sativa
  Clone ID: PAT_MRT4530_17113C.1.pep
MDSLFGALQAFLPPHLHRLDQSSNLFELIPAVFLASPTICYLNLFSHLLGPLPAACRSQSLTYLRLSAANVVTVRNLQGSCNAAPSASSTYPTTSMRGGRRWAEQRRVSANVGGGLSAGGPARPAAGERGSGQRAEGGERQAERRRIEQRWASAEVDLGGRRLAALFFNKHERLAAGGG

SEQ ID NO: 113315 - protein, 55 aa, Oryza sativa
  Clone ID: PAT_MRT4530_17114C.1.pep
FPKKKATTVLMTRTIFFLEEVDEWQRYSVAPNSLLIDMDSVLTVQGETWMAYCAA

SEQ ID NO: 113316 - protein, 50 aa, Oryza sativa
  unsure (1)..(50): unsure at all Xaa locations
  Clone ID: PAT_MRT4530_17115C.1.pep
YARNVPPTISLEPTLLLSXRWYYIXEVVLYXVILISNHMTLLLLISPSLV

SEQ ID NO: 113317 - protein, 189 aa, Oryza sativa
  Clone ID: PAT_MRT4530_17116C.1.pep
MPLRGPPLPPPRRATSAAPERAAAASAHAAPVRCFATASARKEEWIRARKYAIFDLAKYVFEEEDPVVDYVLVFRAANWRLATHGGRRLTPDGATGDGRRPARGGDTGIGVPRRSSRRRRGAAAGSGQEAGGRARLRGPAGQRTRRRGSGRQESAAAPSGRRRAGDAQLCEREPARAQGEQAAGGQRQR

SEQ ID NO: 113318 - protein, 106 aa, Oryza sativa
  Clone ID: PAT_MRT4530_17117C.1.pep
MARGAAMMRRTTRGLSDEVAGVKVHRDEADGEGAQSNSFPKAHLGHPRVDYDPQPRPRKFAGPRLCSPAGIDYDKNLLKKTDRDLNASPNGIAVLVLTSMPSCCYV

SEQ ID NO: 113319 - protein, 90 aa, Oryza sativa
  Clone ID: PAT_MRT4530_17118C.1.pep
PKERNREPLRITSVKIPSPLSLPYTHYRGGEATNNKRKRTVSRILRQKRPCILLVRCRLDYSDLEFLVIAALPSLAAMVAKQSGSLRYCR

SEQ ID NO: 113320 - protein, 36 aa, Oryza sativa
  Clone ID: PAT_MRT4530_17119C.1.pep
VRLPALGKGASHERIALHVVVGAAEGGGATVPGRVV

SEQ ID NO: 113321 - protein, 169 aa, Oryza sativa
  Clone ID: PAT_MRT4530_1711C.1.pep
DRSLFSLQELELCKCYYTDHLPPLGQLPNLKQLKLTSLWKLRSIGPEFYGDCEAPFQCLETLVVQNLVAWEEWDHRIIVQQVRDHSWAQERCEVTAGNGGLQAGQTNVLPSLRRVKITACPSLEEPLISMLRRQTEIGFSYWEQSPSTSPTDIADFGKTPWKDSGKDTF

SEQ ID NO: 113322 - protein, 129 aa, Oryza sativa
  unsure (1)..(129): unsure at all Xaa locations
  Clone ID: PAT_MRT4530_17120C.1.pep
MLNDKDISPSDIHNNSPPFIQGPITRACVRQLNLEVSSFLFSFLYDFENRLLPNYYIKIRNNGEDKETLREGLRGMEDQQRRPSQDGGPSQIDFXTSRSLGLVCSKTGFXVAYVLGLGRSLYGWKAKKI

SEQ ID NO: 113323 - protein, 34 aa, Oryza sativa
  Clone ID: PAT_MRT4530_17121C.1.pep
YTLPPPVLKHRDSCELSGLHHLASHRTVGPTANG

SEQ ID NO: 113324 - protein, 395 aa, Oryza sativa
  Clone ID: PAT_MRT4530_17122C.1.pep
MGRAPAKRKPSSPPPPPPPGRCHFWLPNKRRHCANTPLPTSHTVLEENLEAHVGKCPLKKQAAALAAQPFYSKGINSGGGEGGGGVTSAAKRALVHKLTKDELRALIEKIKLAHASAAMAMRDSFLVTDACDNWMRNQVDRKVPYQEKHVTQQASIIGNMEAFGLLQKGGEVAEENGVKNAPAVVEFGAGRGYLTQMLADCYGIRNVFLVERRSYKLKADRSLRQNEGVTLKRLRIDNMTMMCCLHERYNQAHEKEYGKSNLCGLALATCCHHLCQWNHYANKTFLSGLGITEEDFHTMTWFSSWAVDGDHSSPDSSLEVEDSSVEDRCGKAEKSDVEVSGIDRLIRSIPAGERAALGFMCKDIIDTGRLLWLREKGLDADLDEKEAYMFHFEPD

SEQ ID NO: 113325 - protein, 384 aa, Oryza sativa
  Clone ID: PAT_MRT4530_17123C.1.pep
MASSSSSSSLCRLLIPRPTTRRFSGGGGEGGMAAAAPVKREVKPEAGEGWGGGDLGVVPPPPRPMEGLGEAGPAPFVAKTYEMVADAATDAVVSWGPGGSGASFVVWDPHALAAGVLPRFFKHANFSSFVRQLNTYGFRKVTPDRWEFANEAFLAGQKHLLKNIKRRRVSKPLVDSQLRNKASVVFGQPEAPGEVVSLKRDRAALRAEVIMLKQQYNACKSQLIAMEEMVRNIERRQQQTIGFFAKVLTNPAFVQQVLLNYVNKNGLRGAAKRQRLMENEEQHADSPLNKGMEAASVMEADVSPGSTGCGTVGKVETTPMCNFQNIENMCDDVWEELDALPETGMEQEEKAGIGSFDVEEFVGRPCGWVDDCPYLVEPMQFVEH

SEQ ID NO: 113326 - protein, 613 aa, Oryza sativa
  Clone ID: PAT_MRT4530_17124C.1.pep
MGDRTKVIPDFSALRGAGGEGKAGEYWHHEATQTWFDDADQYRMISAMCRLSCSVCDSNKEEEEERTGKAAKAKRKSKIRSVDQLKGHLLDRHGLYMCDLCLEGRKVFICEQKLYTMSQLNQHIKSGDSEVDGSEVERRGFGGHPMCEFCKSPFYGDNELYTHMTREHFSCHICQRYSARLQSLSYLVRQQHNADFVIVNRQHSGQYDYFRNYDDLERHNGVEHGKHMPGAVDSSSSSMQNGIAAVGHGLGGQSDSSRVPLQSLSISSSSGQSSETRQSFARNRVLQQACVPPLSRQEVHDARVGSVLQEASFPSLPAQSRKAPAHSQSSRTAARIGDQQFRPLSVTSNRNVALAQQGTRTLPENTHVSGLAQYSKRTENMHQAVQPQFLKNNSLIPSGSTSRPVHVPSSAGNERQDTFSNSQVLSSVEDILAANKALVEKMRAALGMDQDMFNAFKEIAGEYRQGVINSSEYLSYVKQFGLLHLVPEMARLLPDAQKQKELADAYYANLRLTSLQENGGGGTDNSKQGNQNKKGKGGVPDAIGTSNAATDPLKDKLLNTAIKFQSNYMPQEGCCGVQRKEGRTTDGSSQGLPLKGAWQSRGGQRLFMSKAKK

SEQ ID NO: 113327 - protein, 215 aa, Oryza sativa
  Clone ID: PAT_MRT4530_17125C.1.pep
RSLRQNEGVTLKRLRIDIEDLNLQGIEALSGLHYLAIGKHLCGPATDMTMMCCLHERYNQAHEKEYGKSNLCGLALATCCHHLCQWNHYADKTFLSGLGITEEDFHTMTWFSSWAVDGDHSSPDSSLEVEDSSVEDRCGKAEKSDVEVSGIDRLIRSIPAGERAALGFMCKDIIDTGRLLWLREKGLDADLVSYVPSNISPENHLLIAKCTSLSG

SEQ ID NO: 113328 - protein, 118 aa, Oryza sativa
  Clone ID: PAT_MRT4530_17126C.1.pep
GPEDPGRPTRPPLQIAMTWKPNGGSGKNQPTGAPPKGKRWANATATTRQRASTRQGDATSGGPGQRARRPQTSTRTGGPWNPETGARSRARGNPPTSSGGAGTTTSAARAGEPSSGAR

SEQ ID NO: 113329 - protein, 487 aa, Oryza sativa
  unsure (1)..(487): unsure at all Xaa locations
  Clone ID: PAT_MRT4530_17127C.1.pep
HPPPPSPPRLPXIGHLHLIGGLLHVSLRELAHRYGPDLMLLHLGQVPNLIVSSPRAAEAVLRTHDLVFASRPYSLIADILLYGPSDVGLSPYGEXWRRRIITTHLLTNKKVRSYRVAREEEVHKVMAKVHELSTKGMAVDMTELFSTFSNDLICRLVSGKNFQGEGRNKLFRQLFKANSVLLAGFNLKDYYPGLARLKAVSMVMCAKARNTRKLWDELLDEIIDERMSKQQCEHDEGNDQDEMNFVNVLLLQEQGITREHLKAILVDMYQAGTETSSVVLVFAMAELMQKPHLMAKLQAELRTTIPKQGHELITERDLTDMTYLKAVIKETLRLHPPTPLLLPHLAMADCNIDGYTVRSGTRVIVNAWAIGRNSESWEAAEEFLPERFVDDGSAANVDFIGTDFQFLPFGAGRRICPGINFASASMEIILANLLYHFDWDVSAEAAIDKDGIDMAEAFGLSVQLKEKLLLVPVDYKDGMQDSAVILL

SEQ ID NO: 113330 - protein, 66 aa, Oryza sativa
  Clone ID: PAT_MRT4530_17128C.1.pep
SERNRDLTARSNQANRSHAIANSTRITKDLITRKIAFFSLSYSTRLGYTRQQDLRHKYPPKRSESK

SEQ ID NO: 113331 - protein, 48 aa, Oryza sativa
  Clone ID: PAT_MRT4530_17129C.1.pep
KVKKKVTKEILKGDLSLNRLFMLYLSPSPPFFCACEKAICQTCLCKKN

SEQ ID NO: 113332 - protein, 179 aa, Oryza sativa
  unsure (1)..(179): unsure at all Xaa locations
  Clone ID: PAT_MRT4530_1712C.1.pep
MATVRAHPPAPPSPVQAPAPAAPPPVSVAARPQAPYYYYCHGWKEGVAESRCPTTDAAAAAAAANGGVIELSSSDSSGGGGGAGRWDDDDDGCSSCVDGDDGAAAGGGGAGRRRDEEEKGRSQQFGSWWSXMTAAAAAASSGRRRRXDNGDDEDPAAAAARRQEEDRKFWEACLASGLP

SEQ ID NO: 113333 - protein, 456 aa, Oryza sativa
  Clone ID: PAT_MRT4530_17130C.1.pep
MSSPPSSGSERSLASLVSAAAHSVKLNRAYLLAPAVAAGLLAAVLLSSLLDFSAFSASPRPAFPPPTAGAPANASALSAPPRAPVRTALDTLGTRPREPFTALRDAYARWDAAVGCAAFAEKHRSRSSPPPGPAALQDPEAAPCGSLRLPHVALAVRGVTWVPDILDGVYQCRCGLTCLWSRNEEALADTPDVVLYEIWPPPDTRKQGEPLRAFMDIEPTRKRSGHEDIFIGYHADDDVQVTYAGKFFRITHNYHVATHKRDDVLVYWSSSRCFEHRNKIARELFRHLPAHSFGRCENNVGGGDKALELYPDCARDGHGAAEWWDHLHCAMSHYKFVLAIENTIADSYSTEKLYYALEAGSVPIYFGAPNARDLAPPGSYIDGAAFASAEELAAYVREVAGDPAAYAEFHAWRRCGVLGGYGRNRLVSLDTLPCRLCERASRMGGRHAPAPNATVS

SEQ ID NO: 113334 - protein, 90 aa, Oryza sativa
  unsure (1)..(90): unsure at all Xaa locations
  Clone ID: PAT_MRT4530_17131C.1.pep
TGPPGTARPKPGRAWAEASRANTAQARPNTTRIVSGRPEGTIAHRRPTVARVQPRHGSVVGAGQHRHDSSXAEPCLGRTKMACFGPDHRP

SEQ ID NO: 113335 - protein, 76 aa, Oryza sativa
  unsure (1)..(76): unsure at all Xaa locations
  Clone ID: PAT_MRT4530_17132C.1.pep
MHPCAMSTAAKIGLTCTKLGSHLFVQNDTRILTXGLDAAGXTTMLYKLRLGEIITTIATIGSNATSAEPITLAAPF

SEQ ID NO: 113336 - protein, 180 aa, Oryza sativa
  Clone ID: PAT_MRT4530_17133C.1.pep
MAGERRHDGGAHGEGAAGPIGDATGATVGDDADDRAARRGPRRDSARGSARRRDGEAARQRNGDGDAAAAAARGSERRWDARGDGMGGDGAAAVARGTRRDAMVTATARQRRHGAQGDATGGSGDATAGGTARGDSGTAAGGDGDGSGREARMAGKGKGLGDTVEHVAADEQCTFLFFSF

SEQ ID NO: 113337 - protein, 59 aa, Oryza sativa
  Clone ID: PAT_MRT4530_17134C.1.pep
FIIVKDTIGPKQQHIGWITWLKLSPQKTSTDSASTSNVIIFTRPNDNYEYKPPTEDLFF

SEQ ID NO: 113338 - protein, 141 aa, Oryza sativa
  Clone ID: PAT_MRT4530_17135C.1.pep
RFAPRRGFFGPFQVVFSWGRLQGTKIPPGLLGRPRSAPKAFVFWWKLCPRLLFKRSFPWWWRVFLCALALARPSYPPPCNLVCFPLVAFSRASETPLLNFPLPVRDSCPMESDFWFWAPLFFLLYPSRGGIRVACASTYSD

SEQ ID NO: 113339 - protein, 280 aa, Oryza sativa
  Clone ID: PAT_MRT4530_17136C.1.pep
MTPRIMRVPLIPSISLSLRICFWDFFRFVSMRSWVEKRLIKGIAGGRYLSSIWFLVLTQGLPFAIVQRYLQGIVLSVSVEDGKGNKSSVTVRLYGPNTALVIDRKKEMQKERECHDGAEHIPDWPYGEQMDRWGPKPARLLWVPSSQSNVGLLRGLQYRDRCACSRPLAKKYTLELLFASSPPSVTAAAMKECVLDEYSTKHRISIDRFLQLKIFVKIAILDSVNMGGGRDILRKERSSKAWLKNSIHPWYLRYIMFQPLKESCIHSGDSNFLDLEWLST

SEQ ID NO: 113340 - protein, 169 aa, Oryza sativa
  unsure (1)..(169): unsure at all Xaa locations
  Clone ID: PAT_MRT4530_17137C.1.pep
SFCAIYSSQWGPKPARLLWVPSSQSNVGLLRGLQYRDRCACSRAEIXAAMPTKMPLAKKYTLELLFASSPPSVTAAAMKECVLDEYSTKHRISIDRFLQLKIFVKVTAYVRCLSSRNLHLPWMLLLHKQNNIIAGIHPWYLRYIMFQPLKESCIHSGDSNFLDLEWLST

SEQ ID NO: 113341 - protein, 177 aa, Oryza sativa
  Clone ID: PAT_MRT4530_17138C.1.pep
MASYCSDRSSGSSHPSSRAPIPARVGPYDYQPAVMCRCGAKAARGISGSVDNPGRWYYRCRNRGAGCDFFDWYEPATSSFLRELLNDLHEAVLSLRREKNELQHCVEELRPKVEEQCLELGVAMNEVAQLRIVAAENEANMAAMRASNSRLEKQRVWLVLMSLGCMLVLFAMILVQL

SEQ ID NO: 113342 - protein, 272 aa, Oryza sativa
  Clone ID: PAT_MRT4530_17139C.1.pep
KMGSFLRKQPSFLLILLILHLGAREASALSSDDEAHLAFKKAVTTSDGIFLNWREQDVYPCNWKVACFFHSHYKSGQSSTYQKNGLCLKTFPNRAIICVDVFLRSSIIIPYDEMDIRLIYLYRDLFLKIFSAKRVKRVRSYGNILCESNTSISGCSGCHNGDKELLNAVLLDVKSGSQFPVLESNSVHGNEISLTSESEVSNLRYTPMVPQIHHVLGVETESCIHSGDSNFLDLEWLSASGNSSDERSIAISTPDVNLSAENVIATMSSFDW

SEQ ID NO: 113343 - protein, 1012 aa, Oryza sativa
  Clone ID: PAT_MRT4530_1713C.1.pep
KECNSNAASRGQYQNFHEIPPDDADFNNLTIYLKSASPPAGGAKLDRTVRRITAVLVDADEREIADETMKLWISELKQVTWEAEGILEDYSYELLRSTPVQEEKNILDRISKVRKFLDEICRDRVDLGLIDQEGLCRKESRISRCTSSLLDPLEVYGREDEKKLIISSLLDGCLTFKKRRLKEHEYETCKAGAVRLISIVAMGGMGKTTLARLVYNDARVQNHFDIQAWVWVSEVFDEVRLTKAAIESVTAKPCDLTELEPLQRQLHEEVKGKKILLVFDDVWNEDTIKWETMKRPFSAVATGSHMIITTRNENVSTIVQAKKVIHLGGLQKDDSWALFCKLSFPDNACRETELGPIGRKIVEKSDGVPLVLKTLGAMLSLDTSLEFWNYVLTSDLWELGPGWDHILPILKLSYYSLPAILKRCFTFLAAFPRGHKFDLEELVHMWCALGFIQEDGVKRMEEIGHLYVNELVRRSFLQNLQLAGSREKFVIVHDLIHDLAKSIGGKEILVKKCCGSSVGGCNTSANNHLRYLAVLVGTTPFYSDNKLVPFTLPVAGHFPLRSLSFQSKWRTYLRSCVRNNLRTFFQVLVQSQWWYNLEGCLLHSPHLKYLRILDVSSSDQIKLGKSVGVLHHLRYLGICQREIPEAICKMYKLQTLRNTYPFDTISLPRNVSALSNLRHLVLPREFPVTIPSGIHRLTKLQSLSTFAVANSGSGAATLDEIKDINTLQGQLCIMDLQNITHDRIWEPRSANLSKKKLTRLELVWNPLPSYKSVPHDEVVLESLQPHNYIRQLVISGFRGLNFCSWLGDRSLFSLQELELCKCYYTDHLPPLGQLPNLKQLKLTSLWKLRSIGPEFYGDCEAPFQCLETLVVQNLVAWEEWWLPENHPHCVFPLLRTIDIRGSHKLVRLPLSNLHALAGITVSSCSKLETIVGLKERCEVTAGNGGLQAGQTNVLPSLRRVKITACPSLEEPLISMLRRQTEIGFSYWEQSPSTSPTDIADFGKTPWKDSGKV

SEQ ID NO: 113344 - protein, 147 aa, Oryza sativa
  Clone ID: PAT_MRT4530_17140C.1.pep
MASYCSDRSSGSSHPSSRAPIPARVGPYDYQPAGAGCDFFDWYEPATSSFLRELLNDLHEAVLSLRREKNELQHCVEELRPKVEEQCLELGVAMNEVAQLRIVAAENEANMAAMRASNSRLEKQRVWLVLMSLGCMLVLFAMILVQL

SEQ ID NO: 113345 - protein, 177 aa, Oryza sativa
  Clone ID: PAT_MRT4530_17141C.1.pep
HGFTKIVQQLPQKTACCGLIPVKKIAAGALKTLHPKSPNHTASSNKNQASKRNLHHSPDCGIGSTIDQGCPRSRKSTVPPSHHIGTSPPADNHRAQLAPGWEHDCWDATTPTTGHCNNSPSPSLTSSCRPRRRRRRFRRRRRPKLGFQLEKRKMSRQRLETARTEPLTPSINSPMVD

SEQ ID NO: 113346 - protein, 78 aa, Oryza sativa
  Clone ID: PAT_MRT4530_17142C.1.pep
MAVENIVGISLQDLHRNSIIGGFNKFVTSVLTISIEVQCQEQWFPISPSTGIIGRMKSIFSAKAASRPAPVCTHKEMK

SEQ ID NO: 113347 - protein, 120 aa, Oryza sativa
  Clone ID: PAT_MRT4530_17143C.1.pep
MRGAITHGRPVIMTVPGGVRSDVVPGAAVGDMGPGPLGLSTHDRCIPGSMSPQKSSRLNEGMTGDVPRVRWETALGPTTEVGAATVPNPSRAAPMSDPRRTAPCRSRVPRRVHSAAIPLP

SEQ ID NO: 113348 - protein, 39 aa, Oryza sativa
  Clone ID: PAT_MRT4530_17144C.1.pep
MTELKWNGQREVPGKSARNFRAELRNFFEHSNWEVSLHS

SEQ ID NO: 113349 - protein, 81 aa, Oryza sativa
  Clone ID: PAT_MRT4530_17145C.1.pep
RPTATVERRGSDRARGSTAWQRDRYCYCDATGTARGTMGPEGARQLRAQSETTGRGAFKRPRRRHHGVRGDKAQGSGTGRL

SEQ ID NO: 113350 - protein, 54 aa, Oryza sativa
  Clone ID: PAT_MRT4530_17146C.1.pep
LKFSPQIVSNGTLVFDSGTNVVSEMLFPEGKFRCHLPIWTWIKTNHICHLKITV

SEQ ID NO: 113351 - protein, 79 aa, Oryza sativa
  Clone ID: PAT_MRT4530_17147C.1.pep
HELNTTFEGSDRGWVLILDISFRFVFRLKPFIFTSQKQLPNQFTHSRQSLFSVRILRQAWTGQPSPDCSSGIMPSMIIT

SEQ ID NO: 113352 - protein, 347 aa, Oryza sativa
  Clone ID: PAT_MRT4530_17148C.1.pep
MELLRDSIPMVSLASSAAALYARVASAFLRPGLPRLAALLPVVALLAAAPLAFTSSAMLRGTSAFFLAWLGAFKVVLLASGLGPLAVDGLPVLSFLFTALLPVKLRRGGGCPGAAAKSVSLVSCAAKVAAIATILHLYESKIQLLHRYIRLAMYGIHIYCFLDLLLPCIAAAGSALGMELEPPFDRPYLASSLRDFWGRRWNLMVSAILRPSVYDPVRARAGKAAGVVATFLISGLMHEAMVYYMTLRLPTGEMTAFFLLHGVCCVAEEWCARRWVARRWPPPPRPLGSLLVMAVAAGSSFWLFFPPICREGSEEMLLEEWAAVAAFFQDAGRKLRRAPGHWGLPKG

SEQ ID NO: 113353 - protein, 45 aa, Oryza sativa
  Clone ID: PAT_MRT4530_17149C.1.pep
MVMCELRWQELSLGAQPVHSVSALRAAGQQDIQALDITWILRASR

SEQ ID NO: 113354 - protein, 88 aa, Oryza sativa
  Clone ID: PAT_MRT4530_1714C.1.pep
LVGCAAAGCLLGCCLLASSLRRPPACLARLPPAYLAASLQAPAGGRRPACPLGDGKAGTTPPPDHHGDDAPVESIAEEVLEEPVQCLE

SEQ ID NO: 113355 - protein, 929 aa, Oryza sativa
  Clone ID: PAT_MRT4530_17150C.1.pep
MALYFSPLVLSPDSGSSLLSPQGFSKFHCHQEHTGFSGLEVWRIENFKPVPVPTSSHGKFYMGDSYIILKTTALKNGSFRHDLHYWLGKDTSQDEAGTAAILTVELDAALGGRAVQYREVQGGETEKLLSYFRPCIMPQPGGVASGFNHVEVNQQDHVTRLYVCQGKHVVHVKEVPFVRSSLNHEDIFILDTANKIFQFNGSNSCIQERAKALEVVQYIKDTFHEGKCEVAAVEDGKLMADTEAGEFWGLFGGFAPLPKKTSSEDNGDDKETVTKLLCFNQGTLEHISFESLEHELLETNKCYLLDCGAEMYVWMGRGTSLQVRKGASEAAEKLLIDENRKGSNVIKVIEGFETIMFKSKFNKWPPTPDLKLSSEDGRGKVAALLRSQGLDVKGLMKAAPEEEEPQPYIDCTGHLQVWRVNGDGKTLLSSSDQSKLYTGDCYIFQYTYTGDDKEECLIGTWFGKKSVEEDRTSAISLASKMFQAAKFQAAQARLYEGKEPIQFFVIFQSLQVFKGGLSSGYKNFIAVNGTDDDTYVEGGLALFRIQGSGSENMQAIQVDAVSSSLNSSYCYILHNGNTVFTWTGNLTTSLDNDLVERQLDVIKVTGGTTISGVKLGISRYKVKEIHHFTQDDLMAEDIFVLDCRTDLFVWVGQEVDAKLRSQAMDIGEKFLLHDFLMENLSQDTPIFIVTEGSEPQFFTRFFTWDSAKSLMHGSSYQRKLAIVKGGATPSLDKPKRRTPAFSGRNAGQDKSQQRTRSMSHSPERHRIRGRSPAFTAIASAFENPSTRYLSTPPPAVKKLFPRSGGSELPKTSSKQSAINALTSAFEGPTKSTIPKSVKASPEAEKAIQEEGSTIGESENEPEDDENSTIYPYERLTTTSDDPAPDIDVTKREVYLSSVEFTEKFGMTRASFKNLPKWKQNRLKSDLQLF

SEQ ID NO: 113356 - protein, 271 aa, Oryza sativa
  unsure (1)..(271): unsure at all Xaa locations
  Clone ID: PAT_MRT4530_17151C.1.pep
MGGPQAADLAWLQGRIPSSPSPKPSRRGRPLPPPRRRAAEASSGRRLTPEASTATADAEQLRDQDIGNAIELINTKMQLQLLREDDEDECIIDRQLREFNDRFDEAEGARIHYRGAFVVVVVVIAAIFLSPSCIGGGSGGQPSARLGTASGGGDSSSPSAGACLLDGCVASPRPPLVHVEADSGGAVELERQGRLLLSYLGNHMCTLAEAIMSILSVASHRCVMSVAATKDEHMCWSSVARFGNTPAIEXTRPTNATIALSIIACRPTTVL

SEQ ID NO: 113357 - protein, 109 aa, Oryza sativa
  Clone ID: PAT_MRT4530_17152C.1.pep
MEPIEEPSGKLFPHFMIPEATAGITSSCIGHESVRVIACLLCDDGVLEKQEIVAQSNFNILRSLASGENDDDDEEDATLLSLLHQQLVIRELFLDARGLGHVGICCNLK

SEQ ID NO: 113358 - protein, 146 aa, Oryza sativa
  Clone ID: PAT_MRT4530_17153C.1.pep
MKGYFRQPEATRATLTEDGWLNTGDIAKLDHDDQLYIVGRSKELIIRSGFNIYPPDVEAVINEHPAVTLTAVVGRQIAGNEEVVAFVQCEPGVEVDMAELKAFIAERLAPYKRPTQIVLMDTLPSTASGKILKGRLRDLAQQESAS

SEQ ID NO: 113359 - protein, 127 aa, Oryza sativa
  Clone ID: PAT_MRT4530_17154C.1.pep
GCNVTWSQREELISCSCNMFESAGILCRHGLRVLSTLNYFQIPDHYLPPRWRRTWPSPSKALNGAYFHESPEIGRVKALQSMVSALVSEASKSTERMDIATREVSALLSRMRQQPVVMHVSGDGVHK

SEQ ID NO: 113360 - protein, 525 aa, Oryza sativa
  Clone ID: PAT_MRT4530_17155C.1.pep
MVSHWRRLIADNEHRKKLPQTLSGFFYESMNHERCPYTARHFTNVTGKGMPLVSPTFSFLPQCHDVDLLDCCNGLLLCRCYVSRGTFQFHYAVCNPATKEWVMLPDANWAIEENHTACLCFDPAISSHFHVLEYVEEDEDSYVTLVTGVEIYSSETGLWTLHENGWNDEVVISLSVNRRSVLLNGFLHSVTPADEIVAVDIEGKKWRKIPMPDPDGDIGIIHQTQGRLCAFNVDPNDIFKLSIWFLQDYDTDNWILKHTVGSMKLFGGKKYQLDYDYQVIAVHPECNLIFFVYGWHNTLMAYEMDRKEVRVIRKLGHESCQSYLPYVPMFSESLPNGRWRRRECKQEHIQLCTNKKLHNILDFKGFSARQTSGIPPGIWNLPKLQYLFLYTNQLTGDVVVNGKIGAASLIYLDISENQLTGTIPESFGSLMNLTNLVLMANNFSGEIRASLAQLPSLVIMKLFENNLSGQLPAELGKHSPFLRDIEVDNNDLTEPGVCDNFIITGELGREEGENDMWGPRGSYHF

SEQ ID NO: 113361 - protein, 60 aa, Oryza sativa
  Clone ID: PAT_MRT4530_17156C.1.pep
VITSMEDGGVTSHYHRPLATVLGRRVDSSCVLPFLGRLSQAYHMGDGVMIIGPCYCRKNK

SEQ ID NO: 113362 - protein, 115 aa, Oryza sativa
  unsure (1)..(115): unsure at all Xaa locations
  Clone ID: PAT_MRT4530_17157C.1.pep
MVLGTSRGGFDLTRIVDAIEWHRFNQVYDVGADNIMRGAVTIHHEVQQQRLAVVVAGIPKTEAITVWHVEAESAANGVGLIKLMGWSASHIALHTMLXSAVDCCLIPVEDLTSFL

SEQ ID NO: 113363 - protein, 516 aa, Oryza sativa
  Clone ID: PAT_MRT4530_17158C.1.pep
MAAAAAATWRLWRPYSSALLSRRVNPRFLRTTPCVSYPGGAAASAAPPSPPLATTCSDDWGGGMRWESARKKRVVLRVGYVGTEYRGLQKQRELSADSTIESVLETAIFKAGGILESNYGKLQKVGWERSSRTDKGVHSLATMISLKMEIPDRAWENDPDGIALSNFINSNLPDNVRVFSVLPAQRSFDVRRECLYREYLYLLPAEIIGIKGGCSSEEVMEHLSEFNSILKGFEGNHPFHNYTARAKYRKVLAGRHRKVKGASSAVNSMPTEMSLDQSSSDDGTTSDHDEEDLNSSSIIGSSVPEDSYKDNPEFSEKQVQIRARWLHEPDENDRLNASHFRDILTFSCGELQISSGIQFVELTISGVSFMLHQIRKMVGTSVAVKRGLLPKDIIALSLAKFSRIVLPIAPSEVLVLRDNSFCLRNKQGTIVRPGIQSMNESEEVKKGVMEFYRAALVPELANFLDASMPPWKEWVENLDRFTSIPDPQLEEVRSAYRVWKADYDRVKMARKSASSD

SEQ ID NO: 113364 - protein, 97 aa, Oryza sativa
  unsure (1)..(97): unsure at all Xaa locations
  Clone ID: PAT_MRT4530_17159C.1.pep
MVLGTSRGGFDLTRIVDAIEWHRFNQVYDVGADNIMRAVKVTQEAITVWHVEAESAANGVGLIKLMGWSASHIALHTMLXSAVDCCLIPVEDLTSFL

SEQ ID NO: 113365 - protein, 513 aa, Oryza sativa
  unsure (1)..(513): unsure at all Xaa locations
  Clone ID: PAT_MRT4530_1715C.1.pep
MDAGGVELSGVMHRCRVCGKGFSCGRSLGGHMRSHISFGEAAAELGANGGVVGYGLRENPKKTRRLSEFDGDGDGEEVEVEEGGDGGELRACRECGKLFSSWRSLFGHMRRHASGGGGRNHDDDDDDDVDVEDEFGGGEEEEIVAPAPAAVTVIAAPPRRRRRSMRVAAPAPAPAPPRPVLLGGFEKEQEDVALGLLMLSRDTGVWRSPVARADRSYLAWTMARHRWYVQAVALLVVLKAAAGSAAPPTTTRSRSSSTVVAGMVFXRPVQGRRQRPLRLPALRCAGGDRVRRRGEPGDGAGVQHQLVRGILRPHGGHARDEPLPLPRNGYGYGYNSDEDSALLQYGGDVAKSRKRRASYHSPNSISSKKKQQPRAAAPAKRTRYECPGCGKVFASYQALGGHRASHKRINTSCSAPKVSPATAAAAAPAPEPSSETYASLSTLSPSASPGSAAAGIGDRKANNKSSAEEEKFGGACSSDELYAELELEQRSPAAAAGFLDLNFPPASSEVGVN

SEQ ID NO: 113366 - protein, 132 aa, Oryza sativa
  unsure (1)..(132): unsure at all Xaa locations
  Clone ID: PAT_MRT4530_17160C.1.pep
NKACGMVLGTSRGGFDLTRIVDAIEWHRFNQVYDVGADNIMRGAVTIHHEVQQQRLAVVVAGIPKTVENTLXVINRLFGFHTAVKVTQEAITVWHVEAESAANGVGLIKLMGWSASHIALHTMLISRRLLPH

SEQ ID NO: 113367 - protein, 66 aa, Oryza sativa
  Clone ID: PAT_MRT4530_17161C.1.pep
KIRTRGETREDPGGTRRSTKSTYSGARRTLGNNGEKCELCENLILSQFHKTYAKQAQQEKPGEPNE

SEQ ID NO: 113368 - protein, 46 aa, Oryza sativa
  Clone ID: PAT_MRT4530_17162C.1.pep
MGRRDDWREAAVKSDGLDEGETENSCLWAIYGPTGHSLGPSSWFLH

SEQ ID NO: 113369 - protein, 86 aa, Oryza sativa
  Clone ID: PAT_MRT4530_17163C.1.pep
LEPLFHIIVASVSSCHVQCPICRLEYDSYGVMPDAMLGMFNFVGGITTWCEAVYWCIFRRSPCTVWVLSFIGRPPSLINLSGSTPC

SEQ ID NO: 113370 - protein, 53 aa, Oryza sativa
  Clone ID: PAT_MRT4530_17164C.1.pep
NSLKTELQSVYAYSLPRSVSSCNCGGLHINYHPTGLLGVVSIVFLVNPNVRTD

SEQ ID NO: 113371 - protein, 111 aa, Oryza sativa
  Clone ID: PAT_MRT4530_17165C.1.pep
MGKEEKTHLNVVVIGHVDSGKSTTTGHLIYQCGGIDKRTIEKFEKEAAELGKGSFKYAWVLDKLKAERERGITIDIALWKFETPRYYVTVIGAPGHRDFIKNMITGTSQAD

SEQ ID NO: 113372 - protein, 295 aa, Oryza sativa
  Clone ID: PAT_MRT4530_17166C.1.pep
IPQVAIQNKIDSVSLSFSFSFSFLLLLPSSRLPFLGSRESREKREEKASGAAALRWLEGGDVIGHACSRSLRIRGGRWQAEGAREMAGTASRRAYLRRQEKWLWWLDEVGREEGKGKKRTRQMEAKPVVRGEERRSYGWGDRPTMSTIGHGRRERKRSQSLSSEEEWRVLPSIYRRLKAVANDGFGGKGEGEHGGSGVERRMTVPALSSDWSTFAARVRGGRGRVGRRRRRARHGDGGGATWRRRQDNGDGAPNGGGRFLSGDGRRWRRRARARHARLLWADLGRAREKKNSAQS

SEQ ID NO: 113373 - protein, 106 aa, Oryza sativa
  Clone ID: PAT_MRT4530_17167C.1.pep
LEAASCGLLTVSTRVGGVPEVLPDDMVVLAEPAPEDMVRAVRKAIDMLPGIDPQVMHLRMKKLYSWDDVAKRTEIVYDRAMQSPQTDLLERLSTIPQMWSLGRQTV

SEQ ID NO: 113374 - protein, 153 aa, Oryza sativa
  unsure (1)..(153): unsure at all Xaa locations
  Clone ID: PAT_MRT4530_17168C.1.pep
MAAETFLFPARPRTRVSPDKLCHQWKDAVLDACLAQDPDSKAGCETRTKTNMAMVVEEITSRGTGHYNKIVRDTCRRIVYVCDHVRLDXPDRCKALVNIXSGAADIXMGVHGXFTNRREEIGARDLGHMCGYCTDETPELMPLRHVLSTELGA

SEQ ID NO: 113375 - protein, 93 aa, Oryza sativa
  Clone ID: PAT_MRT4530_17169C.1.pep
TLRHSVSSDKDNVPSVLTASSEEQNLRGCFNLAAIVSVVSHFRIVIEHLTKYGILFNWATFQTYVTTKYIIHWNSFTLYTPSNCLDLAKIVYY

SEQ ID NO: 113376 - protein, 1626 aa, Oryza sativa
  unsure (1)..(1626): unsure at all Xaa locations
  Clone ID: PAT_MRT4530_1716C.1.pep
MSYYVDPCTSVPQYPLYPVYGYHPSIVARQVGGLGTQGSTTMPSSFVDNNANTSFSQVLPTSTMLVWTQVGEIVYPVYTTMPISTGPPMTGNENAVATNQDVSMSKNPPVETENGLSTTSKLVKDSDAAKPCPSNINRRPTKMTSEATRSWCPIHKTKKHTLQDCWVFINVRAEIRACKEHGIQRTSPTRDVYCPIHKTKNHDLLSCKVLLGVMKTPSPKSYVPVRDNDKEQGATPASDRFVGVIDLDPHEPSVLHLLEDYGSSTSAMRSKKPPPQHTKIDRQSATPMVKVRNGGNHLDKLPLHLVALAIFEIKSMVAEKHDAHEMTQTVPGVMSPHDAMIEEIVQTRTETTTIATGGGQTTLIMAVAATMTMKEIGVETTARDDDRILEIQVVILVITDIHEGHATTDNPPLPVLGVGLSVVPYMMSDGLRDSDPELLKNLWQQFVANFQGTYKRHAIENDLHALTQNSGESLREYVRCFNECRNTIPEITDASVIHAFKSGVRDRYTTQELATRRITTTRRLFEIVERYAHVDDALRRKNDKPKTGGEKKPAADASESSKKKNRKNRKRKAQAEVLAAEYANPPKRPDPQGSDTKKSWCPIHKTDRHSLEDCLVFKKSLEKHMAFEKGKRVRVVEKNEESPPHESDSAYPDSDLHVSHIFGGSTTYSSKREYXKWNVKSVRRAYNAIIGRTALAKFMAASHYAYQVLKMPGPKGTXQGNLKLAVQCDKRSLDMVEQMPTPPAMSEPPKKPSDMPGVPREVIKHKLMVRPDAKPVKQRLRRFAPDRKQAIREELDKLLKAGFIREVLHPEWLANPVMVRKANEKWRIPVGGFNRLLSFLDAYSGYHQISMAKEDEEKTAFITPFGVFCYVKMPFGLITAGNTFQRTVQGALSNQLGNNVEAYVDDIVVKTKTSNSLINDLRETFDNLRRYRLMLNPEKCTFRVPSGKLLGFLVSGRGIEANPEKIKAIENMKSPTRLKEVQKLTGCMAALSRFVARMGERGQPFFALLKKQDKFVWTQEAEEAFIALKRYLSNPPVLVAPQPNEELFLYIAATPYSVSTVIVVEREKVQRPFYYVSEALHDAKTRYPQIQKLLYAVIMTSRKLRHYFQVHRVTVVSSFPDWTMPDNKSDNQGENETWTMAFDGALNSQGAGAGFILTSPSEDQFKHAIHLNFRATNNTAEYEGLLTGKRAAAALGAKRLIVKGDSELVANQVHKDYKCSNPEISKYLSEVRKLERRFDGIEVRHVYRKDNVEPDDLARRASRREPLEPGTFLDVLTKPSLKEVSGEVGPSTPDINSEVTEAERAVADIETTYDWRSPLIKFISSEELPEDDTEAEKITRKAKIYSLKDACDMVQRCEACQFHSKHTKLPAQALQTIPLTWPFSCWGLDILWPFPRGQGGYRFLFVAIDKFTKWIEAVPTGEIKADNAIKFIRGIFCRYGLPHCIITDNGSQFISADFQDYCISLGVKICFASVSHPQSNGQVERANGIVLQGIKTRVYDRLMSHDKKWVEELPSVLWAVRTTPTTSNKETPFFLVYGSEAMLPGELRHQSTRVQKHSDENQENQREIDVNLVEEHRERVAVRAASYQQALRRYHEKCIQARILSIGDYILRRVQTQVGRNKLSPK

SEQ ID NO: 113377 - protein, 39 aa, Oryza sativa
  Clone ID: PAT_MRT4530_17170C.1.pep
MGAGTRRELVVKEWVDKVGRTDWPEAGDDPDRWALPIGG

SEQ ID NO: 113378 - protein, 571 aa, Oryza sativa
  unsure (1)..(571): unsure at all Xaa locations
  Clone ID: PAT_MRT4530_17171C.1.pep
MDAGDTSAAAAVAPTPARLREALAALSKAFESGDCSDGSAAAAVSDLLNAAADAADAEADAEDEAAAGVVEEMLREVHAFLSSPSSNQLAIDALSLELVKPVAKLGALMRNCWDIANAIIEFFVSNCNPRDMLSILCEAVDAPLASNGSVYFVLLFKELAKVLVLIQRRHTEQVKVTLPAVLRVMNAVIPECDEEHGKIIVDMYNAALRIGNAIQEMCKKMVNQTNEELCSVLSLYSLQNIALVSRCKQQHILSACGSVVLQHSKILTFCGFTYLGLLTDEDADLLECFSFAMNGANLAVIWTYMDDEISKYAGAELESALKDVKGNHTRMWQAINILRYVLSSTHYPWVIKSHSLDLLLTIANESRIEEINDHVDVSSSGPQIFATLKVISMVPSSQRFNILQALIKNSIFPSLTALLLDLVKDXVFGEIRRADQDIVESDQLQDGGEWPPPWFSHALELVEXLILKPPEGGPPCLPDHGEQVLSALNLLRFVLIIDSRGSRSRKMFGEETMRKVYSEWLMPLRPIVAGIQSESEEDGSDVANHIMCSLNPVQLVLYRCIELAEEKMKGF

SEQ ID NO: 113379 - protein, 107 aa, Oryza sativa
  Clone ID: PAT_MRT4530_17172C.1.pep
NKKKREKKPKKQKKGKKKRKRTKKKKKRKNRKRGKKRKEKNQKSKKKEEGKRNGQNKRKKQQPPDQKNRKKERPKNQSGRATDGKGERGGPPSQKANRRKRKGAQNE

SEQ ID NO: 113380 - protein, 258 aa, Oryza sativa
  Clone ID: PAT_MRT4530_17173C.1.pep
PVTEGEGKCKASSWNMSCKLSGMATDLFGLHRILSSLLEIEGTRTTREIKSKDSIQKLAKVLLKANWQKDLHHILVEPMEKSKQDSRESVRRTIMEHDEVFRQQVHELHRLYRVQKSLMAELGGEKHRFQSRTGETQEMMQGPLSNLKNSPSTSETTQSAHLGSTQHCAPEQVPEHSILQEYKPATCLNFFTEETSRTQEFRREGGRSTGGENWSASDPSVENDLDLKLTIGPSLHATKAPHWLFSGSRERNPSGQHR

SEQ ID NO: 113381 - protein, 1038 aa, Oryza sativa
  Clone ID: PAT_MRT4530_17174C.1.pep
MMQQARDQYLSSYMQTRKGSLVQKYKLKLVADIPGTGSSKDGEIKRDPDGSAQPSAKGATGGFAGNQGDNLPEVHGTPSRIPQELPGGDFSQDLQVSFHNFQDRVDYAPVVQAAPSVAPTAQPTASASTSVPAASATVAAQPMNPRLLVREYPQPAEQITNQPTQDQVAAMFLPPPVVNLVQQQPIQQAPPIQPAVQSTQQQVVQPAQQALLVQPVVQPIQQQAVQPIQQAPPVQPIVQSVQQQVVPPVQPMVQPVQQQVLQPMVPEHLVRNIQPDLHDYQGGNLSYRYQPSSIQAQYQPGGSAQQQFAPQFGQFESMQQQPQGSAQQRPWADVIADVMREQFGLKPKETGSLYRQPYLEWFERVPLPNRFKIPDFSKFSGQEGVSTYEHISRYLAQCGEASAVDALRVRMFRLSLSGSAFTWFSSLPYGSVNSWADLEKQFHSYFYSGVHEMKLSDLTAIKQRYDEPVHEYIQRFREMRNKCFSLSLTDAQLADLAFQGMIPPIREKFSSEDFDSLSHLIQKVTLHEHRSADVRRSSKKVNQVCQYMYESDDEDDDPEIAAAEWVRSKKVIPCQWVKNPGKEQKYDFDITKADKIFDLLIREKQIQLPAGHTIPSAEELGKKRYCKWHNSGSHSTNDCKVFRQQIQVAIEGGKIKFDDSKKPMKVDGNPFPVNMVYTASQAADGPRLKSFQVHSARIIDKYQRRYNKQQERCYEENDNGFDPHWDCEFFRFCWNEGMRLPSIENCPGCSDVIKSLSRPHDRGDRLRQTRLPVHQRLGPMSHDRNQEDELTRKNQWCPSGIFTKNQKRRVQRLRSRERFQEVWRVKTQVPAADDTTADEAKRLAKGKSVVTAPVNMVFTLPAEFGISQADVDEVEDESAKLVISSEQAVFEKPEGTENRHLKPLYVNGYVNGKPMSKMMVDGGVAVNLMPYATFRKLGRNAVDLIKTNMVLKDFGGNPSETKGALNMELTVGNKTIPTTFFVIDGKGSYSLLLGRDWIHANCCIPSTMHQCLIQWQCDKIEVVPADRSVNVANADLAL

SEQ ID NO: 113382 - protein, 134 aa, Oryza sativa
  Clone ID: PAT_MRT4530_17175C.1.pep
MASATASPRRRRCLLHRTPPSPRLLREQRELMPTPRLAAAATSSAALTASAIADHPSPRRPLRGTKSGTPRVCPSRRHKLSNPRGGHELVADAATSRAAATSRERWRTKVGSSHHLLEPPPPFPSVSPFLIPCP

SEQ ID NO: 113383 - protein, 307 aa, Oryza sativa
  Clone ID: PAT_MRT4530_17176C.1.pep
SPPNSRFSHLILLLLPRNQHTEASSPAAMAGAAVEQAHELYRGGRHRDALELYTAALAAARGPAQRIALHSNRAACYLKLHDFHKAAEECTSVLELDREHAGALMLRAQTLVTLKDYQSALFDVNRLIEINPSSEVYRNLHARLKTQLALAPIPESEEESLYLEEDKQELPPERNVNIEICITKSDKPATEMILKKKPTTELIVENKPATELILEKKPATELILEKKHATEPPKVEVPPSLPQKPQGWETIAKPKGHSGLDYSKWDKVEDDSSEDEDEEEEELPQYKFKVRTVGVRSVKGTELEFAL

SEQ ID NO: 113384 - protein, 333 aa, Oryza sativa
  Clone ID: PAT_MRT4530_17177C.1.pep
TFVVCFVCRYGCIPIIGVVHQRNNNVNPPPPQNKLADFLRVRPPTFSITTNPVEAGDWLHAVEKKLELLQCTDQEKVVFASHQLQGPASEWWDHFRMNRAEGQPITWAEFTEAFKKTHIPAGVVALKKREFRALKQKDRTVTEYLHEFNRLARYAPEDVRTDEERQEKFLEGLKDEVSVMLISHDYEDFQGLVDKAIRLEDKKNRMDNRKRGRIVFQETQGSSQRQRIKPNEVNIEQANQPVLVQQDQSQENNSNGRGQQVCFNCYKPGHFARECPKSKHQQPQGQINNIVVTGANASSSSSGQSRAARAVPCAAAAFSVNLASPLLLFHLVE

SEQ ID NO: 113385 - protein, 138 aa, Oryza sativa
  Clone ID: PAT_MRT4530_17178C.1.pep
MIHSKRLAQLARRLQRVKTTAAREDDACCTTSPVADKGRCTMYTADGRRFKVPLPYLGTTVFGELLRMSQEEFGFAGDGRITLPCDAAVMEYVMCLLRRNASEDVERAFLSSVVMSCQDSSCGVPPVALHQQFSVCSS

SEQ ID NO: 113386 - protein, 311 aa, Oryza sativa
  Clone ID: PAT_MRT4530_17179C.1.pep
MVNTRTSGSGNNNNEENPTLAQVLAQQTQLINMLVQQMQNQQGNNNVNPPPPQNKLADFLRVKPPTFSSTTNPVEAGDWLHAVEKKLELLQCTDQEKVVFASHQLQGRASEWWDHFRMNRAEGQPITWAEFTEAFKKTHIPTGVVSLKKREFRALKQKDRTVTEYLHEFNRLARYAPEDVRTDEERQEKFLEGLKDELSVMLISHDYEDFQELVDKAIRLEDKKNRMDNRQSQQLGISGEINSETNASNEGNDEQATQSVSFQQDQSQEDNSNGREHRRRRHVLHPAVVAGRAPSASCRRLRRRRRSPSPP

SEQ ID NO: 113387 - protein, 414 aa, Oryza sativa
  unsure (1)..(414): unsure at all Xaa locations
  Clone ID: PAT_MRT4530_1717C.1.pep
MEVDPVCQPRRVADKRTPLDTTRPAHVETTRLPSGHTNADTTRSPPARVNDYRHRYTGTGADNRTTSXGRHRKDEDGAARERDPYHHATRRGDDNDERARRRQXGTTEANREGTTSAAILGRRRDAAGTRLDDAELRTKTRTGXAAACLTDXGRRMRTARRRDERHDDQEXREDDDDDDRGRRGGDEGSRQRLHECEDGVEHAAAMTMTEAAPRDDEPARMNGRPKGRRRRXGWRGQXGDGVPAKQRSSRGXGRRRGAEGGGGDVGRRTGNATVAAGGGTVAATPLXAGEDASPVLXPRNGGLTEGEEVAARPREKTARPDGAPARRERRLEAAGAEEREGRWRERASGGHRAKRRAGRGGGGGGDAGGGDGATGRCTVEAAQAAGGGRRRGRERRAAGRGLGTTGRLGMGLKR

SEQ ID NO: 113388 - protein, 384 aa, Oryza sativa
  Clone ID: PAT_MRT4530_17180C.1.pep
MNYTHQISGNLVKMVNTRASGSGNNNNEENPTFAQVLAQQTQLINLLVQQMQNQQGNNNVNPPPPQNKLVDFLRVKPPTFSSTTNPVEAGDWLHAVEKKLELLQCTDQEKVVFASHQLQGSASEWWDHFRMNRAEGQPITWAEFTEAFKKTHIPAGVVALKKREFRALKQKDRTVTEYLHEFNRLARYAPEDVRTDEERQEKFLEGLKDELSVMLISHDYEDFQELVDKAIRLEDKKNRMDNRKRKMTVFQEAQGSRQRQRIEPLQIGESFSAGQGQSQQLNIGGEIESETNESNEVNIEQANQPVPVQQDQSQENNSSGREQQVCFNCYKPGHFARECPKSKHQQPQGQVNNIVVTGANAVPVASSRVAFSRDTAQPPVSKQQ

SEQ ID NO: 113389 - protein, 493 aa, Oryza sativa
  Clone ID: PAT_MRT4530_17181C.1.pep
MGGGGGSVGAGFCGTSGENGGGRGGDRAHVVGCELGCGRAPDFAATWAAMAVGVGRREMVNTRASGSGNNNNEENPTLAQVLAQQTQLINMLVQQMQNQQGNNNVNPPPPQNKLADFLRVRPPTFSSTTNPVEAGDWLHAVEKKLELLQCTDQKKVVFASHQLQGSASEWWDHIRMNRAEGQPITWAEFTEAFKKTHIPAGVVALKKREFRALKQKDHTVAEYLHEFNRLARYAPEDVRTDEERQEKFLEGLKDELSVMLISHDYEDFQELVDKAIRLEDKKNRMDNRKRGRIVFQEAQDSSQRQRIKPLQIGESFSTGQGQSQQLNIGGEIKSETNESNEVNIEQANQPVPVQQDQSQENNSSGREQQVCFNCYKPGHFARECPKPKRQQPQGQLRAAVAAVAPAVRRRRSGRRCRSGRPPSGSPSRRRPRPPLRHRRRSPEHHRRRRPDLRRRFNLVAVAVRCSSAAPLVTAPPFASERAPSEPPSRRRRW

SEQ ID NO: 113390 - protein, 156 aa, Oryza sativa
  Clone ID: PAT_MRT4530_17182C.1.pep
MATKAGRRSPSLSSSSSTSYSRSPASPSSSPSRSRSPPRPAGGARSPSPSPPPPPPRKASPPPESTVLHVDHLSRNVNEDHLKEIFENYGEVVNVELSMDRVVNLPRGYGYVEFKNRADAEKALPYLDGGQIDGNVVKVRIRAFTTAGKSCCFSKS

SEQ ID NO: 113391 - protein, 191 aa, Oryza sativa
  Clone ID: PAT_MRT4530_17183C.1.pep
MEQFRTITWAEFTEAFKKTHIFAGVVALKKREFRTLKQKDRIVTEYLHEFNRLARYAPEDVRTDEERHEKFLEGLKDELSVMLISHDYEDFQELVDKAIRLEDKKNRMDNRKRGRIVFQEAQDSSQRQRIKPLQIGESSSAGQEQSQQLDISGEINSETNTSTEVNIEQATQLVPVASSRDTAQPPVSKQQ

SEQ ID NO: 113392 - protein, 437 aa, Oryza sativa
  Clone ID: PAT_MRT4530_17184C.1.pep
PIGLLEKEINNLAPSPGRTLAESRPSHRRCPSKFRRPSLFPAAPPLQQPSSVAVATIGFARSSPSPSTASPPPKTAGAPPSSNPTLAQVLAQQTQLINMLVQQMQNQQGNNNVNPPPPQNKLADFLRVKPPTFSSTTNPVEAGDWLHTIEKKLELLQCTDQEKVVFTSHQLQGPASEWWDHFRMNRAEGQPITWAEFTEAFKKTHIPAGVVALKKREFRALKQKDRTVTEYLHEFNRLARYAPEDVRTDEERQEKFLEGLKDELTVMLISHDYEDFQELVDKAIRLEDKKNRMDNRKRGRIVFQEAQDSSQRQRIKPLQIGESSSAGQEQSQQLNIGGEINSETNASNEDNDGQATQSVSFQQDQSQEDNSSGREQQVCFSCYKPGHFARECPKSQHQQPQGQINNIVVTGANAVPVASSRVVSSSVTTQPPVSKRQ

SEQ ID NO: 113393 - protein, 102 aa, Oryza sativa
  Clone ID: PAT_MRT4530_17185C.1.pep
KSTDQGTKPRPIPIPKSKTVKQTSDPNIKSYLKHQNLAGIRLKKNQLMMQTNRRQGERNQQKTLRRAESPRRPTSLARASASPLFRTRRQASSLSPEKTMTC

SEQ ID NO: 113394 - protein, 68 aa, Oryza sativa
  Clone ID: PAT_MRT4530_17186C.1.pep
FLCYSYDIGDETGRFSPSFGGGGDFAIFHLRKSKLAPWSRLSKIKDRAVEFPMACVVAIQQCSITVLS

SEQ ID NO: 113395 - protein, 79 aa, Oryza sativa
  Clone ID: PAT_MRT4530_17187C.1.pep
MPTLHYVHVILNMLLAYLGDALVTAQYGYSSACVYNAKLIPWGGYSSVFSPSCMVMMGCRKEFGNQGWLLEVPGGHRIE

SEQ ID NO: 113396 - protein, 149 aa, Oryza sativa
  Clone ID: PAT_MRT4530_17188C.1.pep
FVFFFFLVFFFFFFFFFFFFFFFFFLNKNWQNSGGGGPENLISTQNQGGGNPRGGEKNLFPRGKTPDKTGAKIPGYPGSPFLGPRGGKNAKKMGKKKGANRGVVGTKAPFLGGPPFSGDIPWGGPICFFFFTPVKAGFPFKTGPPGAFF

SEQ ID NO: 113397 - protein, 667 aa, Oryza sativa
  unsure (1)..(667): unsure at all Xaa locations
  Clone ID: PAT_MRT4530_17189C.1.pep
MASLLGLAEHALRSVASLGAIRRAGGLLPDNHHGRLRRALPRPLGSCRLSLRIIRQLATPAAPSRRRGPLPIATGSTSTCAGLGTGRRRQGTCGTTRTLPRRALAVAQGDGRTTSPGPLLQLRRALLARPQPYLPLLVLRRDGGGASDDDSAASQDEPRETLRISLHAATGVRGSDAMHIMVRLGDADLYALTDSGSTHMFLSQDAATRVDRALQPRIGLNVTVANGDXGHQRSRALACAPSALLDXLLEEFFDVFAEPMGLPPCRQSXDRTYRIQLLLGTTPMAVRPYCYPARHKDELERQCRVMEEQGLIRRNKSAFSLPMLLVKKADGSWRFCVDLSERSVKGKYPIPVVDELLDELHGAAIFSKLDLRSGYHQQGVAMDATKIQPVVDWRRPRSPKKLRGFLGLAGFYRKFIQDLGSVAAQLTQLLRKESLAWAPAAAAALQRLKLTLTTAPVLSLPDFSEPFVVECDASNSGFGAVIHQGEGPIAYFSRPVAIRHHALAAYHRELIGLVQATDHYSPKFLLDQRLSTIPQHHWVSKLLGFDFVVEYKPGKQNATVDALSQRVALDGHAFVLSVPTFDLLHDIRKTAAIDPALTALRDENASGARTTPWAVTDGFITYKRRIYIPPASPWVPIVLAAAHDDGHKGIQKTLHWLRRDFHTLDEA

SEQ ID NO: 113398 - protein, 107 aa, Oryza sativa
  Clone ID: PAT_MRT4530_1718C.1.pep
MPSAHDLFIKNLMRRGAGHDDAVPWLHYPAVDDANADTAPLPPDGPPGGESTSATMSAAGTSTVPVESTVVQPATNRLMARRSQAQRVHALLLEGESTFRTPLRMTG

SEQ ID NO: 113399 - protein, 323 aa, Oryza sativa
  Clone ID: PAT_MRT4530_17190C.1.pep
MAAPVTFAVVAAVALVALCGGGGARAQDMDNEWARNRGFYGGTGGGVVGGLLPQSDVDLLEFPLNLEYLEAEFFCWSALGYGLDGIDASLTGGGPAPVGAQTAALTPFVRDIATQFCYQEVGHLREIKQNVKGFPRPLLDISAANFGKIVETAMNTTLDPPFNPYENSLNPRVASYIIPYVGLTGYVGANPRLLTPQARKLVAGLLGVESAQDAVIRALLYEHGLSRVASYGVGVAELTAHISELRNVLGRKGVKDEGLVVAPGQGPEGQTVGNIIAGDRFSLAYDRTPEEILGVVYGSGDPAKAGGFFPQGADGRIARAFIA

SEQ ID NO: 113400 - protein, 277 aa, Oryza sativa
  Clone ID: PAT_MRT4530_17191C.1.pep
VRVEGRAASASTAPSPLSNKRSRSGGAAPGGGVGRGGPGGGAAAAVSSAGGGAAGTSPASSLALPQPGSLPSLSSALGLTGGTSLASLLLGSGGSGGDHLGLFQAMQSVVSDAAAFEMHQQHQSQVDHLLGLGYGAAGAQIQAAKPWLHDGGATGGLLDGFYAPLLSGSIVPGLEELQVKAEATTGDHQQKSSAAAAGEQSWDLPTPSSSNVEASIIASDALMAAAAASMNPAVSAAAASTAPSAQSLLYWGNGGIGAAAAAWPDLANCGSSIATLF

SEQ ID NO: 113401 - protein, 60 aa, Oryza sativa
  Clone ID: PAT_MRT4530_17192C.1.pep
KNRRTCLPLGSLFGPWRLPSQNLLFPFFSPYLSSCSLVRSHPPYVDFTSRWLSFDFAHVF

SEQ ID NO: 113402 - protein, 221 aa, Oryza sativa
  unsure (1)..(221): unsure at all Xaa locations
  Clone ID: PAT_MRT4530_17193C.1.pep
HNLDSSRLNQMRQAGWDLIVHPGVPLCHAGDAKFTLESFITLNMFVGFHQWDFGLSALHDRSSYDRRRFFDEFAELKAAPAAEFLDARSSRWGALDEFPCDGYLSVVHKRMEAVFFGSTAQRGAVASAGXAFSDTPWFVEFAKMARHVWLLHCLFLTFDGGVSTIFQAAAGGRYXANGDSDTALGAAAXDRAVGFTVVLGFKVGWMVMQCRVYLSRPVRQP

SEQ ID NO: 113403 - protein, 67 aa, Oryza sativa
  Clone ID: PAT_MRT4530_17194C.1.pep
SPTSDPACLIQSITPPRVLIQPIISHHHHKPTTHMGGFQWVALIRGRVHSPGGEVCPVALVTLSLCR

SEQ ID NO: 113404 - protein, 87 aa, Oryza sativa
  Clone ID: PAT_MRT4530_17195C.1.pep
MAKHAKRARQRQRAMAVRGRREVKVTAAGLKGDDGEACREGEAAATGHGCARAARGRGERKAAPVSGARARRLGCAGKAVLGLDARW

SEQ ID NO: 113405 - protein, 291 aa, Oryza sativa
  Clone ID: PAT_MRT4530_17196C.1.pep
MATAFDSPTASPAASPFDDDSFLRFDAAAPAPAPADAFPPSPEPYAFRPDAPSPFGMPEANGSLHDDPFAAPDNDNGPVLPPPNQMGADEGFLLREWRRQNAILLEEKEKKEKEMRNQIILDAEEFKKAFVEKRKLNIETSKDQNREREKLYLANQEKFHAGADKQYWKAISELIPHEIANIEKRGAKKDKDKEKKPGIVVIQGPKPGKPTDMSRMRQILLKLKHTPPPHMKPPPPPAAATGKDGAAGKDGAKVAAAASKDASANGSVPEMEKAAAAAAPAAAATEPIAAA

SEQ ID NO: 113406 - protein, 1072 aa, Oryza sativa
  Clone ID: PAT_MRT4530_17197C.1.pep
MATERFRINAISSLIDSVGNQVSDHEGKAAILWNAFRERMGVSMKPKMVFDLSELIEDKCDLMSHCLQITTKEIDEVVKRIPGDEAPRPDGFNGCFYKSSWGLIAQDFYRLCADFCGNSADLSAINYSYITWVPKKMAPQPPNDFRPISLMNFSVKIMCKVLADRIQSILTKLVHQNQYGFIKGNSIEDYLAWAFEYIHQCKLSKREIVLLKLDFEKAFDTIDHDAILNEMTAMGFPPQWNEWITSMFSSTSTVVLLNGVPALLAALQQAFIPSLFEDNLRASGEGWMQSHPLEGCKEEGGRGTPETKLSAISNQIILNTLGHQFVQQHAFLPADGTRGGILLACDENFFSISEVVLGQYSLSATVSMREEGLNWSITVVYGPQLDADKINFLAELENIQVSLKPAWLIIGDFNLIYKACDKNNSRLNRAMMQHFRRLLDKIQLARESRSLSDQENLLLSNLKSRFLGLSTLNKIKIRQRSRLTWLKEGDVDSKLFHIKANSRRRKNYIQSLQTPSGVAISAQDKEDELFRFFKSRPGTNNQRSLGLNWAALGLQSLDLSELEEDFSEEEIKATIFSLPPEKAPGPDGFIGSFFKVSWEIIKDDIMVAINSFMNLNTSQLEKLNSAFICFIPKKDDASGADHYRPISLVHSFARKITKTLANRLAPRLNELVSQNQSAFVRKRALHDNFLYVQNMIQLLHRSKKQSLFIKVLLNGSPGHLINNARGLRQGDPLSPMLFILAMEPFHRILKAAEDATILQPAATTISVENGTKTSFWHDNWLHKRCPKELAPFYFSLAKRKNRRVQFELTNNNWLSSFRQITSVEELHELVQLGGLLQQVQLTQNVYDIVWNWTESRTYTTKSAYLYQFAGSYTTSDFTSLWKARAEPKIEFFGWLVLHQRTLTAQNLLIRHWPCDWICCLCTSAFEDTNHLFAECPFMRQVWSTVHSWQNLPPVFNSLPSCVSTCCWDELKDAGTEDKKLLARGTMEGTRRHLEKDLEPWRIIEYDQVKVEAQTKSTPGAIRSPGPVCTKMGAQVAYVLGLGHSLYGWKANKISFPMVLVPCPNSFSGQCKL

SEQ ID NO: 113407 - protein, 252 aa, Oryza sativa
  unsure (1)..(252): unsure at all Xaa locations
  Clone ID: PAT_MRT4530_17198C.1.pep
VKKCAKKNREKKPTLSDKKNGRNKQKKKIHRRKKAVRKKNQSDPKKARKKPAQKRKKNXRSKKARKKGKKKKKKSDPKNRGEKNKKKKKRIRLRLRSKKXAKKSKRIRLHRRXKKRAKKNKKLYKSDSKENRILSYLTRRGKKYLKNKRXSIIRKKPWAKKLCEKKPGEKMKKKQLCPIKKRAKQKKFVSENKPCKKRTKKKPKPVQSKKXRAKKTGRKKEKKIMSDPKKIGVKKTEKNRNESIWLMGYSFR

SEQ ID NO: 113408 - protein, 147 aa, Oryza sativa
  unsure (1)..(147): unsure at all Xaa locations
  Clone ID: PAT_MRT4530_17199C.1.pep
LDSQVIVGFXILCDRSNRAVYACQTGGDRAVGSASPRSDRPTLCRFRFRVVYLDIRDYFMIMTSRWILYSSSICVXRVSAVXRQLTGGQTGGXGRSDRRQRQARQATSVVRPKIQHRSDRRHPLGQTCRSISVRPTSVDFKTIRIAV

SEQ ID NO: 113409 - protein, 140 aa, Oryza sativa
  Clone ID: PAT_MRT4530_1719C.1.pep
MLRRSSAATKRRTRTATTWRSRRWPSRATATTGTAAAHGGDQRSGGRPTDGDGNDEETAAVFGSTAAMVLRRSSATAKGRTRTATRRRPRRRSSRATATSGTAAAHGWSDGGDGGARAHGARALVVKAVLGISSSLILNW

SEQ ID NO: 113410 - protein, 120 aa, Oryza sativa
  unsure (1)..(120): unsure at all Xaa locations
  Clone ID: PAT_MRT4530_171C.1.pep
PKLVVAAVGWGTXRAERGGTRRSQLLLPGRRSTAPPAARPGNPSLAAFAVAGGDEEEEDWCVVVGRRSRRPCPIWRRICCGPRVAIEPPKKKKIRQTLTTTPQDDDRTTTCTNLVLLFES

SEQ ID NO: 113411 - protein, 38 aa, Oryza sativa
  Clone ID: PAT_MRT4530_17200C.1.pep
MDDDGLPVVHGLRLGRFNGYRELRLRGCPASHRWPLGV

SEQ ID NO: 113412 - protein, 73 aa, Oryza sativa
  Clone ID: PAT_MRT4530_17201C.1.pep
MIDDVEDGGARPWHRGRTRCASHVARRRDTTTTTTRSDQPTTRCASFQLSSEVAMVSELRGSGFPAKETARLT

SEQ ID NO: 113413 - protein, 324 aa, Oryza sativa
  Clone ID: PAT_MRT4530_17202C.1.pep
MGEEDISNDSKSSCGCEDGTVEAPAAAAPKENGRAADPRLQAISDAIRVVPHFPKPGIMFNDITALLLRPAAFKDAVDMFVERYRGMRIAAVAGIEARGFIFGPAIALAIGAKFIPLRKPKKLPGEVISETYILEIPLRKPKKLPGEVISETYILEYGTDCLEMHVGATEPGERVVVVDDLVATGGTLCAAIKLLERAGADVVECACLIGLPKYKKDSQLHSFARARWRNWIGIGWQEYLSPVLRSPDKGVVRYGRGDSRRETCLHVWRSLLSRAPSIPPGSKGRPLLRFCLPLQFYYCCPYRVRLASVYLKQSHINSAHHSLR

SEQ ID NO: 113414 - protein, 82 aa, Oryza sativa
  Clone ID: PAT_MRT4530_17203C.1.pep
MVRSNSQLNVSIGRRVCCNSEKSESRRVIHPLGLYGGSKSYSSSYMYITSTPELELGGTNYGKWQQRQVPNPVQNTRHAKQL

SEQ ID NO: 113415 - protein, 80 aa, Oryza sativa
  Clone ID: PAT_MRT4530_17204C.1.pep
MQIEEEKRLKLDCLKNYTGVTEDRIKEGNNRMKSQRSNSCVTEDRIKERNITMKHMDQIQCYVKSRESTSKIPTIMYEQV

SEQ ID NO: 113416 - protein, 81 aa, Oryza sativa
  Clone ID: PAT_MRT4530_17205C.1.pep
MAEAKGIGDSWSCFPKAKFGISPNKSDDSEAVHDCRGDDGIDCVGASGHWPTRHWRMCQPRGTCPLERSQGEAAQRGGAFA

SEQ ID NO: 113417 - protein, 143 aa, Oryza sativa
  Clone ID: PAT_MRT4530_17206C.1.pep
MVFPGVIIAGHAAKFLVGGSISFGSQTFITYQTGCLARKTSSAAPLYLKNVTTNSTDCLAGLGRRVTLHPRNTRETPCCCTRVPQELGPCCVGFIDKFVKLLDLELESFDFAIVERSDGWRFAHHQTTVLELERSKQQLSRSS

SEQ ID NO: 113418 - protein, 139 aa, Oryza sativa
  Clone ID: PAT_MRT4530_17207C.1.pep
MPLSKRSSRRKPHLSVQPLLATSLAGMFPASYLEPRLTTVILICDKVTYTTHPGLAHTPVPRRPMTTCTNAVYAIVTSAIVDSLTIIRFVWGNAEFGLGKAAPAIPYAFRLCHGYLHCELAIRRTLPSLSRCNDAVISI

SEQ ID NO: 113419 - protein, 38 aa, Oryza sativa
  Clone ID: PAT_MRT4530_17208C.1.pep
SITSRVLGLAHVLEIEVDSRSVSRSRSTQLGQTESQTG

SEQ ID NO: 113420 - protein, 57 aa, Oryza sativa
  Clone ID: PAT_MRT4530_17209C.1.pep
MTVPWPESAIPRYPPRRSGLAAQKCGTNMHGPASPFRGTEAGTVPQPDNMAPCWPTS

SEQ ID NO: 113421 - protein, 328 aa, Oryza sativa
  Clone ID: PAT_MRT4530_1720C.1.pep
MADNEKGNKVRSQDIGTSSSRVNEAPDTSCVAVVQHLINQNQLLIEILQQHRMPILNPSQMQPQVQLEAVQALTPQVSAPPTSQKAPHAMPHVDPKEASIICFMCDEQGHYARNCPQQKRKAPMRTEDEVRKMIITSTEWPPPGMTEHQRRNSFRGAQQLTEHLLANGGRVSDSEDSDQVSSDDEGMGHFADKCPKPRNVAASTSVHANPRNQKLAPQRIVIHASRSSPITRVATAPIPMSALPQGVNAQFQPQPPADKTEASICVVPLEVPIQQLRNQVQDEEPELKKGITPKTVPNQGKIDLHITANLHEADIPIVLWSLEQTPYP

SEQ ID NO: 113422 - protein, 65 aa, Oryza sativa
  Clone ID: PAT_MRT4530_17210C.1.pep
LGSVAVQHLHHRQSPKRATAHPGLIGVRERTYRSGNTDPLQLRLLFGDEPPPPPPSQRRLGFGKD

SEQ ID NO: 113423 - protein, 103 aa, Oryza sativa
  Clone ID: PAT_MRT4530_17211C.1.pep
NTRKLSKGPRPTRFIYSRDELVVHKAAVLIVRATASLGTLDHRPKSEIAASASLRMDPLHPCLGRHCRGEDHHSHGPDEESKDGVPLHYCLTGNSTLLHFQKC

SEQ ID NO: 113424 - protein, 713 aa, Oryza sativa
  Clone ID: PAT_MRT4530_17212C.1.pep
MANIVLTILHLISTTVGGLFRHDSTTGAASVEFWVAAATTLLLIKFAVDSIGPRFSSQKYINPAVQLLRILNHYAVSYTLGLMPPSSSHQGTVANAFFKVWAVLIVTMQDSIRIGRPYQPKEMTLVDMLTSLWSANQLRAKTAIHLRVPLWLMWSIHASRIVWYYITSSAAARARDDDMKLVSDYMAMPTQHTSNDANPATMAGYKYIVLGEEKLKQQIKVEPPSFTQTQLAQEEVITVEKVWSQGSSDALLGEAGDSSNRFKDVCLSFALYKLLRRRFFNFPIHEASHAGTRQLVVDAILDDKKGYERAFRVTEVELSFLQDFFYSKHADVFASGFPCVRLLLSLLMTAAASYLAYAVHDMPSVSTGLTAKGRLARISHGVFVTHCIIAILVIRELWEIIVHVFSQWTNVLIICSYIRLRGRQGCWIQGLRLWMMEKVARIMFWLIGRGRSRRDRNIRQCNLVMSARTGSIARVTRVIFRTRSSPEELAQKKNELLRSYLGNAFADIEHLVSQIEHIQREIKGEGETHKILAWHIATSLCQIKLLEQQATGRWRDDLYNLTLPEGGGDGELADVWPHYVTAVTLSNYRAYLVRQALVPDNGLVAYKVLHEVRREAAQSMRGCNAMQGLPHQLILNSNRPRCNGDDGERASLTLARCYRRSSWRRSVAAPRSSYGRGWASSGRVSCCTCRHRRGRRSISHGDQMLDPADLTNS

SEQ ID NO: 113425 - protein, 125 aa, Oryza sativa
  Clone ID: PAT_MRT4530_17213C.1.pep
MTTATTRQRTPLQLHQPACVEAIPATSMPDALRCRRWVVDVRHRVDNHGQAGGDYGARVVHRNVELVRRRRWRRRRWQGRVLMNPRPWGAEEDELPRRHSGVDVAEVEALAKAVMLVERGGGAAA

SEQ ID NO: 113426 - protein, 57 aa, Oryza sativa
  unsure (1)..(57): unsure at all Xaa locations
  Clone ID: PAT_MRT4530_17214C.1.pep
FLVTNTGIIVLAEGSFMNLGCATGHPRFVMFCLFTNQVIAXLELVKEKSTAKYLKKV

SEQ ID NO: 113427 - protein, 397 aa, Oryza sativa
  Clone ID: PAT_MRT4530_17215C.1.pep
MEQEQDEEEEEAEASPREIPFMTSAAAAATASSSSPTSVSPSATASAAASTSASGSPFRSSDGAGASGSGGGGGGEDVEVIEKEHMFDKVVTPSDVGKLNRLVIPKQHAEKYFPLDSAANEKGLLLSFEDRTGKLWRFRYSYWNSSQSYVMTKGWSRFVKEKRLDAGDTVSFCRGAAEATRDRLFIDWKRRADVRDPHRFQRLPLPMTSPYGPWGAARGRSSCRPATLFEHHRFRQGFDFRNINPAVPARQLVFFGSPGTGIHQHPPLPPPPSPPPPPHQLHITVHHPSPVVTAGLPMVVDSVPHVNNPAAASKRVRLFGVNLDNPHPDGGQSSSGHDANALSLRMPGWQRPAPLRSLELPPHMPAGAAGAESSAASSPSSSSSSKREAHSSLDLDL

SEQ ID NO: 113428 - protein, 165 aa, Oryza sativa
  unsure (1)..(165): unsure at all Xaa locations
  Clone ID: PAT_MRT4530_17216C.1.pep
HRVWIECRESVRHVTXVLCXGSERSDTCQSGAPGRSALCFRVTLVQMCEISKXEXPTVRRRKIWGLCPDGGKXLXVWXCLKIVWKNCVPHDPRXSDTHGXLVTVSVVDVALRVHEWCVWWLFFFVFKLEPIPGKMLRTTLSKCIWFWEIYGYRXGVLPQKKKKKK

SEQ ID NO: 113429 - protein, 224 aa, Oryza sativa
  Clone ID: PAT_MRT4530_17217C.1.pep
MRVPEGPYIEAPQSTREEKKEGGELDFAGGLSAAREVLARPGLAIGPAGLRDGPRGLAGRGGEREPVGRVHLAWSRGGQGSELALGGRGQIGDRGGDAGDGRKKKKGRGKGGLPPCFFGKRRRERERRGRGRRGSASVPWKLARGGGEARLMTTAMTADRRRAGAAGADDGGDWPVGHHGVRAREATGGAAIWAASAGSGSEGGGHSARAAHAHARAAHGQSEG

SEQ ID NO: 113430 - protein, 94 aa, Oryza sativa
  unsure (1)..(94): unsure at all Xaa locations
  Clone ID: PAT_MRT4530_17218C.1.pep
ATRSVTGERHAGRSVPQLAPAITRHHDVSGDMLSNIKGSMAGNALNEDGHEHLGIXKHTWTKGLICDQTYRLLHVYCDYKTFAHTXAQCDKILD

SEQ ID NO: 113431 - protein, 63 aa, Oryza sativa
  Clone ID: PAT_MRT4530_17219C.1.pep
EHRPRLHLTNCQAMRHACSEDTMLTADQCHEQAVRTMLHSIMHEELLEDHSDADPAGQAQAQV

SEQ ID NO: 113432 - protein, 1608 aa, Oryza sativa
  Clone ID: PAT_MRT4530_1721C.1.pep
MDQYRPLVEDLKLLWKKEGVLPVWDEDKQGMLVAASVSLVDIEQPLSFDGVGTTRIEGLVEAAGSAREVDGGERGVGGGSGLGGECRRSVETPVGQVASGVGEEEATTTRKDVTGLAAPGSVEAAASGSARKAAAPGSVEGVAGDPRCLLYPPPPSLSPLVVGNALAPCALAPPSPPSLQPSFAAVPVVAVAREDRRRGRQVVAVLVRPFAVAVDRRSTVAVVKPKSAAASSSLPSPSVPLPPLFWSPRCRSPASVRRPSRRAAAAGGDVTADVIVALSRGDYDPGKVRCSGLCYARGIVTTPFRGTVVMPRYKPEYLFGVEGFVQELSTMSFVIGFGTAPFYAQIPHDRHEEKCRVKVTLNSNSEDIPSVMFEAGGRNYIHACQEVARIAIGELRDRYSDQLADTEYRYHPRQPQGSDRGSYLETEGIENDATTRHLVEMLWAMDESRAETVLAAQDREDRNRGKICKLEDKVDRLERELAALKGEAPPQKARIRLTARKRALFVPRYQLAPKVRVVEKEVAPTLADPPVIIISDDEEEESKRNHSKIEWEATQDDEDEPNEPSIDLRCSEELDNGNGPNNNNNNNNEGNPTLAQVLAQQTQLMNMMMQQLQNQQNQGNNHAPPQNKLAEFLRVRPPIFSSTSNPVEAGDWLHAIEKKLDLLQCTDQEKVSFASHQLHGPASEWWDHFRLNRTTAEPITWLEFTAAFRKTHIPSGVVSLKKKEFRSLTQGSRSVTEYLHEFNRLARYAPEDVRNDEERQEKFLEGLNDELSYPLMTGDYSDFQKLVDKAIRQEDKNNRMEQKKRRIAQFKTQQGNNQKPRLTLGPQTMPHGGSSSVVRPQRQFFNNNAGNNICNQAPRPVAAPTQQQPSKREQGSKPVVCFNCGDLGHYADKCPKPRRVKVVPTQSNSTVPASKARVNHVAAAEAQDAPDVILVREYPDVFPDDLPANELAEVKRQVDDLLQKGYIRPSLSPWGAPVIFVEKKDHTQRMCVDYRALNDVTIKNKYPLPRIDDLFDQLKGATVFSKIDLRSGYHQLRIKEEDIPKTAFTTRYGLFECTVMSFGLTNAPAFFMNLMNKVFMEYLDKFVVVFIDDILIYSRTKEEHEEHLRLALEKLREHQLYAKFSKCEFWLSEVKFLGHVISAGGVAVDPSNVESVTNWKQPKTVSEIRSFLGLAGYYRRFIENFSKIAKPMTRLLQKDVKYKWSEECEQSFQELKNRLISAPILILPDPKKGFQVYCDASKLGLSCVLMQDGKPSFAAVPVVAVAREDRRRGRQVVAVLVRPFAVTVDRRSTVAVVKPKSAAASSSLPSPSVPLPPLFWSPRCRSPASVHRPSRRAAAAGGDVTADVIVALSREPAGPPAALADGWVPPVISLLAPRRRPPVPPAIPSPVSPVFPSLSPSDSSGFIPQSSPASSMAAEISAPVSFLSGRALPLSALYICSPCFALPFPPLAARSPRRIRARAVFLSLRRRRRAPVRRRRRSALPPDSAPPPSASPRRRRPRPPLRFARRPPEHRRPRRPEPRRRVPPLRSSSPPSSCLGVSRGPSLSLPSPLRSLGRRSAAPVVAGGDHRGAVVPPPVGRAGEAAFGRALAAAKWARPSAARARGCG

SEQ ID NO: 113433 - protein, 73 aa, Oryza sativa
  unsure (1)..(73): unsure at all Xaa locations
  Clone ID: PAT_MRT4530_17220C.1.pep
TQGIPPVASSAQPMAPASAPAPAAPSSAVQQTPARRLALQPIQQTPLRQXVVQPIQQQGSMNVLPGFATPGGQ

SEQ ID NO: 113434 - protein, 133 aa, Oryza sativa
  Clone ID: PAT_MRT4530_17221C.1.pep
MAGRRRARTTSIGRLMRGSCKISIARLMAVSVWIVYCRKKRLVVNFGGVISGGIVALFRPWTMRHAGEYLRRIHVARGGERAVSSRGVLMPSMRHECPALEDAQAHDTMGDWRWPSSIVPACFTLDTSHYLSR

SEQ ID NO: 113435 - protein, 86 aa, Oryza sativa
  unsure (1)..(86): unsure at all Xaa locations
  Clone ID: PAT_MRT4530_17222C.1.pep
MELLFTALDLVGCVIPRSLPXLSPSVPHRPPSQQPDQVGCAVPRSPPPLSLPPPVTVLLSCDPNSFALNKGAYAIVERRLKLAHWA

SEQ ID NO: 113436 - protein, 353 aa, Oryza sativa
  Clone ID: PAT_MRT4530_17223C.1.pep
MVAGGGHRHGGAAAERGEGRGKRNGRSTAHPGSTATTGTATGTEEGSGAARVDGDGGVPTVGGRNGGVDEVGEVAANPKKATSKREKVPGRRQRVGRGRERPDVGESAAEDPAAIDAPARFRGKPAAALGHRRGGGSGGRKGMTGRDKPPLSPSSASLSNVKEKIQKLGLTDVHEGNVVPIDPEKFTPEQKEDFNAMMQQAQDQFLSSFMQTRKGTFVQKYKVKVVLEDPGIGSSKEGEKKQVPDGSAQPSDKGVTDGSTQENQGDYFHGVHGVQADGTSISSSTCSAVVGSRPINQSSIIAQQQPIQQTPPRQQVVQPIQQTSPIQQVVQPVQQTPARRLALQPIQQTPLRQ

SEQ ID NO: 113437 - protein, 223 aa, Oryza sativa
  Clone ID: PAT_MRT4530_17224C.1.pep
MNLSGRDKPPLSPSSASLSNVKEKIQKLGLTDVHEGNVVPIDPEKFTPEQKEDFNAMMQQAQDQFLSSFMQTRKGTFVQKYKVKVVLEDPGIGSSKEGEKKQVPDGSAQPSDKGVTDGSTQENQGDYFHGVHGVQGNSSCCIISSADGTSISSSTCSAVVGSRPINQSSIIAQQQPIQQTPPRQQVVQPIQQTSPIQQVVQPVQQTPARRLALQPIQQTPLRQ

SEQ ID NO: 113438 - protein, 73 aa, Oryza sativa
  Clone ID: PAT_MRT4530_17225C.1.pep
RSYWCPCLPKFLGTRTATVLFLAATTGMMQFLLRCTLISKYMHLEMISQSFKKIRIYIPEECFLVRTDERQKV

SEQ ID NO: 113439 - protein, 75 aa, Oryza sativa
  Clone ID: PAT_MRT4530_17226C.1.pep
MARVLAGKTKWRLDHVIAIGDSKATTARPIGYSKVTASADAHATIKTTLSVVRNWNIDYAAGKSFLLPIFLICFF

SEQ ID NO: 113440 - protein, 145 aa, Oryza sativa
  Clone ID: PAT_MRT4530_17227C.1.pep
MSNYQMDVEQNLDIDITNRGWLADAHGGGLLLLLANAAGDVIPGSLPPGRGGGGVVVLGRGGGAPGGGADVAVEAGHVAVGEGGGHGGERVEGVAAEDGVGGGLAEVPVSRPHELDGAAQRRGWRRPGRPRGRRALIFLRVSLLL

SEQ ID NO: 113441 - protein, 66 aa, Oryza sativa
  unsure (1)..(66): unsure at all Xaa locations
  Clone ID: PAT_MRT4530_17228C.1.pep
CCSRCRRAAPAAAATCCRCAXCCCRCRRRCAAAAATTAAAAAAXLPPPSRVAPSLMRPPPPPTRRA

SEQ ID NO: 113442 - protein, 516 aa, Oryza sativa
  Clone ID: PAT_MRT4530_17229C.1.pep
MAHAAFDAEAGAAAKPPAADAGAAFVLESKGRSHPSTPRPPSARNARADSAVICGWVPSRGDLAGTWWHAGFHLTTAIVGPTVLTLPYALRGMGWALGLTVLTAVGAVTFYEYSLMSRVLEHCEARGRRHIRFRELAADVLGITINSPDPFLSTAPHHHTHMTFPCIAPWSGWMFYFVVIVQTAINTGVSIGTILLAADCLEIMYTSLSPNGPLKLYHFIIIVAVALAFLSQLPSFHSLRHINFASLLLSLGYTILVSAACIGAGLSKDAPGKDYTLSSSKSEQTFNAFLSISILASVYGNGILPEIQATLAPPAAGKMMKALVLCYSVIAFAFYIPSITGYWAFGSHVQSNVLKSLMPDTGPALAPTWLLGLAVLFVLLQLLAIGLVYSQVAYEIMEKSSADATRGKFSRRNVVPRLLLRTLYLAFCAFMAAMLPFFGDIVGVVGAVGFIPLDFVLPVVMYNIALAPPRRSPMFLANTAIMVVFSGVGAIGAFASIRKLVLDAGQFKLFSNNVVD

SEQ ID NO: 113443 - protein, 99 aa, Oryza sativa
  unsure (1)..(99): unsure at all Xaa locations
  Clone ID: PAT_MRT4530_1722C.1.pep
LDTKAFIFKELLFWAWEKLSKTRSTETTGTAAEAEEGGGAVRDDKDDGAPTVGERNGGADCVDDYSAKPKEATPRGEEXLSDXXGDPELVCDGAEISAA

SEQ ID NO: 113444 - protein, 85 aa, Oryza sativa
  Clone ID: PAT_MRT4530_17230C.1.pep
FKLGTNDPATSSSPSESQVFFYPFCVTFFYSFFLLLLCVAVMISAELISELSVLRLSCHLAAWLCFCFCLCRCRVPCRNGVVLVQ

SEQ ID NO: 113445 - protein, 92 aa, Oryza sativa
  Clone ID: PAT_MRT4530_17231C.1.pep
KGPPWGWGHSPRHPRGWSWGWNWNPRQRCRVSHRGRRRGTQGACVRSIDPSIDRARGGVISPTPSARSSAGHRSPAIRRPLFLLLKIKVWLI

SEQ ID NO: 113446 - protein, 49 aa, Oryza sativa
  Clone ID: PAT_MRT4530_17232C.1.pep
MRVEEVAGERKDGICLSGENGNHDVKILWGNGEDQIEVGSKMKIVAETE

SEQ ID NO: 113447 - protein, 453 aa, Oryza sativa
  Clone ID: PAT_MRT4530_17233C.1.pep
MGTGLLLWCLHCVPVWCCSPTYPNPDDPIGGATETDDLSVLQEKIEIATNSKDINEADKMHLYNAWSTLLDTTSDEVMKSSDVPRPPHLENCRLKWERNKKFDSYSDNGVFPPWTLWKGSLGLELFNQNYSDSEEWRQMFFSDPSLRFLYADWERLPGFGIGAQLAGMSGLLAIAIKERRILVAGYYNRADHNGCKGLARSSWSCYFLPETSADCQKRALDLMQSKDSRENGIIKVKENYTSKQIWAGHIPRIWGRPWKYMQPTTEIDGRLVKNHCKMDRRWWIAQALRYLMRFQSEYMCRLLNVARHSAFGMQAAKMVLENVPDPPKPSISRTESDIERLVWSEHKPYIPGPLISMHEVIDETKLYPKWNFYFTNVTRQDVNVSMAMYEASLGRVTSTNYPLVNFIMATEADFFIGALGSTWCYLIDGMRNTAGKVMSGYLSVNKDRFCSSE

SEQ ID NO: 113448 - protein, 853 aa, Oryza sativa
  Clone ID: PAT_MRT4530_17234C.1.pep
MEGEKSAATRSPQPTVGGFGGGGRRWEGDKGFQRQNLQMQQQQQSQNQQPPWKQQARGMEDTVGEGSKGGQQGVTEKQTQQYRPVQPRKRSKNRRRKGGLQNSQKGFKHQLQIQIRIPLECFRIKGLFVLDARRENVKTIPPKEHMNPMAMVKVIYGGDISETQLEEEGIPDEMKGYQALFEVGSNLGVVMEVDMPTITSKDVVRMKIGMMDLKQLPLRLMLSTPEALLYEAIFTLEKVVEVGWLKGKQMEGKETQEAEASLGKDKGRGESSQIQYYTPAKIELLAKEDKKKAIQIMQDREIAMAIQEKEEKEQHKVLKRGLETRGESSNKEIMAVESKDESLPMIKVGQNQQMRSIKEDLANLIGVSLGCSIEAVDTNMKLINDLEEARVKLFLKEQQKVGKDEPIENKKGDDNFQDDLFNFLDETDCESNNSELDWAESLLLHSQSGEGKKKNKKGNLAIVKVTPRVNKRKPGKNTKKKKMKGIIWNIRAGSGRHIAASGAACWPPLSVSPCNLQITTCNNNCKHLILSQVTMQGKALRLPDQNALDGKSKENFALEHYMKTQFITSLQNGRGATGYWWPTTAMLTEADIYGLAASNLVAGSNLEGTVQSILEMGGGAWDRDTVMRALGAAYNNPERAVEYLYTGLPGQAEASAVVQALSVPAAVQAFPVPAAVQPVDPSQAPQSAQLSIPSSGPNANPLDLFPQVLPNASANAGGGNLDVLRNNSQFRGLLSLVQANPQILQPLLQELGKQNPQILQLIQENQAEFLRLINEPAEGAEGNLLDQFAAGMPQTVAVTPEENEAIQRLEQMGFDRDLVLEVFFACNKDELLAANYLLDHMNEFDDDAPEPPQ

SEQ ID NO: 113449 - protein, 145 aa, Oryza sativa
  unsure (1)..(145): unsure at all Xaa locations
  Clone ID: PAT_MRT4530_17235C.1.pep
MVASKQLHSQRCGGHCQLHHHRPEEIAGAESNERDGSSGCGGAGPXMVVLILGSGAASEAEDDGGGRWRCCCGCSCGAGGGADAGDGLLPICGPSFWDLGTAVSSRSALPRPRGVGSLPSSSPPPPQTLGCSGDAATPQPDAAAA

SEQ ID NO: 113450 - protein, 34 aa, Oryza sativa
  Clone ID: PAT_MRT4530_17236C.1.pep
VVRDRTSTVLLYRNKLVYVLIILLSNYCPITGLV

SEQ ID NO: 113451 - protein, 90 aa, Oryza sativa
  Clone ID: PAT_MRT4530_17237C.1.pep
MNDLMTKSFMSYVDLKKAAMKDLEAGGDGVELPEVGVTDERLEGFFQETEAVEEEMAAIRDALARLNAGNEEGKSLHQPDALRALRGRVN

SEQ ID NO: 113452 - protein, 41 aa, Oryza sativa
  Clone ID: PAT_MRT4530_17238C.1.pep
MRLRSALLRQSCKGMGRVIKMMAGKDWTKLAVYHSALSADT

SEQ ID NO: 113453 - protein, 372 aa, Oryza sativa
  Clone ID: PAT_MRT4530_17239C.1.pep
MRSQIWSVSEFQMFWSESWAVRKAQEGLRMVGDAVIDLTAQMEGSFGEGANCNGNSSSCFCFFGFFPLHSQPQEASIIVPAASPNPCRPRTPAAPRRRRCAAAVSMAAMNNDLGGLGGRPATSQANPFESALYGAGPGLIRSGLGAYGEKFLGSSSEFMQSNITQYLSNPQYYFQVNSQYVRNKLKVILFPFLHRGHWTRITEPVGGRLSYKPPIQDINAPDLYIPLMAFGTYVVIAGYALGVLGRFTPEALTLQFTKGLLGWFLQVILIRVLLYTLGSGEAPLLDIVAYAGYGFAGTSLAMLVRVFWSPSYYFVLPWFSICTGVFLVKTMKRVLLGAPRSYERHPSRNHYFLLFLAVVQFPMLFWLGNISG

SEQ ID NO: 113454 - protein, 100 aa, Oryza sativa
  Clone ID: PAT_MRT4530_1723C.1.pep
RRRQADGSPDPGDGPRQRRGRASRAPPRPPRRRSSAHPPPPGADAAAADAGLAPPQRSRRHPSPGASVPGGPRRSRRRRRRRGDEASTGMADRRGDREEG

SEQ ID NO: 113455 - protein, 45 aa, Oryza sativa
  unsure (1)..(45): unsure at all Xaa locations
  Clone ID: PAT_MRT4530_17240C.1.pep
QSVANCTTLDSCQFFPIDQYYPVSWCLCWIDSITLMIIRIXXSDD

SEQ ID NO: 113456 - protein, 154 aa, Oryza sativa
  unsure (1)..(154): unsure at all Xaa locations
  Clone ID: PAT_MRT4530_17241C.1.pep
MSETKKNKYGGAHVGPTCHSLSALPLLPSADPDLFFAILGGVGQFGVITRGRARIPLSPCAPTSENPTQNPVALLQLCVDRRCLIFPFLHTDYVPGSLRRFITGAADCFVGLGVDKEAERLSDDHGLPVGNTADLRPLAAXRLGRPEFRQAYLD

SEQ ID NO: 113457 - protein, 439 aa, Oryza sativa
  Clone ID: PAT_MRT4530_17242C.1.pep
MAAAAPDKAVERLSQKLVHPSSPTPSAPLRLSWLDRYPTQMALIESLHVFKPDPARDAAGQGLAPARAIETALARALVEYYPLAGRLAVSRDSGELQVDCCGGAGGHGGVWFIEAAVPCRLEDVDYLEYPLAISKDELLPHPRPRPTRDEEDKLILLVQVTTFACGGFVVGFRFSHAVADGPGAAQFMGAVGELARGGERITVAPSWGRDAVPDPAGAMVGALPEPAGASRLEYLAIDISADYINHFKSQFAAATGGARCSAFEVLIAKAWQSRTRAAAFDPSTPINLSFAMNARPLLLPRGGAGFYGNCYYIMRVASTAGRVATASVTDVVRMIREGKKRLPSEFARWAAGEMAGVDPYQITSDYRTLLVSDWTRLGFAEVDYGWGPPGHVVPLTNLDYIATCILVKPWAHKPGARLITQCVTPDRVTAFHDAMVDIN

SEQ ID NO: 113458 - protein, 108 aa, Oryza sativa
  Clone ID: PAT_MRT4530_17243C.1.pep
ARVRPSSDRGGALPPPAASTHPVLAGGAKPPVTIPDPIAALLSSTPTPFSFDAFARPLSYPFLPESASDPMDLSDCSLQILAAPCKVPIIFGLHCLFYLITKAHGLTC

SEQ ID NO: 113459 - protein, 53 aa, Oryza sativa
  Clone ID: PAT_MRT4530_17244C.1.pep
SPGISAYPFLVPDFYTPLLGQPWAPPGYGPILLGWPQPLSIRPALFMTFFPPD

SEQ ID NO: 113460 - protein, 73 aa, Oryza sativa
  unsure (1)..(73): unsure at all Xaa locations
  Clone ID: PAT_MRT4530_17245C.1.pep
RWPIWARDISILKYNXYIFHIDSSIQSRNVAAASGGFSMFVXLLIHPTLTLLHPTQFVLSFTAINDTKHDISP

SEQ ID NO: 113461 - protein, 50 aa, Oryza sativa
  Clone ID: PAT_MRT4530_17246C.1.pep
RARIPWDLLSQGDSPVPRVHNKVGYSHLGRFSAAFRKQFGVSPKQWMLSK

SEQ ID NO: 113462 - protein, 60 aa, Oryza sativa
  Clone ID: PAT_MRT4530_17247C.1.pep
VLVRLQVKGASLSPSRVRDRTIDRWWAVAPLFKLVPCASSMQVNSFLLLNFFDPLVLSCQ

SEQ ID NO: 113463 - protein, 32 aa, Oryza sativa
  Clone ID: PAT_MRT4530_17248C.1.pep
KAFHPLYTRESYQEQQCWHSNISPGEAMPILI

SEQ ID NO: 113464 - protein, 289 aa, Oryza sativa
  unsure (1)..(289): unsure at all Xaa locations
  Clone ID: PAT_MRT4530_17249C.1.pep
GIFIQVRASYLTGNSPTSYGGSNIPETEEQASSPPLNQDTDVGPEASTFDKVEGPARPPPIIISPMVGDEEEILRTKSAEDSXPPILVKWWDDEMQPQGIVINWQKEEDEVVLLAKTLNQATRLVNRIHLQNEAKTATLEKLVPHLGTLEETRAKLYETKEXARKTEHELRNRIVEFQDTNFELSGSSKEVAKIEDLERRIKALENDKAALSKERDLVVKEFDHMGKTKAQFDLLINKVEIAEKARDEVANIATPIIQAMYHCNSGTSSLDAMEIFDKLAIWEQAWPWQ

SEQ ID NO: 113465 - protein, 40 aa, Oryza sativa
  Clone ID: PAT_MRT4530_1724C.1.pep
IGAVGKGGRDGAGRALRRPLSLPDSPRHERGLPVARWGRG

SEQ ID NO: 113466 - protein, 1489 aa, Oryza sativa
  unsure (1)..(1489): unsure at all Xaa locations
  Clone ID: PAT_MRT4530_17250C.1.pep
TNAGTGVPRFYKLEFPKYDSKEDPLNWFNHCEQFFRGQKTLDGDRVWLATYHLTGDAQEWYFHYEQHHGPXWSAFKDLCHAQFGPPIHRNSLGELKRLSQTSSVAAYQTKFLALASRTTEPLMDSQQIQLFTAGLREELAIDVELHQPDDLQEAMGLARAYERKASRLASGTRPALRAPFRSGPAAANLPTAPAATTEGSQEQAPRQFRRLSPAELAERRCQGLCYNCDEKFVRGHKCARLFYIEYDDNVEGDMEPAPDEPRVSLNVLAGLDGANTMRLPVEIAGERVVALVDSGSTHNFIHTELARHLCLHLSPVRHDLYVVVANGDRLVSPGRCANLRLRIEGKLFTVDCFALDISTVDIILGTEWLSTLGPILWDFRNMRMSIWRSTREVTLHGLANRRPPHCEMLETEDLLPRLLDDFADIFAEPQGLPPARPIDHRIHLKPDASPVAVRPYRYPQLQKDELEKXCVAMLRQGIIRPSTSPFSSPVLLVRKQDASXRFCVDYRALNAATAKDKFPIPIVDELLDELRGARFFTKLDLRSGYHQVRMHDADIHKTAFRTHQGHFEFLVMPFGLTNTPATFQALMNSVLAPFLRRFVLVFFDDILIYSATWAEHLQHVQAVLRAIHNNKLVLKHSKCRFGERQVXYLGHTVSAEGVAMDELKVQAIGAWPTPRSVRAVRSFLGHTGYYRKFIKNYGTIAAPLTALLKREAFRWSLEADAAFAALKAALSSAPVLQLPDFARTFTVECDASGSGIGAVLHQGAGALTFFTRPLAPRHASLTAYERELIGLVQAVRHWRAYLXGRQFVVRTDHYSLKYLLDQRLSTIPQHRWVSKLMGFDFTVEFRPGRNNVVADALSRRDEDMAPTLMALTGPAFSVFDDLRREVATDSSLVALRDKIAAGELGAPWAFTDGLLTKQGRVFVAARSPSLPALLDVAHTGHEGVERTLHRLCADFTVPNTKQVVQDHVHACTICQRNKVEHLHLAGLLQPLPVPTRVWEDISMDFEEGLPRVNGKSVILTVVDRQSKYAHFLPLGHPYTATSVAHVFFNEVVRLHGIPLSIVSDRDPVFTSAFWTELFRLAGVKLTMSSAFHPQRDGQSEAANRVIGMYLRCLTGDRPRXWLRWLPWEEYCFNTAFQSSLRTTPFQVVYGWPPPALRAYDRGTARVHAVEQALTERDTFLNEVRERLLQAXDYAKLFYDDKHRDVAYGVGDWVWVRLLQRQAASLPGFSKGKLSPRYYGPYKVMERIGEVACRLQLPAGTRIHDVFHVGVLKKFHGEPPEIVPALPAMAYGRVLPVPVKAVRGRIARGVWEVLIHWEGKAASEASWENEAEFRRRYPAFQLEDELFPKDGRDVMVGITLYPLTVAATRGVAGSQWKAGSQGRDGATAPRWEEADGDAEGTEVGSGGGSEWEKHDLAASPARTRRSAGSGAWRWGRRRTAAAYRWQRGVGGASEEDGHGGSGEDAEERRQRGVAPARTRGGVNEEEKRAD

SEQ ID NO: 113467 - protein, 172 aa, Oryza sativa
  Clone ID: PAT_MRT4530_17251C.1.pep
RPGFLIDSVYDSMIIGGDGAGIHPDFICSFDLEVEEWREDIQGPISRNFVYDMDFPDEYIAIWDQLSLAELKGYLVLVYHQSYRSSTIDLWYLIDYETRTWIKQYSIQIESFVPVRECKVKPLLVLDDGRIVVWLGSTGLLLIYDPRTSTFAEVEMRRLSEVGLYTGSVLSL

SEQ ID NO: 113468 - protein, 80 aa, Oryza sativa
  Clone ID: PAT_MRT4530_17252C.1.pep
MPAVGFGRDGTGGNWRKTTWPAGPSEEGRSWTEAAQGREGRRVGRLEEKDGPEERRSAREREEDFAHGLRETRTLGQKWP

SEQ ID NO: 113469 - protein, 32 aa, Oryza sativa
  Clone ID: PAT_MRT4530_17253C.1.pep
LDVHRLMQLIVHSKETHVPRKTNLPSLCVLCP

SEQ ID NO: 113470 - protein, 350 aa, Oryza sativa
  Clone ID: PAT_MRT4530_17254C.1.pep
MALISLVIIFLFVGTVISMLRRRHVNRNCRSDHLEILFALGLEIEADRQRTRWHRWCCRGHTAEVGGAGAEEEEEEVVALSSSSSSAPGKKVGAAAAAAEARGFAAAGAFLYSRQASVAAPKSGQLPGCGARGCWHMRCGAAVDLALDTLAAARPLGLWPAALPLQPRQPPSLCSTPKERAAASRSTAAPHRVCQQPRARHPGSGLLLGAATDTCPLYRNCSTSTSTSYRTSRGNPLASSTAAPNFFPGAEDNDDDNATTSSSSSSSAPAPPTSTACPPASSTMFAAGRLAAAVDISFIAVKCSSSLALSGRHALILSSAAYSFAQRQRSGNSSPVTRLTPATSSSTSSQ

SEQ ID NO: 113471 - protein, 95 aa, Oryza sativa
  Clone ID: PAT_MRT4530_17255C.1.pep
WLSPCCASSLPVWLCHCCLSCLFFPCLVAGCPLWVALCCGGACGLSAPPPLVAVSQLLLLLILPLFCSPALPGGACLRPRRGALRIGRVLLFLPP

SEQ ID NO: 113472 - protein, 479 aa, Oryza sativa
  Clone ID: PAT_MRT4530_17256C.1.pep
MAGQTVDPPPIRPQAEEQSNRPGGSSSGSSGANNRGPPEVSTSSNHDAEHEISLDVSAPLHIQRRHPPEHIIGNIREWTTRSKVTTRDTHVNSAFVATFEPKDVTHALTDESWINAMHEELENFERNKVWFLVEPLVGHNINGTKWVFKNKQNEDGLIVRNKARLVAQGFTQMEGLDYDETFAPVARIEAIKFLLALAASKGFKLFQMDVKSAFLNGYNGYIKEEVYIKQPPGFENPDFPNHVFRLSKALYGLKQAPRAWEFEMSMMGELTYFLGLQIKQMKQGTFVHQTKYTKDLLRRFKMADCKPISTPMGSTAVLDPDEDGEVVDQKEYRSMIGSLLYLTASRLDIQFVVCFYARFQASPRASHRQDVKRIMSCCSQILWLISTLRDYGLTFEEVPLLCDNTSAINIAKNPVQHSRTKHTGIRYHFLRDHVEKGDVELAFVDTQLQLAGIFTKPLDSPQFAFLRGELGIVHPFGIN

SEQ ID NO: 113473 - protein, 333 aa, Oryza sativa
  unsure (1)..(333): unsure at all Xaa locations
  Clone ID: PAT_MRT4530_17257C.1.pep
MEEESTSSLSTRNGEEKKEQKRGVEQITLMNESIVYSFTSLSVSDLGPYQKHISRSHPPDRQHNHSGLGTTTLHALPCVLYFTLVAASRDPHALPLAVSHAAAVTGRLIRTKRFTGSDRFNLISNAKIQFYPSTSISFGRYHLQTEWYLXRHFGLWRSRIGKRKRKKIDHGGRGWRQRLASRPXVRRTVFTEASSNRTNGAPIDQAQARPEDKPVLDVAEARSYKRHPRLAMLGATAPWFIARKVLSRSTRGQSRLQLSIVVKGKDMAPRLLITKTGLDGSREGPRQRTSAAGSPGVLAEVQVLSGNATSYQLIRSWVKFLRENELLIGATRL

SEQ ID NO: 113474 - protein, 636 aa, Oryza sativa
  Clone ID: PAT_MRT4530_17258C.1.pep
MVASSHTPIISVMTDAPRQLLHMDTVGPARVQSVGGKWYVLVIVDDFSRYSWVYFMATKDEISHLRIFGCKCFVLKSGNLDKFEPHSTDGLMLGYSAHSRGYRVLVLDTNKIVETCKVTLDEASPGARPEISGTLSQVQGEDIFVEESDDEEDDEPTTGQTGAMAGQTVDPPPVRPQAEERSDRPGRSSPSSLGADNRGPPEVSSSSNHDAEHEISSDVTAPLHIQRLHPPEQIIGNIGECTTRSKEEVYVKQPPNFENPDFPNHVFRLSKALYGLKQAPRAWYDRLKNFLLAKDFTMGKVDKTLFIHKHGDDQHFVQIYVDDIIFGCSSHPLVVEFAETMRREFEMSMMGELTYFLGLQIKQMKQGTFVHQMKYTKYLLRRFKMVDCKPISTPMGSTAVLDPDEDVEVVDQKKYRSMIGSLLYLTASKPDIQFVVCLCARFQASPRASHRQAVKCIMRYLQHTLEFGIWYSTSSSICLSGYSDVDFGGCKIDRKSTSGTCHFLGTSLMAWSSTKQSNVAQSTAESEYVAATSCCSQILWLISTLRDYGLTFEKVPLFCDNTSAINIAKNPVQHSRTKHIDIRFHFLRDHVEKGDIELTFLDTKLQLADIFTKLLNSNRFAFLHGELGIIHPFGMV

SEQ ID NO: 113475 - protein, 414 aa, Oryza sativa
  unsure (1)..(414): unsure at all Xaa locations
  Clone ID: PAT_MRT4530_17259C.1.pep
METGPTCHQALGVASRPTASLEKGDRPGITPGATVAQCSTFLYPVCDQSQTGQINGRDLSTYRESLRSHPEPPAEPAKGGLRGLPRFEELAVGKIMDPNFPYQSPSFTLGDFDPNYMSGFDGHLKRHAESCAKKQGIQLRQQQLMVNPDGWWPAFTGRRAPNGPWAAGVPCRHGHGPAIHGPCLGRRLGTWAGTARPVSSAVPNGPCLNXRAGPVPVPGRAVPPVWTPILSPHRTQRNPIAAPLPVEPKWRRGFPPPLVRLADLGPRPPSSSPTRAQVCRSPWSPSGGEGFRRLCSARRRQPHVLDRRPQVRFRNLILCGLILLRASSHHQLLPPSPEQQYSLRLLTTGERRFGDGDPEGLSRSKVLRERSSFLPLKALMFLPLLSLMTDTFLSLMMNTAMKGRMLIWMTRLMK

SEQ ID NO: 113476 - protein, 1242 aa, Oryza sativa
  Clone ID: PAT_MRT4530_1725C.1.pep
MARQVGALGTQGSTTMSSSFVDNSVNTNLNHGFPASTMLVWTQVGKIVFPVYTMILISAGPSMTGNENAMAATQDDSVSKDPPAEAKNGTSTTSKLEKDSNAAEPCCSDKNHEPTRTTSEATRSWCPIHKTRKHTLQACWVFLNVRAEIRACKEREIQRICPTRDVYCPIHKTKNHDLLSCKVFLSATKTSSPKDQQSGISLRDEDKEQRTLVSDRFVGVIDINSHEPSVLHLLEDYGSSPTSTPREELATRRITTTRRLFEIVERCAHVDDALRRKNDKPKTGGEKKPVTDAPESSKKKSRKSGKRKAQAEVLAAEYANPSKRPDPQSSDAKKAWCPIHKTDRHSLEDCLVFKKSLEKHMALEKGKRGAAPKMKWSEQKIEFSQEDHPQTAVIPGRYPIMVEPTIRNIKVPTLDAMGIPRSELTPTDQPFHGITPQSSSKPLGKITLSVTFGQVNNFRTEQITFDVAEFDTAYNAIIGRTALVKFMAASHYAYQVLKMPGPKGTITIQRNAKLAVQCDKRSLDMVEQTPSPPATTEPPKKPSDMPGIPREVIEHKLMVRPDAKPVKQRLRRFAPDRKQAIREELDKLLKAGFIREVLHPEWLANPVMVRKANGKWRMCVDFTDLNKACPKDHFPLPRIDQLVDSTADCELLSFLDAYSGYHQISMAKEDKEKTAFITPFGVFCYVKMPFGLITAGNTFQRTVQGALSNQLGNNVEAYVDDIVVKTKTSDSLIDDLRETFDNLRRYRLMLNPEKCTFGEAEEAFLALKRYLSNPPVPVAPQPNEELFLYIAVTPYSVSTVIVIEREKVQRPVYYVSEALHDVKVLADFVADWTIPDNKSDNQINNETWIMAFDGALNSQGAGAGFILTSPSGDQFKHAIHLNFRATNNTAKYERLLAEIRVVAALEVKRLIVKGDSELVANQVRHVYRKDNIEPDDLARHASRREPLEPGTFLDVLTKPSVKEVSGEVNLDAPDSSSEATKAERAVADIKTTDDWRTPLIKFINSDELPEDDADAEKITRKAKIYCIIGNNLYKKAPNGTIPLTWPFSCWGLNILGPFPRGQGGYRFLFVAIDKFTKWSEAIPTGEIKADNAIKFIKGIFCRYGLPHRIITDNGSQFISADFQDYCIGLGVKICFASVSHPQSNGQVERANSIVLQGIKTRVYDRLMSHDKKWVEELPSVLWAVRTTPTTSNKETPFFLVYGSEAMLPSELRHQSTRVQKYSDEDQEEQRNDNVNLLEEHRK

SEQ ID NO: 113477 - protein, 53 aa, Oryza sativa
  Clone ID: PAT_MRT4530_17260C.1.pep
SAAHAGAGDERDEVEKTTEKLALGTDGRIGDGVARNKGIRYLSDKILAVALRH

SEQ ID NO: 113478 - protein, 105 aa, Oryza sativa
  Clone ID: PAT_MRT4530_17261C.1.pep
MDANIKTLLKLTIWASGISSCSGTGGMLIDSHRLQEVLISRTRGLRCEEGAAVTARGEEGTAAAQGRAASPPPPLAVGEGGAAATPCRTLPSLLPRCAGEKGGIA

SEQ ID NO: 113479 - protein, 285 aa, Oryza sativa
  Clone ID: PAT_MRT4530_17262C.1.pep
MDPNFPYQSPSFTLGDFDPNYMSGFDGGDSFGRIFRNRERKCFDTHRLEEIENLRSSATSGDASSHVVAEELSGYLDSDAIHHEAQDFNVLGWWNDHKITYPVLSKLARDVLTVSVSTVSSESAFSLCGRIIEDRRTTLRSDHVEMLLSVKDWELARQHAQYTADNQELAAHFEQLYLDPDQPHCWYNRTTQIHRCHGCRGRSTAHRCRRPLVAASVGGSGWGRAAAVAHVHPHLGPRPPPPLESALPEVVIVAKVVVVSEVVIVTGEAPPSVPRGGRAAVPIFT

SEQ ID NO: 113480 - protein, 783 aa, Oryza sativa
  unsure (1)..(783): unsure at all Xaa locations
  Clone ID: PAT_MRT4530_17263C.1.pep
MAKILLHGTMHVTIFEAESLSNPSRPSSQAPQFLRKLVEGIEDTVGVGKGTSKVYATIGLDKARVGRTRTLADDTAAPRWYESFHVYCAHLATHVAFTLKAKNPIGASLLGVGYLPVRDVLAGDEVDRWLPLCDDTDARTPSATAAASGKYPGVPYTFFSQRQGCKVTLYQDAHVPDGFIPRIPLDGGRSYEPHRCWEDIFDAXIKGARHFIYITGWSVYTEIALIRDADXPKPGGGVTLGELLKKKAGEGVRVLMLVWDDRTSVGMLKKDGLMATHDEETMNYFQGTEVNCVLCPRNPDDSGSIVQDLQISTMFTHHQKIVVVDHDMPSSRHGGGNGGGRRRVVSFVGGLDLCDGRYDTPFHSLFRTLGTAHHDDFHQPNFATATVAKGGPREPWHDIHCRLEGPVAWDVLYNFEQRWRKQGGKDLLVQLRDLAETVIPPSPAMFPEDAESWNDAARAGLVSGKDQIIDRSIQDAYIAAIRRARSFIYIENQYFLGSSYCWKPNDGVKPEDVGALHLIPKELSMKVVSKIEAGERFTVYVVVPMWPEGIPESGSVQAILDWQRRTMEMMYTDIAHAIQAKGIDADPKDYLTFFCLGNREAKSAGEYEPPEQAEPDTGYFHAQQNRRFMIYVHTKMMIVDDEYIIVGSANINQRSMDGARDSEIAMGAYQPHHLAAAGRPARGQVHGFRMALWYEHLGTVDEAFQRPESLDCVRKVNAMADRCWDLYAGDGPERDLPGHLLTYPVGVAGDGTITQLPGVEFFPDTQARILGAKSDYLPPILTT

SEQ ID NO: 113481 - protein, 181 aa, Oryza sativa
  Clone ID: PAT_MRT4530_17264C.1.pep
MPSASSMLSSATSAEPPFTHSPHQNISLPNIAAFNVALSACADTRDCLCFRHLCDQMPNWNAPPVVLTYNVLIKIGARRLQGPHRTRPQPDPLLQFHPLCHHALLLHRCRMRWIAVPGYTPLDLKDVTWNMAKMRVTSVAGTSIHRRSSDGTRWPMPSMVVSLRTVTKSTAGFNGGSRFWR

SEQ ID NO: 113482 - protein, 62 aa, Oryza sativa
  Clone ID: PAT_MRT4530_17265C.1.pep
SSQSKCLYQIRTPFTILEHQRSQRRVYYSRPLPGFKLSTNNGIRTKLFQRPRLSVPPGQACL

SEQ ID NO: 113483 - protein, 393 aa, Oryza sativa
  Clone ID: PAT_MRT4530_17266C.1.pep
MPISSGILAPTRGASSSSSAVGRKLLLLGARHPPSSVAVAGRGVWRRGLAGVGVAAAAASSSSPDELHARGRPLRGGAYEERSALWNLIKDIEPLDLSIIQKDVPSETVDAMKRTVSGMLGLLPSDQFHVVIESLWNPFFKLLASSIMTGYTLFNAQYRLSLERTLEFSEEETECKKRDSCEEIHSVGRPSMFLSLPEDVGLTIESEMADEKLCGNMDGLGSLSIEAKKLILGMQSRLDSMEKELHELKKKNSSQQMQQFAGEEKNELLYYLRSLSPEKVVELSESSCPGVEEAVYSVVHGLLATLSPKMHTNRSPTSENMAGGAVNFGMEEDDEFTELVEDVSLPFQPLISIPRDRLARLLFWCMMLGHYIRGQECRLELMHLLAVSSDAHS

SEQ ID NO: 113484 - protein, 180 aa, Oryza sativa
  unsure (1)..(180): unsure at all Xaa locations
  Clone ID: PAT_MRT4530_17267C.1.pep
SPTTAPRTCRAPSTQCRQYASPPPPAPTXSVAGIVHPRRRRRRXHGVAWARREASANSKASADVSTSSSTAASPPPPAAHPRHLQPPHSPHSASPRHPQGASPYPFPTAATALFRLAPLLALASLRAHYMPWTXAAADEDGRCRRRTDAGXGGGGLTTAXTDGRDXVARNEKNSYSDGVF

SEQ ID NO: 113485 - protein, 52 aa, Oryza sativa
  unsure (1)..(52): unsure at all Xaa locations
  Clone ID: PAT_MRT4530_17268C.1.pep
TXQGPFSQTAPAGASQQTXVSNSLSYDSRARHSTRVQHRAPLRHPQCTYRLP

SEQ ID NO: 113486 - protein, 368 aa, Oryza sativa
  unsure (1)..(368): unsure at all Xaa locations
  Clone ID: PAT_MRT4530_17269C.1.pep
CRYPPAYSRRRGGPPRRRPRWGGSSSSSGLVILPRPWRWRVVASGEGGLPGSGWRRRRRRRLRPTSFTRAGGPSAAAPTRRHVGPSFHPDQFHVVIESLWNPFFKLLASSIMTGLNCXTFFLTKKYTLFNAQYRLSLERTLEFSEEETECKKRDSCEEIHSVGRPSMFLSLPEDVGLTIESEMADEKLCGNMDGLGSLSIEAKKLILGMQSRLDSMEKELHELKKKNSSQQMQQFAGEEKNELLYYLRSLSPEKVVELSESSCPGVEEAVYSVVHGLLATLSPKMHTNRSPTSENMAGGAVNFGMEEDDEFTELVEDVSLPFQPLISIPRDRLARLLFWCMMLGHYIRGQECRLELMHLLAVSSDAHS

SEQ ID NO: 113487 - protein, 202 aa, Oryza sativa
  Clone ID: PAT_MRT4530_1726C.1.pep
LHHAHPCLDASTRGELHYKPSPLTSSKGRGGAGKRAPPVSGTRAPVHRGPGPPRRSTAGPREPTARIGPKPIGWPRGGAAGARARHETGSAEPWCWAACGLRRQQPAAPNGGEQPEDGGAHGQWRCTRKGRGAGGGAHRACGPTRQSGRSPAAGRGGGAPRGGNDDGGSAAFREQEPAADGRRDREARGDESGDDRRTRRDC

SEQ ID NO: 113488 - protein, 412 aa, Oryza sativa
  Clone ID: PAT_MRT4530_17270C.1.pep
MVEVGRKAHRQHVSELEARKAVLAEIANEVEEERQAALIATTAMNETQDALRLQHGNWEAELRKKLDAAQGVLDAAAVREQRVAETEAASRRREETLEARAMVLEERASVVERDLAEREAAAIIREATLAAHESACAEEESALRLREDALTERERALEEAEAAAHRLADSLSLREAAQEEQARRNLECVRAERAALDQRAADLEAREKELDARARGGGAAAGESDLATRLAATELTIADMQRALDSSAGEVEALRLAGEIGPGMLWDAVSRLDRAGQQVGLWRGQSIKYSTNQGGLAQHLSKMVGALQRLPEELEKTIKSSSRDLAQGAVELVLASYQARDPNFSPWMALDEFPPGTEDSARALVRDAADHIVQSFEGSAPRLAFAPNSDEKGDADGADDSDDEAGAPGASD

SEQ ID NO: 113489 - protein, 88 aa, Oryza sativa
  unsure (1)..(88): unsure at all Xaa locations
  Clone ID: PAT_MRT4530_17271C.1.pep
PLDLSIIQKDVPSETVDAMKRTVSGMLGLLHPXSVHVVIESLWNPFFKLLASSXMTGYTLFMAQYRLSLERRLGVFLEEETECKKEIA

SEQ ID NO: 113490 - protein, 654 aa, Oryza sativa
  Clone ID: PAT_MRT4530_17272C.1.pep
MGNGDGMNVEGGSMEIITRVELELAFASEKLLNLEMLVMEIARKATDFEPPTLEDESVSSETAESAFELDILYGFLDAEVGELDDMISTLETDIQNVEHMVCQDESGGKIKARLDAAMVSLKQMKELVSDIRKESAKFEKAIEFPHDKEGITGDAGYENGIVSSHTSMRTEDQRRNVLQMLEQSIASELDLEKKLSESRCIIEELKLKLHHHDQEKYFLEESIESLCGKTFAAENASEVLLGTSKELVDKVSTVECHLSASRCRKGDLESKLGESLMGLSSLQVNAENIQEGSQHSGGTETHPSPELPSLQDKVKELEKQLRESDSQLQLAKASAETFQEEQNVLHAEISTLENIIKSLKEDVSRAESRAQNAELRCMQLTEANIELNGELNSLKSHGSEKTSLLERKLKESHTQLEHAKASLDATVEQQSMLRSTMSDMEHMIDDLKGKVLKAETRAENAESKCTLLTDTNLELSEELSFLRGRAESLENSLHEANHVKMSTVKDIGIRTKIITDLVTKLALERERLHQQISLLTKKNKILAQKCKGSVKDDTQLSKNVTGKDVELHSTKLAEEIVPDFSSSQTKAEKPVDPSNEEEKTRSSEDDDSGGEGTAEAVRTIQPSVLNWKYITVAFLILLVAVFIYLPLPEESSSV

SEQ ID NO: 113491 - protein, 140 aa, Oryza sativa
  Clone ID: PAT_MRT4530_17273C.1.pep
VFEVCLADRGGVEDQAYRKIRLRAEDVQGRNVLTNFWGMNFTTDKLRSLVKKWQTLIEAHVDVKTTDNYMLRLFCIGFTKRRPNQVKRTCYAQASQIRQIRRKMVEIMINQASTCDLKELVSKFIPEVIGKEIEKFTFSI

SEQ ID NO: 113492 - protein, 48 aa, Oryza sativa
  Clone ID: PAT_MRT4530_17274C.1.pep
LTDDVMHLGSAIMFSIETVGFNRSSCVFQQMYSYVVRLSLSFFLIRFF

SEQ ID NO: 113493 - protein, 595 aa, Oryza sativa
  Clone ID: PAT_MRT4530_17275C.1.pep
MDPNFPYQSPSFTLGDFDPNYMSGFDGTSGSAPTPPSVEEVPVHTAVVEEVPVQAATASEGFSGTASGSVSTHTGSKRSRTSVVWQNFDEIKETCPDGREVSKARCRICRQILSARSSGGTGHLKRHAESCAKKQGIQLRQQQLMVNPDGTVRSWEYDPMVARESLVRLIARQDLPLNFGESPAFEHYIQQSHNPRFKAVSRQTSTRDLENVYHKEATALKELFSTCTFSVCVTSDIWSSRAREDYLSVVVHFVDDDWQLQKRVLGLRLIDVSHTGENIAERIREVINEFNLADKIFAVTLDNASANSRAIEILQPLFCVYAQSFLLHQRCACHIINLIVKTGMKRVGDHIDAVRQAIAWLTASNPRIAAWKRFCIAAGVEAHPRCKLRGLSAILSLVGDTIGVDYSSFYTEVRRKLYEVFGRYEVKFQEVRQRRPPPIPTTGKKKIQWGRIWGGSSSSSIQGGGSSSATSGDASSHVVAEELSGYLDSDAIHHEAQDFNVLGWWNDHKITYPVLSKLARDVLTVPVSTVSSESAFSLCGRIIEDRRTTLRSDHVEMLLSVKDWELARQHAQYTADNQELAAQFEQLYLDPDQPQ

SEQ ID NO: 113494 - protein, 222 aa, Oryza sativa
  Clone ID: PAT_MRT4530_17276C.1.pep
MPLPPELIDARRTYNSSVCRNIAIVNGRLTVVRLSLYLLDSDDDDSDDDDYCTWDLTTWSKPVSSCLDDEWREDFMIESSDVSIDNSTRNACLLPKLDDGCPTTDTLQLAHPTLSLMDAHIVYIMGKVDVSDEKALVLTVDMANKRLQEVSVYDAERIVNDFDYAYTHSTISQYFTTAAAGLKRNLKRPLKFHIQYPHKRQGGPGSKIRDETEDGNNPMELD

SEQ ID NO: 113495 - protein, 1312 aa, Oryza sativa
  Clone ID: PAT_MRT4530_17277C.1.pep
MDPNFPYQSPSFTLGDFDPNYMSGFDGTSGSAPTPPSVEEVPVHTAVVEEVPVQAETASEGFSGTASGSVSTHTGSKRSRTSGVWQSFDEIKETCPDGREVSKARCRICRQILSARSSGGTGHLKRHAESCAKKQGIQLRQQQLMVNPDGTVRSWEYDPMVARESLVRLIARQDLPLNFGESPAFEHYIQQSHNPRFKAVSRQTSTRDLENVYHKEATALKELFSTCTFSVSVTSDIWSSRAREDYLSVVVHFVDDDWQLQKRVLGLRLIDVSHTGENIAERIREVINEFNLADKIFAVTLDNASANSRAIEILQHLFCVYAQSFLLHQRCACHIINLIVKTGMKRVGDHIDAVRQAIAWLTASNPRIATWKRFCNAAGVKAHPRCKLRGLSAILSLVGDTIGVDYSSFYTEVRRKLYEVFGRYEVKFQEVRQQRPPPIPTTGKKKIQWGRIWGGSSSSSIQGGGSSSATSGDASSHVVAEELSGYLDSDAIHHEAQDFNVLGWWNDHKITYPVLSKLARDVLTLVEGIEDTVGVGKGTSKVYATIGLDKARVGRTRTLADDTAAPRWYESFHVYCAHLATHVAFTLKAKNPIGASLLGVGYLPVRDVLAGDEVDRWLPLCDDTDARTPIGDGGGKVHVKLQYFDISKDRSWGRGVRSGKYPGVPYTFFSQRQGCKVTLYQDAHVPDGFIPRIPLDGGRSYEPHRCWEDIFDAINGARHFIYITGWSVYTEIALIRDADRPKPGGGVTLGELLKKKAGEGVRVLMLVWDDRTSVGMLKKDGLMATHDEETMNYFQGTEVNCVLCPRNPDDSGSIVQDLQISTMFTHHQKIVVVDHDMPSSRHGGGNGGGRRRVVSFVGGLDLCDGRYDTPFHSLFRTLGTAHHDDFHQPNFATATVAKGGPREPWHDIHCRLEGPVAWDVLYNFEQRWRKQGGKDLLVQLRDLAETVIPPSPAMFPEDAESWNVQLFRSIDGGAAFGFPDTPEDAARAGLVSGKDQIIDRSIQDAYIAAIRRARSFIYIENQYFLGSSYCWKPNDGVKPEDVGALHLIPKELSMKVVSKIEAGERFTVYVVVPMWPEGIPESGSVQAILDWQRRTMEMMYTDIAHAIQAKGIDADPKDYLTFFCLGNREAKSAGEYEPPEQAEPDTGYFHAQQNRRFMIYVHTKMMIVDDEYIIVGSANINQRSMDGARDSEIAMGAYQPHHLAAAGRPARGQVHGFRMALWYEHLGTVDEAFQRPESLDCVRKVNAMADRCWDLYAGDGPERDLPGHLLTYPVGVAGDGTITQLPGVEFFPDTQARILGAKSDYLPPILTT

SEQ ID NO: 113496 - protein, 256 aa, Oryza sativa
  unsure (1)..(256): unsure at all Xaa locations
  Clone ID: PAT_MRT4530_17278C.1.pep
MSSCFNGGAGWPEPVVRVQAVSDSCGATIPERYVKAPSERPSSLDGGGGLNNIPVVDMSMADGEETARAVAAACREWGFFQAVNHGVXPELLRRARAAXWRGFFARPAEAREAYANSPATYEGYGSRLGTAKXGPLDWGDYYFLHLLPAALKSHDKWPTSSVPAGGGGLREATEEYAEEVVRLCRRVMRLLSRGLGLDDGRLQAAFGGVGGEGACLRVNFYPRRPQPELTLGVASHSDPGGMTMLLVDDHVRGLQV

SEQ ID NO: 113497 - protein, 85 aa, Oryza sativa
  Clone ID: PAT_MRT4530_17279C.1.pep
GFYSWEAQIRPRSFVRSIGVWQTIGSVRHGGCDSACPFRRQRFVSNKTLGKVIAVGRSIFFKNLIQLIVVSPVLYAFRRPKELVS

SEQ ID NO: 113498 - protein, 556 aa, Oryza sativa
  unsure (1)..(556): unsure at all Xaa locations
  Clone ID: PAT_MRT4530_1727C.1.pep
GAEISAPVSSLSGRTLSLPLLYNCSPSSALPFPPLAARSRRRIRARAVLLSLRRRRRPPFRRRRRSGPPPDSAPPPSASPSGCRPRPPLRFARRPPEHRRHRHPEPRRRLPPLRPPFSSSSLSRGEPKTAXFVSPFPPLSRVPLRRAVGRRRRPSGRGCAXSRRPRRRGRPRARPRGCQVGPAVSRPRPWVRLTRGTHGADRRQPRAPGXNEGYTSCGPVVEMSYGGGLVXMLGAQFCLPVPGIPAVVLLNFSQVQKRSSLKMKALVSSSCLPSSACGRRPSLPLFLMAGSVTRHGLDMTGFVLELRGMCVVLGYPHGVDYQARPLPDQEGDDAEPHAGWEVTAVILAGSSERASLAVTAGGDSFPAACQSAALLAIGTLHQRYPDELQHSPYRYHPRRGGARDYATFRDASSEDDATIVHLARMVEAYDAARIDFHQMVRRGMVENNMKILELRQENLQLKKDLDAVEAQLHQLKIAQGEVCRPKRRRVCRSQKITARKSTSRPELVRQSLAWTCFVETPRAEPAPVVPQEGEASGVGSTEDALLLTFRPGPSQQ

SEQ ID NO: 113499 - protein, 121 aa, Oryza sativa
  unsure (1)..(121): unsure at all Xaa locations
  Clone ID: PAT_MRT4530_17280C.1.pep
MAARTGEPPFFNPSSSRRHASEAAARRPGLRHTFIAVPHGSPSRTLPNGVPGNGVGARPVSDSDEXSGAVGLIRPANRRRTEGRPRRRWMVDGDGXGGRWWMQEMAACGGGGNGGGGGDAS

SEQ ID NO: 113500 - protein, 82 aa, Oryza sativa
  unsure (1)..(82): unsure at all Xaa locations
  Clone ID: PAT_MRT4530_17281C.1.pep
GKPAKPSTGRGEMLTAGLTRHRRVPGLLPVATGIRCVCRYTSHTLRYLSHTCARSNNTAVRIDVLSLHRVGEXLXTLSVQMI

SEQ ID NO: 113501 - protein, 142 aa, Oryza sativa
  Clone ID: PAT_MRT4530_17282C.1.pep
MARGQLGKSEAVGKNVDRSERLGLLLLDALSMMMEGSDNTFLSNSGNTDKGMAVGGGGLAVGDGHGGGSGGRELSKTGKTAGRSTCTSVWASHAHKITSGGCGAENDMMRDEGVLGIDPLELPSNSTRWIWTDLTPYFVSTG

SEQ ID NO: 113502 - protein, 39 aa, Oryza sativa
  Clone ID: PAT_MRT4530_17283C.1.pep
MVDDVGVGANIITDGNPVNSEMVSFNRLDLLTFPELLAL

SEQ ID NO: 113503 - protein, 102 aa, Oryza sativa
  Clone ID: PAT_MRT4530_17284C.1.pep
LVLDRERPLFFFFFFFFFFFLVGFFFVCVFFLEKKREPSFAAGEVPNPQPIKINGVLCPPQIFPFPISHSGRRKILQSEEGGGLGGLSWSWDWDWDWKGGRS

SEQ ID NO: 113504 - protein, 95 aa, Oryza sativa
  Clone ID: PAT_MRT4530_17285C.1.pep
WHSELYFSEDKTMFSQKVYFFWPLEPNENGHCNACKNQGMDDLKHPVIGAFDRGDNDTMFPYMYIGDDTACPYFWLSESDDEFPNRVLDDSDDDV

SEQ ID NO: 113505 - protein, 629 aa, Oryza sativa
  Clone ID: PAT_MRT4530_17286C.1.pep
MPEAVAAAVSPAAAAATAMCAEHREKLEHIERVTRNAGQEQRRVLEEILAQNAQAEYLRRLGVPGDAPGADEAFRRLAPLVTYEDILPDVLRIANGDTSPILSGKPVSEFLTSSGTSGGERKLMPTIEEEMERRSGLYSLLMPVMSRQVPGLDKGKAMYLYFVKSEWRTPGGLPARPVLTSFYRSRYFLERPHAPYTFYTSPDEAVLCEDAYQSMYAQLICGLVHRADVLRVGAVFASGFLRAIRFLEKHWPSLCRDIRAGELDGGVTDPAVRGAVGRVLRGADPALADAIEAECARPSWQGIIRRVWPSTKYIDVIVTGAMAQYIPTLEFYGGGLPLACTMYASSECYFGLNLNPMCKPSEVAYTLIPTMCYFEFLPVNSGANDVAAPEPDHRGLVDLVDVKLGHEYELVVTTYSGLYRYRVGDVLRVAGFKNAAPMFAFVRRKNVALSIDSDKTDEAELHAAVTEAVQHLAPFGASLVEYTSYADTATTIPGHYVLFWELRSPAGGTPVPASVFEDCCLAVEEGLNSVYRQCRAADRSIGPLEIRVVADGTFDKLMDYALSRGASINQYKAPRCVRPGPVVELLDGRVQATYFSPKCPKWCAGGNKQWISSGAAAKKTTTTCDSLAV

SEQ ID NO: 113506 - protein, 106 aa, Oryza sativa
  Clone ID: PAT_MRT4530_17287C.1.pep
LDCTCAARLISCNGGEVVVAEERTASVSVVGASAMLQGEEKKAGKVKKGWLAVRVGVEGSSCFYCFFFLVYSHSFFIFFFLFYFSSIFFILLCKVLFVFSLLFSFI

SEQ ID NO: 113507 - protein, 269 aa, Oryza sativa
  Clone ID: PAT_MRT4530_17288C.1.pep
ACRLSGHNEFQPGLYFCRWPFGSNDHIHNIPDFAQYVGFEGNQTGEEEIAADGNDVADDLGQMLQDAREDCESEKEAYKLDKMLEDHRTSLYPGCEQGHKKNKGNACHAQKFPNRIPSRMCIKIPVQDQPGYTNDNVDIQIHREHHSTGILDGTDEAYSSEKPSSDPNSNSGVGKRLTSARRGCGADMRGPPVSGSGEGGRGAGKRDPHGSDSGEGGPRRIGSTDRGGAAHHVAAEPMAPIYPRRRKTAAGGEGDSAKGDAKAAALSGG

SEQ ID NO: 113508 - protein, 191 aa, Oryza sativa
  Clone ID: PAT_MRT4530_17289C.1.pep
MGHQPCLTKVRTESGRLLPPPIRYAPGATITQVHVDLDRSTCNCNLAKKEKKKKRTTRLNDRLLVACRPRNYEKTTGAEFKVAELTGCLVAELQQEPGEASAYAESEWLWIRFAEGAISATSKWFASREMDSKGQYGCTNYLSAKEMKNKRKPILKMQHCNPSEGLGPIERDSDKPFISHGRVWARCQWAI

SEQ ID NO: 113509 - protein, 192 aa, Oryza sativa
  Clone ID: PAT_MRT4530_1728C.1.pep
HFFVPATASTSWTSKVAAGDDMAWPETLPRLPEPPLLRLQRPTVSDLPQFTAFGSSILTMGQHTEYGFVPVANPTWVSDLATGTRRAASPGAYVGFQFERARTWISIWMEREETLVEMVTSVDKDTVSTVRMAANTAPLTADAADIGSTTGTAAADVGSTTETTAAAGSQAAISPDAAPPTIILVEGGGEGM

SEQ ID NO: 113510 - protein, 133 aa, Oryza sativa
  unsure (1)..(133): unsure at all Xaa locations
  Clone ID: PAT_MRT4530_17290C.1.pep
KNXFVXMGXXFXVQDXXXXCXXDXEFFGXIXRPLXXXCXWFVXQXXEXAXENXXPXFFXNXXKPXPXXXXKMXXXXKKLYXEAVFXXFXXXXFHXXXXXXEXPXNKXVXNXFKSXXPXIFQRXXLAGTVCLLN

SEQ ID NO: 113511 - protein, 93 aa, Oryza sativa
  unsure (1)..(93): unsure at all Xaa locations
  Clone ID: PAT_MRT4530_17291C.1.pep
ESQMRXRSXVVPAGRRNRATSGCDXRRCRRRXSSSAAPXLPTAEQKXEXSSPHPATHTGXEACGGGTAPLTRCSTPGGRRDFVSLLWSKSFSE

SEQ ID NO: 113512 - protein, 143 aa, Oryza sativa
  Clone ID: PAT_MRT4530_17292C.1.pep
MIFASLKYKPPLTISPPYVLQLTCTTTSAPWPGYKYATLHQWMHQQQPQQNLVWDRLFCGSLQSLYYGFNRPWHQHQQRYVMTMRPCELHELECHCSGFRTTKWTLFFVGNLGVCRCKIHVSEKCRYKMYLSLKLSQKLSVTH

SEQ ID NO: 113513 - protein, 185 aa, Oryza sativa
  unsure (1)..(185): unsure at all Xaa locations
  Clone ID: PAT_MRT4530_17293C.1.pep
TAGASAAASAAAXGLPSHMSRAGAYXLGSRVATLLSKGATFAAVGFAAGLAGTAISNGLISLRKRMDPAFETPNKAPPTLLNAATWAIHMGVSSNLRYQTLNGVEYLLANAAPPSVFKVSVVALRCINNVLGGMSFVLLARLTGSQKSDAPAASATAEEEKERLIAVGNDIAADAVGAGRDGEGK

SEQ ID NO: 113514 - protein, 396 aa, Oryza sativa
  Clone ID: PAT_MRT4530_17294C.1.pep
GRDYHSCTAQPALHQPTTKTLLPPSKVHLTLLPAAAAKPARRPPLPIAMASMAFTAAKFLPATAPTHLDSSPRLSPPRAGSLSFSPLSSSSSALLLRLRSPSPSGPSGPGGRLPPPPRSYGGGGGSGDAADSGGSSGGILGIFLAGWAARVAADPQFPFKVLMEELVGVSACVLGDMASRPNFGLNELDFVFSTLVVGSILNFVLMYLLAPTAGASAAASAAASGLPSHMFEAGAYSLGSRVATLLSKGATFAAVGFAAGLAGTAISNGLISLRKRMDPAFETPNKAPPTLLNAATWAIHMGVSSNLRYQTLNGVEYLLANAAPPSVFKVSVVALRCINNVLGGMSFVLLARLTGSQKSDAPAASATAEEEKERLIAVGNDIAADAVGAGRDGEGK

SEQ ID NO: 113515 - protein, 126 aa, Oryza sativa
  unsure (1)..(126): unsure at all Xaa locations
  Clone ID: PAT_MRT4530_17295C.1.pep
LRPGAGNEVTAFVSFMDDLINTAKXVRLLRAKEIIESGLESDEAVANLINNTLTKGSVMDEDSSLNDVMSEVDAYCKMRRNRWRAILLHTYFSNPWVFISLVAATVLLIATVIQTVYAILSFNSKT

SEQ ID NO: 113516 - protein, 74 aa, Oryza sativa
  Clone ID: PAT_MRT4530_17296C.1.pep
FIYFFGNPKYVGYVRDTFRRGSVSLSGSHSETWLCTRIRVTQPRFLKIYMKMGQTKKFYILKRMKENNSFFPME

SEQ ID NO: 113517 - protein, 75 aa, Oryza sativa
  Clone ID: PAT_MRT4530_17297C.1.pep
AHDGVCDTLATAYITEAFVWLEHWFDLGSTDTRSRLNLLTVHRHAGYWHVHINAVNWDQQWFGLVPVGTICRMTM

SEQ ID NO: 113518 - protein, 79 aa, Oryza sativa
  Clone ID: PAT_MRT4530_17298C.1.pep
SELPCMGVGLPGCLTDDHDHADQRPWLAALIILISRAIIRSETRRSIRHHISSFAQRSRARGQDFLLWKKEYLFSSLSQ

SEQ ID NO: 113519 - protein, 177 aa, Oryza sativa
  Clone ID: PAT_MRT4530_17299C.1.pep
MAMLVCNPATQELVVLPPSSGSGPCPRSTESTAAIGFDRMAEQSHNDPPVYNIGHEIFTLDTGAGDGWQRMQDQSRAISPGGRRPAACTRGGFFYWFINDSQPCALLWFSLRDEAFDAVPSSLGCTACDNNDRLADLTGELCYVHRVRTSVATHEVWMAAAVDDDDQEWWQRYRVDL

SEQ ID NO: 113520 - protein, 541 aa, Oryza sativa
  Clone ID: PAT_MRT4530_1729C.1.pep
MASRPRRTARAPNRFGFEEVRVEPEADHEEDSIINMLVADLEAHEQAVLPTQIINSEHPCKFLHVHVRRGVRVFRNVPLKFIPEHHAVYSGRIVTLNKSGVVGHRPAPPPVLQEAQILDVDDLTNLALLPPSPEPSLGPRRRGKRIMTPSYSSGGNSKGTRRDSTGDAFNRLADLRVQSNESKARREEQKQAKSARACMEMLKADGISMQDPIYHTILRMFRDGYLCEFFIEDCTTPEGRMYFIQLHGAPDLTPDPLLFAPPPPPTCSGHVEGWYKRFSPHDDDGSDGANGGADGAAMNMSTSERSYGSKDGYYSEEEDSFLDMLVAALKAKLCVRAARWVSQQSGMEWVMETMENPSQCQAIFRLMPDQIHALFGLLTNRYNLHGSIEVCPMEALGIFLYIMAGGNSNRATNNRMVRSGSTVSKYIHRVLNAVYAADINKPVDPNFARVHYRVQNDEEFQPFAGKYFLVDSGYASRYRFLPPYPHVWYHLDEFAEPIVQWIPHRFRCSTLRGWNDVPNRAAAMNTLRDTIADEVYNRFET

SEQ ID NO: 113521 - protein, 836 aa, Oryza sativa
  Clone ID: PAT_MRT4530_172C.1.pep
MAKAQAQLVSLSFPPTAPPFARPRHAPPFLNAAALRTGVPPYSAGVLVSLLRDCADLHGDDTDHRVARRLAPQLHSLAVRTGLSRDPRVTCALVDLLARLGRGPSCARLLHEAAEDGAKDAVLWNKHVAMLAEAEEWDEAIAVFREMQARGVPADGYTCARVLHACGRAGALREGRAVHAYALKLALDAHPLVPGFLAGMYAENADVAAATRVLDAMGAGSVVPWNAVVACCARLGLVDDALELAARMSRSGPEPNVATWNTVLSGCSRHGRDREALGVVASMLKQGLRPDATTVSSLLKSVANTGLLRHGMEIHCFFLRNQLEPDVYTGTALVDMYAKCGRLDCAQKVLDALEHRNLTTWNSLVAGYANAGRFDIALELVELMKKNRLDPDITTWNGLITGYSMNGQSSQAVLLLRQIKAAGVTPNVVSWTSLISGSCHNGEYEDSFYFCHEMQKDGVQPSLVTMSVLLRACAGLALQKKGKELHCFALRRAYDCDMVVSTALIDMYSKGGSLVSAKVIFESIQQKNLVLCNAMLTGLAVHGQGREAIELFHDMWNSGLKPDSITFTALLTACRSMGLVTEGWEYFDSMETKYGVKPTTENYACMVDLLARCGYLDEAMDFIERSPIDPGASHWGALLTGCSIHGNLALAEVAARNLFILEPYNSANYLLMMNLYEYERMYDEAESLKYAMKARGVDSRPGWSWIQIEQGIHVFEVDGKPHPETAEIYEELIRLVFQIKKAGYVPDTSCIAYNVQEEEKEKLLLGHTEKLAITYGLIRSDASRAPVRVMKNTRMCNDCHEVAKHISSLCDRQIILRDAVRFHHFVDGKCSCNDYW

SEQ ID NO: 113522 - protein, 262 aa, Oryza sativa
  unsure (1)..(262): unsure at all Xaa locations
  Clone ID: PAT_MRT4530_17300C.1.pep
MAGRRGLASAHTRLAAAAAGTKATAAHGSGGHRRRRHSVRKHGRRPALGRKREGGRSAHRGRRRGAGKGGGXSALALPGTKAERRPDGVPRTGIGGRRXRRTGARGTVFWRNPSREKRRPRCSSALRSERRRQRDLGWLXRGAKRRLESAAAVEGGSARGDGASEAGRGNGADAGVQHDAAKPLVAVARNGGGGSGEPGRGEVGAATTGEVGADVGWWRLGRRRFLCPRRWMPARVREGFGFCGDVGGNGGWGWPVRDRRRS

SEQ ID NO: 113523 - protein, 539 aa, Oryza sativa
  unsure (1)..(539): unsure at all Xaa locations
  Clone ID: PAT_MRT4530_17301C.1.pep
MVHTWPRVRVHHVDGPDRPGPIGRLGTAERRGLASAHTRLAAAAAGTKATAAHGLGGHRRRRHGARKHGRRPAKGRKREEGRSAHRGRRQGAGKGGGXSASALLGTKAERRPGGVPRTGTGGRRPEGPGEDGGEVRRGRGXSQRHESLVXGENGRXMRTGARGTMFRSGAKRRLESAAAVAEGGARGDGASEAGRGNGADAGVRHDAEKPLVAVARNDGGGSGCGNRLEGRWRAAAEGEGRPDRARERRSRAANRRGSGAPTWGGGGSAGAGFCGTSGENGGGRGVDRAHVVGCELGCGRVPDFAATWTAMAVGVGRREAINELELLVGYTIKLAQRERNEQPRSKSRAWAPHGEEMRRRQGPSPRAPPPPSVRRTARTLQIRAAAAVLLSSSAAAESGDKARRTTTTSGSVSSSPAERGRAQIHAAAAVPRLHRPPRSRSTPPLPSSRAPPQLGPKDNAAASSRATPGVEKSRRRRREEGTPPPEERRAGADTGGGRRGAGAGGGRRGEPAGMSGFGDCMTREEEPVRSWDLGVCGSH

SEQ ID NO: 113524 - protein, 177 aa, Oryza sativa
  Clone ID: PAT_MRT4530_17302C.1.pep
MARVTPPATSIQIPPWRVKVERGRRCAGGHLRWPLPPSATCTRPLRRSSTPPPLAPLLRPSTSCAARTAPLTSPLLPVTPPPAPLLRPAAPLIAATPPPGDSSAQAAPPMSCWGCSKVDEGRKPLGPLGNSGVHRNHPKRKPTVDQVPGNFVDVNEKGTNQFYCPRMKPPTASSPNK

SEQ ID NO: 113525 - protein, 383 aa, Oryza sativa
  unsure (1)..(383): unsure at all Xaa locations
  Clone ID: PAT_MRT4530_17303C.1.pep
MVAVEEETVSLNQRVLDLTSNINNILGRCTGGQAAGGASSGDTNTRRAQPGSASLGEKAFADVSKXAGADRRAPYVSETRXVVHHGPGPQGRSTAGPWVRRPRSAKADRTAGDGRAARPGQRAHKAGGGGGRDQSDSGTWAGRPPAAAARRAQAREAAGQGEKEGRGEECSPRAATRGGERRGSSASALLGTKAERRPGGVPRTGTGGRRPEGPGEDGGEVRRGREGSQRHESLVGGENGQRMRTGARGTVFRRNPGREKWRPRSGAKQRLESAAAVEGGSARGDGASEAGRGNGADAGVRDDVAKQLVAVARNGGGGSGCGDRLEGRRRAAAGGATVAGGGEAGPSPGEAESGRQPLGKWGADVGWGRLGWRRFLWDERGKW

SEQ ID NO: 113526 - protein, 209 aa, Oryza sativa
  unsure (1)..(209): unsure at all Xaa locations
  Clone ID: PAT_MRT4530_17304C.1.pep
MAPFLAVKTRRGEQECPSSRXKWRNMWFYLEIKDSNPVLVVPEDQPDKIPVWTAKPPLTPSLQSFIDIIDDLRERSLSGYEVVADFVGLSSEAVERRVDQVMISGPTTASDIPAPLCERGATERDEAINALPLTDVVGPLADHQVATSLKEKVVKEASVAATTTSGGKVPTKARKFSSVLGHRRKALTPSASDASPPPPRRQRIVTNSE

SEQ ID NO: 113527 - protein, 401 aa, Oryza sativa
  unsure (1)..(401): unsure at all Xaa locations
  Clone ID: PAT_MRT4530_17305C.1.pep
GGARGEEGAGFCGDVGGNGGWGWPARARGGRRRHAGPTRQRVKGEGRTVDMVHTWPRVRVHHVDGPDRPXADRTAGDGRAARPGQRAHKAGGGGGRDQSDGGTRAGRPPAAAARRAQAREAAGQGKKEGRGEECSPRAATRGGERRGSSASALLGTKAERRPGGVPRTGTGGRRPEGPXRMGESGRGAPRRCEASGGDSTTWGGXERRQAAAGVGGGGGRRWCAWXTVLRRRGGEMERTPGCGTTRRSRWWRSRGTTVVGAAVATGWRVVGERRREVRRWRGEGRPDRAWERRSRGGNRXRGSGAPTWGGGGSAGAGFCGTSGENGGGRGGDRAHVVGCELGRCHPRQRRLPQRRRRRQALHHHPRRRNRKSRTKTGERATVAAKPGQAWEGGDQHGSTTI

SEQ ID NO: 113528 - protein, 141 aa, Oryza sativa
  Clone ID: PAT_MRT4530_17306C.1.pep
PCFGSHQPNQQPRSDGRANVVAAGGALPPPRRRRRVPRLSGVRPGFPPLLRRPTPRRSTRSAYWNRFAPPCLGPFGGIRVEFASCAATGQLGIAWLASLGFEFCLVIYSWVKRVATRCLAKKESYHFFSIVLCHDCVYCIG

SEQ ID NO: 113529 - protein, 424 aa, Oryza sativa
  Clone ID: PAT_MRT4530_17307C.1.pep
PLVFVCARRRGGRFLSSSLDSTRRLRRPDSTHSPPHFFWSHFVHLSEACRFSAIIELFMATANNPGPLDLVPGFSPEDMDNPIHNAALSYVSYDRYVLDTSEVYFDDCIPLESYLNIRPMVTSDSYQFRSFGETNPSVTYLVATESCKKIIRNLFLSEDGSVPEDIQHLLNLILHEFDKREIFHFHGSLVSLANVSLFFKSMYDHIRFVMPPDDLRAILTNLPYADVWESKVKTNRILKKPYDFNPDGRIVPADKPSQTCLNKRQREFLHALGLTPIRGQKSLTPDQIALIETLFFFDFLRNRTSHRMDPWRSLILGYNAVDSEELPPSRAGDGGQEQGGSLLRSRVRVVRSSRRRPLWVSRNVPGSMECWLEESGKKVVKYKMPNVVIKQMMSYPYTYPEYAYTEEELAQRSASNSESSSMKR

SEQ ID NO: 113530 - protein, 126 aa, Oryza sativa
  unsure (1)..(126): unsure at all Xaa locations
  Clone ID: PAT_MRT4530_17308C.1.pep
GHQHRRRWSRRAAAAVAVEVEVAXAAVEVESARGGGGGGGGGVGAWRQWCWRAAAAAAGGGVGDDDGGEATLPVAFARADERGEHDDDDGGGGGDVWGGNGAGGRRSIVEKSKCGAGKPMQWIFIP

SEQ ID NO: 113531 - protein, 66 aa, Oryza sativa
  Clone ID: PAT_MRT4530_17309C.1.pep
CKADGCTKIIPLKKRNVQNLNSGEYGGSWHGRISYNYYELWRQYIQVCSSIGLLKCGIGSYLPPVT

SEQ ID NO: 113532 - protein, 227 aa, Oryza sativa
  Clone ID: PAT_MRT4530_1730C.1.pep
MGIRFVLFVNKQGQTRLAQYYEHLSIDERRALEGEIVRKCLARTDQQVLVNPPIPDPPSDSSSFSWIQYCPARKLGLRIGGWGSGERKPPVLGSGSVQCSFVEHRNYKVVYRRYASLFFLVGVDNDENELAILEFIHLFVETMDRHFGNVVFFSNPNNYFSCDCKYAHIYHMGQADGNYPFGQCELDIMFHLEKVHFMLEEMVMNGCIVETSKQNILAPIQLMEKTS

SEQ ID NO: 113533 - protein, 107 aa, Oryza sativa
  Clone ID: PAT_MRT4530_17310C.1.pep
DPVVDNVKKNVVGLDVAVDNPATVSVRERLHDAAQRRRPTTGLQNEARSRRRADSSQTGSGAESKVSINHVRTRSRPRPTEYTLKYAKLCACWQACNSLGSSYASSQ

SEQ ID NO: 113534 - protein, 156 aa, Oryza sativa
  unsure (1)..(156): unsure at all Xaa locations
  Clone ID: PAT_MRT4530_17311C.1.pep
QPRSGAQPPPWXRRGGGRGRGAAAFGQGEPAGPDGGRRRGGVQGAEEPPREARRARAPRRPLLPVCVRDGSDSLTHLVYVGLTFEYSPAISWWTFQSVLDIDVCLVLKPTWTFNTLRFLIDDAVDFFHMFDHSFYLKILCRCIRYKKKKKKKKKKK

SEQ ID NO: 113535 - protein, 203 aa, Oryza sativa
  Clone ID: PAT_MRT4530_17312C.1.pep
MAVKVYVVYYSMYGHVAKLAEEIKKGASSIEGVEAKIWQVPETLHEEVLGKMGAPPKPDVPTITPQELTEADGILFGFPTRFGMMAAQMKAFFDATGGLWSEQSLAGKPAGIFFSTGTQGGGQETTPLTAITQLTHHGMVFVPVGYTFGAKMFNMGEVQGGSPYGAGTFAADGSRWPTEMELEHAFHQGKYFAGIAKKLKGSA

SEQ ID NO: 113536 - protein, 73 aa, Oryza sativa
  Clone ID: PAT_MRT4530_17313C.1.pep
VASPRCSNPPLLLEYAATFTIARHLTIRTALNAAHCRHQELARVQEERRGDKGIHNKDHKLSVSCGKFCLAKR

SEQ ID NO: 113537 - protein, 116 aa, Oryza sativa
  unsure (1)..(116): unsure at all Xaa locations
  Clone ID: PAT_MRT4530_17314C.1.pep
PTRTWTRGPTRGFSSKSLLGRGQHLSLTDLPTPIXFILNTEIVKADDESNHERYPPADPRTTSFAYSVPSGGRSIYASILPSLVLKLDLTMSANKDCFDLPYVDVHLYNSEPGSSF

SEQ ID NO: 113538 - protein, 320 aa, Oryza sativa
  unsure (1)..(320): unsure at all Xaa locations
  Clone ID: PAT_MRT4530_17315C.1.pep
MKRSSSRLTGLWKTPSTLVAAAALGWNAWWCATKLGSVRMWRRNLQTAEGFHTPCECDVAFGADQFKRDSGVIIDGGGVRRASRSSCFNWYHFSIYWGYVISTTLLSYVDENGTXEEVDGHGDDNGXLLPIWLTSIVFVVVVSQVSTPFTNHQAEQHNXMERRVGGGGLVVPSAGLQCLVSFTYIALLPVYDCMAVPLARRLAGGGRDGITMLXRVGAGMATACLATVVAALVEARRLRVARDTGLMDQPDVTVPMDVWWLVPQHVLVGVAEVLAVIELKEFFYDQLAGELHIIELAVSLGSLSEGTFLISILLHAILSS

SEQ ID NO: 113539 - protein, 410 aa, Oryza sativa
  Clone ID: PAT_MRT4530_17316C.1.pep
MPSDGNLRIVLFPFPAQGHFSAFLSLAAHLHDAQPTADISIVSTPRNVEGLRRRSSSQTRYLRFHALPFVPAEHGLPGDAESTDAVPPLHFITLFEATESRSLQDSFDGFVRDLIADAGADAARVCVIADPFLAWTTDIARRRGVAHAIFVSCGAFGSVVYHSLWNHLPHLRAPGDDAFCLPDHPEVTVHRSKLPPYLLHADGTDRWSAHHRRQTSAGYDTDAILISMMEELETTGLRMLRRTMGVPVYPIGPLVRRRTEHSDHTGDHNDDYVKRWLDTQEERLDQMVDLAVALELTGRPFIWAICPPFGFDIEPTNGGQFSAEWLPEGFEERMHAKNIGLLIHGLAPQSMAHGVPIIAWPLTADQFFNAQMLEEWGACVEVSRGSWPDSPALERERVVEVVDMAMGITA

SEQ ID NO: 113540 - protein, 137 aa, Oryza sativa
  Clone ID: PAT_MRT4530_17317C.1.pep
HAYALIVEYAPSPEEEITSSLSPQLGGVPSHEYNGYFTPARRKQSSSIHSPARAASSQSFSEFLDDFFENSYRKLSVSIGKKKFRKRTLMKLSFPELENATHHFTTRIGQGGSAIIYKVCPYAFLCLLSFRVSILKW

SEQ ID NO: 113541 - protein, 492 aa, Oryza sativa
  Clone ID: PAT_MRT4530_17318C.1.pep
MPSDGSFRIVLFPFPAQGHFSAFLSLAAHLHDAQPTADITIVSTPRNVEDLRRRSSSQTRYLRFHALPFAPAEHGLPGDIESTDAVPLLHFITLFEATESRSLQDSFDSFVRDLITDAGADGARVCVIADPFLAWTTDVARRRGAAHAIFVSCGAFGSVVFHSLWNHLPHLRAPGDDAFCLPDHPEVTVHRSQLPPYLLHADGTDRWSAHHRRQTSAGYDTDAILISTMEELETTGLRMLRKTMGVPVYPIGPLVRRRTEHSDHIGDHNDDDVKRWLDTREERSVLYISFGSNNSLRPDQMVDLAMALELTGRPFIWAIRPPFGFDIETTNGREFSAEWLPEGFEERMRAKNIGLLIHGWAPQVSILAHASTGAFLSHCGWNSVLESMAHGVPIIAWPLTADQFFNAQMLEEWGACVEVSRGNWPDSPALERERVVEVVEMVMGITAKADKIRQSVKQIQGMIGRTLEDGGSSKTALEEFLKLHGHIMLMKC

SEQ ID NO: 113542 - protein, 110 aa, Oryza sativa
  Clone ID: PAT_MRT4530_17319C.1.pep
PGCRNSARERSPRGISESWPPPQATHLKSSSPPPSSPLSLPPLFSPLLSSIGARVRVTLLPCTTTTLASFLLPYYTAHKSLSNVQQQQQPSDKKKRKKEKSSPPSLDCWW

SEQ ID NO: 113543 - protein, 1947 aa, Oryza sativa
  Clone ID: PAT_MRT4530_1731C.1.pep
MKKLKKEGKKIEAFIGEWNSNEESSASSGSEEEGGDDASSKKKKMAVVAIKEAPSLFAPLCLMAKGSSKVASLSDSESDDDCDDVSYDELVSMFEKLHAYSEKEIVKFKALEKDHASLEVLYEELKTSHERLTISYEKIKEAHDNLLSTTQHGAHIDVGISCDLLDDSASSHIPHVASSSISTSCDDLMDMPSSSYSSCVSICDASLVVENNELKEQVAKLNKSLERCFKGKNTLDKIFSEQRCILNNKGLGYIPKKGKKPSHRVTRFVKSNGKYCSKCHEVGHLVNDCPGSKPSKTCMFDSHYMLKKAHDGSIVARYVGSPILGGKKNAIWVPKALVSNLQGPKQVWVNYRIGGSHWVLNSGCIQHMTGDRAMFTIFEVGGKEQEKVTFRDNSKGKEEIALLARRCFECGEKGHFASKCPSKDDDGDKSSKKKSGGYKLMKKLKKEGKNIEAFIGEWDSNEESSASSGSEEEGGDDASSKKKKMAVVAIKEAPSLFAPLCLMAKDSSKVAFLSDSESDDDCDDVSYDELVSMFKELYAYSEKEIVKFKARKKDHASLEVLYEELKTSHERLTISHEKLKEAHDNLLSTTQHGVLIDVGISCDLLDDSAICHIAHVVSSSISTSCDDLVDMPSSSSSTCVSICDASLVVENNELKEQVVKLNKSLEMCFKGRLMMVALLLDMWVPLYSVVNYRTGGSHCVLDSGCTQHMTGDRAMFTIFEVGGKEQEKVTFGDNSKGKVIGLVAKTSMGWLWHRRLAHVCVNQLSKLSKRDLVVGLKDVKFEKDKLCSACQAGKQVACSHPTKSIMSTSRPLELLHMDLFGPTTYKSIGVERKNRTLIEMAMTMLDEYGVSDSFWAEAINTACHATNWLYLHRLMKKTFYERIIGRKPNVAYFRVFGCKCYIYQKGVRLTKFESRCDEGFLLGYASNSKAYRVYNKNKGIVEETADVQFDETNGSQEGHKNLDDVGDEGLMRAMKNMSIGDVKPTEVEDKPSTSTQDEPSTSATPSQAQVEVEEEKAQDPPMPPRIHTALSKDHPIDQVLSDISKGVQTRSRVASICEHYSFVSCLEPKHVDEALCDPDWMNAMHEELNNFARNNVWTLVERLRDHNVIGTKWVFRNKQDENGLVVRNKARLVAQGFTQVEGLDFGETFAPVARLEAIRILLAFALCFDIKLFQMDVKSAFLNGEIAELVFVEQPPGFEDPKNPNHVYKLSKALYGLKQAPRAWYERLRDFLLSKDFKIGKVDTTLFTKIIGDDFFVCQIYVDDFIFGSTNKVFCKGFGDMMSREFEMSMIEELSFFLGLQIKQLKDGTFVSQTKYIKDLLKRFGLEDAKPIKTPMATNGHLDLDEGGKPVDLKLYRSMIGSLLYLTASRPDIMFSVCMCARFQAAPKECHLVAVKRILRYLKHSSTIGLWYLKGAKFKLVGYSDSDYAGCKVDRKSTFGSCQMLGRSLVSWSSKKQNSVALYRRGGICFGGNYILIFGQNEIFLQNEIEREFEKSFKTKLRWSDRARSAVDGLTELGRRSDRHVDGGLTGRYPPQMPPRTRHSRREPTPDPVSEESSGDEYAQSDEEVEANVEGASEEESGDDVSGSGEDEDEGSDDMHIDPSIQFVVNMRNPSQYTILRHHDQFLRPRDTRNPRFHTAFQKMWVAGDYSEMKWMSDTLQCSISRRQFWRLLSIRLDFGDDLHEEHTHNPLSIDYVSQFYEDGVWYTHGKVAGLRTIPCVVNRIVRVTILPRLGNNDDIRGVAWHVIDAIIQGHQFDIVSLMMQEIAISKATFTQGIYYAPYIMRLIQDKLGAVGQNLKKHKQYKPRLQLGAPRAPRAAPSSHPGASSSSAPPPPHGYDPNAFFYPQYAYFGMQPNEYFNPVLGAINTLSESIQRLSTGHEALHENVRGLRTDVGDLNASVGRLHTRVGTLDSRVQMLESSQAFVYHRRRDAPHPSTSARPPPLQE

SEQ ID NO: 113544 - protein, 142 aa, Oryza sativa
  unsure (1)..(142): unsure at all Xaa locations
  Clone ID: PAT_MRT4530_17320C.1.pep
MDSPATPTDFSPLHSDDLAGARRLGRAFGGYLRVEGNDTISKVLTEATNDDGRRPATRWCGGGGSVDDGGGATATGDDGEGAAGILLPHAHLTAATACGGDDASGGATRPEVGRRRQAARATRRRLYGALESSGXGQTKEDD

SEQ ID NO: 113545 - protein, 70 aa, Oryza sativa
  Clone ID: PAT_MRT4530_17321C.1.pep
RIYLWWFGFGIKKESVCKVKCELCLFLRFFGLFISSCSLIWSERGIVWVHIWKECGLARHLVSGFARTVK

SEQ ID NO: 113546 - protein, 29 aa, Oryza sativa
  Clone ID: PAT_MRT4530_17322C.1.pep
SRDVHVARTYGARGHDQRAIERGRRVKNR

SEQ ID NO: 113547 - protein, 669 aa, Oryza sativa
  unsure (1)..(669): unsure at all Xaa locations
  Clone ID: PAT_MRT4530_17323C.1.pep
MRRLLLLPLLVLAGAAVGGGVVPVAARSAFACAAGGPAATLPFCRRSLPARARARDLVARLTRAEKVRLLVNNAAGVPRLGVAGYEWWSEALHGVSDTGPGVRFGGAFPGATAFPQVIGTAASFNATLWELIGQFRSSLSSMDKTLGPKSDAHLASVSKSKKEGHNGIPSVLYSVLANEEFDHERECEHKHTVENSRANAVLHSNLVEYTIGCIRISVFMYVYVCAQAVSDEGRAMYNGGQAGLTFWSPNVNIFRDPRWGRGQETPGEDPAVAARYAAAYVRGLQQQQPSSGRLKLAACCKHFTAYDLDNWSGTDRFHFNAVVTRQDLEDTFNVPFRSCVVDGRAASVMCSYNQVNGVPTCADAAFLRGTIRRRWGLAGYIVSDCDSVDVFYSDQHYTRTREDAVAATLRAGLDLDCGPFLAQYTEGAVAQGKVGDGDIDAAVTNTVTVQMRLGMFDGDPAAQPFGHLGPQHVCTAAHQELAVEAARQGIVLLKNDGRALPLSPATARRAVAVVGPHAEATVAMIGNYAGKPCRYTTPLQGVARYAARAAHQPGCTDVACAGSGQPIAAAVDAARRADATIVVAGLDQKIEAEGLDRASLLLPGRQAELISSVAKASKGPVILVLMSGGPIAIGXAQNDPKIAGILWAGYPGQAGGQAIADVIFGHHNP

SEQ ID NO: 113548 - protein, 336 aa, Oryza sativa
  Clone ID: PAT_MRT4530_17324C.1.pep
MEHFNDWDLQAVVRSCSFPQSEPPRVGVGVPAAPGAGGAPVVVAPPARAPDGPDQMARASASALYDLEYLDLDHKPFLLPGSSSSSSSSRAVARARGEDDGKGRHEVMISFPAAAAASTSGAQPRSPSGRKPGIRTPRPKRRSSKKSQLKKVVYEVPVADGGVSSDLWAWRKYGQKPIKGSPYPRGYYKCSSMKGCMARKMVERSPAKPGMLVVTYMAEHCHPVPTQLNALAGTTRHKSAPTGDDDKPTSPGPAAGRAAAGEGVVKCEDVDGNELSAMAADGGAEDTAAAADDDGELWPEGMGLELDEFLGPMDDDVFEFDHVLEDDGVLGRRLSL

SEQ ID NO: 113549 - protein, 82 aa, Oryza sativa
  Clone ID: PAT_MRT4530_17325C.1.pep
GHCMALPLARPADSTTDSARQTQLSNPSMYQAAVAAVMSSSHSVPSAQYVPAATHSTALRSIAVPHQQLPSGLGTWLPHRPS

SEQ ID NO: 113550 - protein, 109 aa, Oryza sativa
  unsure (1)..(109): unsure at all Xaa locations
  Clone ID: PAT_MRT4530_17326C.1.pep
VDAAGMVLRPHFTVAGAGGAVAAADLSGGDGGGDAAAEAARWRFASSRMRDAYVVLQTWRREAIFSDPNNLTTDWVGPDMCNYSSLFCAPLPXDRQVVTVAGVPGITGD

SEQ ID NO: 113551 - protein, 346 aa, Oryza sativa
  Clone ID: PAT_MRT4530_17327C.1.pep
LLQILEVVFFLSNERDYLQDNLVLIDLCFNFDVISVCLGGRPVACQLASLGPTSPDRKLFVDNVPARAAHDELRRLFSRFGEIEAGPLGADRATGQFRGYAIFFYKYPEGLTKALEERKVVFDGCELHCRRAHRVNKEKHLMTMPADAGAQSNGFENAASPIIHVQPKELALASTTQTPLGSNRPVEMMAKGPRSGTVPFRQNAGAGLLGACPVATVTSSTPDQSTPVSHSGASISTPRTAQRLAKSGTWHINMKGSVTFLFGSDMIPSCSGIIIRVVFSQWINLSFVSLCCTSHCPDRSLSPLVGHAAQLVKQGIVIVPWTALSHWYNTRMVVVVLDEVGQGGCQ

SEQ ID NO: 113552 - protein, 105 aa, Oryza sativa
  Clone ID: PAT_MRT4530_17328C.1.pep
MPRARAPDSQVPPPAPQLRLDWKPSPRHATRARLPPPHANTNRRRPRATPLSTLEIAGDLFAGVVGGITLYGAGASWCLCPSHGCKHYNLLLKKVLVSGRKEETA

SEQ ID NO: 113553 - protein, 132 aa, Oryza sativa
  Clone ID: PAT_MRT4530_17329C.1.pep
MPRARAPDSQVPPPAPQLRLDWKPSPRHATRARLPPPHANTNRRRPRATPLSTLEEADSPRRDDLGYNRADILHDIQLLLWPIAGDLFAGVVGGITLYGAGASWCLCPSHGCKHYNLLLKKVLVSGRKEETA

SEQ ID NO: 113554 - protein, 157 aa, Oryza sativa
  Clone ID: PAT_MRT4530_1732C.1.pep
PRVRKLADLMIKHVLVPAISNISVAVSVEELEKSGPQYPISILCVTPTEELQGYKDGSALYSRIIDIIKFVCETICGENITWMQSFSKLTWSRISDLVIKHFISKAVPHEASKLIEFQDVVRSTTEFENTLRNMMFISHEKRDGKLTQFVDDVEVHF

SEQ ID NO: 113555 - protein, 79 aa, Oryza sativa
  Clone ID: PAT_MRT4530_17330C.1.pep
AHTCAHACADSTVHTLGYENGLHCAYTSSWNGTKYGLVYYWYYIERSSNITIILNCTCFNHKQLLEGYIYGDQELHCIT

SEQ ID NO: 113556 - protein, 150 aa, Oryza sativa
  Clone ID: PAT_MRT4530_17331C.1.pep
MDRPIFCSECQEPSDPLIREISSRYFKNLLCKKNPSMSVGGRDPKPSQAPLLPVTSWTPHLPPPPSTLLPPSGRPPPHTERHHWTIFLPCNAPLESPPPNVQWRDPLGSQTMGVNRLLIRIPTAISSLPMPITGATTSIYPDPSILHYLL

SEQ ID NO: 113557 - protein, 76 aa, Oryza sativa
  Clone ID: PAT_MRT4530_17332C.1.pep
LSSRRPCLCSFLRNFLPMVSRLFLVTGHPSLELWSSFIVRFLYRCFALIVLGCSGVVISFNNCIVYVCPLAPLCLL

SEQ ID NO: 113558 - protein, 61 aa, Oryza sativa
  Clone ID: PAT_MRT4530_17333C.1.pep
MGMEEDGAGIPVGAVHRRGIGGDLPRGRDASPAGGNDPTVAQDVVTLHALDKQFYKNVLHA

SEQ ID NO: 113559 - protein, 414 aa, Oryza sativa
  Clone ID: PAT_MRT4530_17334C.1.pep
MSLTEVRIGEEVWLTCLSHALTTETEEVMGLLFGDIKHSSRGGVTALIWGASPQMRCERKKDRVEVNPELLAAATAQAESLSATIGEKTRVIGWYHSHPHITVLPSHVDVRTQAMFQLMEPGFVGLIFSCFSEDAQKVGKIQVIAFQSLGGNQQSVVPVNDPVINLESSWSSLDDTSHPALIEGIEQDTGDSKSSRNSKVWAKSSDVDFYPHFDANHSAKHQSKENAIVAYDPNNAPETPVDLDESDMTPSIQEALHSGAEYVRKEVPLYVFPTRHLLKLDTTLTSYCDMQHVVFEEEKSAYNQAMHQNIRDGKIHPLTSIHHASTYNSSLCKLMEYCLSPAITVLQDRLKENELRLSMLMEEAKQLEAENQSMRNDSPRRLMYHGTSGTSSLMAQDKQMSPRSPSGTGRRKAS

SEQ ID NO: 113560 - protein, 117 aa, Oryza sativa
  Clone ID: PAT_MRT4530_17335C.1.pep
MASLLPSPVFPAAAAAASTSSSSRCRCRITTSSSARGWSYCQGWRLHHRVWAAQAADQQQQQQEENEDGVVDSNVLPYCSINRKEKKTIGEMEQEFLQALQAFYYDKKAVMSNEEFD

SEQ ID NO: 113561 - protein, 374 aa, Oryza sativa
  unsure (1)..(374): unsure at all Xaa locations
  Clone ID: PAT_MRT4530_17336C.1.pep
MSLTEVRIGEEVWLTCLSHALTTETEEVMGLLFGDIKVTCFSSLPVLLLLLQRECVALAXSSRGGVTALIWGASPQMRCERKKDRVEXWYHSHPHITVLPSHVDVRTQAMFQLMEPGFVGLIFSCFSEDAQKVGKIQVIAFQSLGGNQQSVVPVNDPVINLESSWSSLDDTSHPALIEGIEQDTGDSKSSRNSKVWAKSSDVDFYPHFDANHSAKHQSKENAIVAYDPNNAPETPVDLDESDMTPSIQEALHRSNMDISDGKIHPLTSIHHASTYNSSLCKLMEYCPLLTYLAFCYSSLSPAITVLQDRLKENELRLSMLMEEAKQLEAENQSMRNDSPRRLMYHGTSGTSSLMAQDKQMSPRSPSGTGRRKAS

SEQ ID NO: 113562 - protein, 90 aa, Oryza sativa
  Clone ID: PAT_MRT4530_17337C.1.pep
MAAAETRAAWQRAANRCRVQEDAKRAPKLGCCPPSGQQHETNNGNQTNPQDCHIPNFMPLNWNAMNSNLPKDTQWWLQLQPNFGCQNVLA

SEQ ID NO: 113563 - protein, 390 aa, Oryza sativa
  Clone ID: PAT_MRT4530_17338C.1.pep
MAAAETRAAWQRAANRCRVQEDAKRAPKLGCCPPSGQQHETNNGNQTNPQDCHIPNFMPLNWNAMNSNLPKDTQWWLQLQPNFGCQNVLASEDLNYMCFEELKSLPAYSEMTLKCRGSATYLHEDKEHMDFKTFDPLYPKKPQTACYEMDAPWQENRKSRPWWQVAEADGLASVVAESEMHNVGKNELPRPTQRAHGSKLNNHENKDDYGPYTGKESPPVQYDTMLCSYSISSTNETNSSDGSKPTYRSAAERTQLLDALRHSQTRAREAEMAAKKAYDEKDHVIKLLFRQASHLFACKQWLKMLQLENICLQLRLKEHQIAAMFPELPWIMLKEKVTPGQERKDGTRKKGRKQNKDSHLRKAVVFAVGVGIVGAGLLLGWTLGWLLPRL

SEQ ID NO: 113564 - protein, 105 aa, Oryza sativa
  Clone ID: PAT_MRT4530_17339C.1.pep
MGQIKPMTPLPSLLQAPSPLHLPSGFLAQRPYSSPLSGADRSRWEAWANEVPGEGTFVGMTTFSDRELLQEWEVLVTNYGHAKPDFLNVLINDERANFVKFLGGM

SEQ ID NO: 113565 - protein, 193 aa, Oryza sativa
  unsure (1)..(193): unsure at all Xaa locations
  Clone ID: PAT_MRT4530_1733C.1.pep
LEYAIRPSGQQSVSLHHVSAPCCCHHRSHHPSPPLSYSPESHRHSPPLPHNLESHHPSPPLYCTLQSYHPSPPLPHNPGIQSRAQTPGPPSPSSPPQPNLLRKPPPPPETPKPNPPPPSSLPLPPPPXPNPRSLSSPRPQPSPPSPLLGLLLPLPLGPPPPPPLGPPPPPLLGPPPPQPLGPPPPPPLGFPPP

SEQ ID NO: 113566 - protein, 86 aa, Oryza sativa
  Clone ID: PAT_MRT4530_17340C.1.pep
MIGTIKIKTKFLEQLEDLQVCLQIDPSFLSTVADLSCALHCVAWAVALEAVEYPPPHHRQDLHTGHQLRSRGGGGNAPLDPFKTIT

SEQ ID NO: 113567 - protein, 68 aa, Oryza sativa
  unsure (1)..(68): unsure at all Xaa locations
  Clone ID: PAT_MRT4530_17341C.1.pep
AASSLVFSVSSYKPKPKPTLIRNPTPPPAPPRRRTRPPTPSESGPGPQRPPYLXGALHRRGPPGGKHG

SEQ ID NO: 113568 - protein, 283 aa, Oryza sativa
  Clone ID: PAT_MRT4530_17342C.1.pep
MEFEDRCHKVQEPKFDCLLFDLDDTLYPLSSGIASHVKKNIGDYMVEKLGIEESKIENLGNLLYKNYGTTMAGLRAIGYSFDYDEYHSFVHGRLPYENIKPDPVLKHILKNLRIRKLIFTNGDKDHAVRALKRLGLEDCFEGIICFETLNPPCPSPPCDGEASIFDIAGHFSMPGAAADELPRTPVLCKPNVDAMEEALRIANVNPHKAIFFDDSVRNIQAGKRIGLHTVLVGTPQRVKGADHALESIHNIREALPELWEEAEKAEDVLIYSDRVAIETSVTA

SEQ ID NO: 113569 - protein, 105 aa, Oryza sativa
  Clone ID: PAT_MRT4530_17343C.1.pep
MELPPWPSLLVIVLTAVVFFLATILCHGRRVYRLPLGPKPWPIIGNLNLIGALPHRSIHELSKRYGPLIQLRFGSCREEERRRQRRTTPKRVGLRPSMADEKRAA

SEQ ID NO: 113570 - protein, 227 aa, Oryza sativa
  Clone ID: PAT_MRT4530_17344C.1.pep
VHSFVHGRLPYENIKPDPVLKHILKNLRIRKLVSSSRPESKPISHVSCNRVLVLNWHASLQIFTNGDKDHAVRALKRLGLEDCFEGIICFETLNPPCPSPPCDGEASIFDIAGHFSMPGAAADELPRTPVLCKPNVDAMEEALRIANVNPHKAIFFDDSVRNIQAGKRIGLHTVLVGTPQRVKGADHALESIHNIREALPELWEEAEKAEDVLIYSDRVAIETSVTA

SEQ ID NO: 113571 - protein, 144 aa, Oryza sativa
  Clone ID: PAT_MRT4530_17345C.1.pep
DHIQIPPTNIHSIRGEQPPETELARFTQELNECLPNLTFDWIILGMGNDGHTASLFPYQTDFADQHLAIIAKHPVTGQLRISKTAKLIEQAARITYLVTGQSKATILKEIHDLPATQLAYPAAHIRAKNGITEWYLDQQAAELF

SEQ ID NO: 113572 - protein, 114 aa, Oryza sativa
  Clone ID: PAT_MRT4530_17347C.1.pep
PLLGRWCRSWIWLNRQQRPMVPGSMSIFNFHKAALGGEIRGAEVRHMWSQRLRAAPDGSPLSFDSNWSGDVRQRNRGAVESLFLGDGLVSFCKCVLLTAPNLFSQFWLLIHLFS

SEQ ID NO: 113573 - protein, 70 aa, Oryza sativa
  Clone ID: PAT_MRT4530_17348C.1.pep
MEESSAWELGVLHPTLKQCGAPVMEMEVSSAGGVIELPSGAAVGCRQRLRGKDLLVYTKESGKINIFVCG

SEQ ID NO: 113574 - protein, 142 aa, Oryza sativa
  Clone ID: PAT_MRT4530_17349C.1.pep
MVATVSSTSLLEQPELLERRLQEIPQEPGVYFMGDRQGEILYIGKAKKLRTRVRSYFRDSQPHTARIALMVQQVAEIEFIVTDTEAEALALEANLIKQHQPHFNVLLKDDKKYPYVCITWSETYPRIFITRKRRLNQAKDPR

SEQ ID NO: 113575 - protein, 1819 aa, Oryza sativa
  unsure (1)..(1819): unsure at all Xaa locations
  Clone ID: PAT_MRT4530_1734C.1.pep
CSSIVVVEVALDKSQVHLLPFVELVWHLIDHLHAGSLLVTLGGCRLLDGLWRSCPVTSPRRLWRRPGAGFAITGTPLTEIDHRNLQLNAQAMNVLFNSLSQEEFDRVSHLETAYEIWNKLASWXKIHEGTSEYKDAKLHFLKIQYETFSMLPHESVNDMYGRLNVIVNDLKGLGANYTDLEVAQKMLRALPGKYETLVTMLINSDMSRMTPASLLGKINTNDMYKLKKKEMEEASPSKKCIALQAEVEDKGKGKERGRGSNSSRRRNRRPNKTLSNLKCFECGEKGHFTSKCPSKDDGDKSSKKKSGGYKLMKKLKKEGKKIEAFIGEWDSNEESSASSGSEEEGGEDASSKKKKMAVVAIKEALSLFAPLCLMAKGSSKVTSLSDSESDDDCDDVSYDELVSMFEELHAYSEKEIVKFKALKKDHASLEVLYEELKTSHERLTISHEKLKEAHDNLLSTTQHGALIDVGISCDLLDDSATCHIAHVASSSISTSCDGLVDMPSSSSSSCISICDASLVVENNELKEQVAKLNKSLERCFKGRLMMVALLLDMWVPLYSVVNYRTGGSHWVLDSGCTQHMTGDRAMFTTFEVGGNEQEKVTFGDNSKGKVIGLVAKTSLGWLXHRRLAHVGMNQLSKLSKRDLVVGLKDVKFEKDKLCSACQAGKQVACSHPTKSIMSTSRPLELLHMDLFGPTTYKSIGVERKNRTLIEMARTMLDEYGVSDSFWAEAINTACHATNWLYLHRLLKKTSYELIVGRKPNVAYFRVFGCKCYIYRKGVRLTKFESRCDEGFLLGYASNSKAYRVYNKNKGIVEEIVDIQFDETNGSQEGHENLDDVGDEGLMRAMKNMSIGDVKPIEVEDKPSTSTQDKPSTSATPSQAQVEVEEEKAQDPPMPPRIHTALSKDHPIDQVLGDISKGVQTRSRVASICEHYSFVSCLEPKHVNEALCDPXWMNAMHEELNNFARNKVWTLVERPRDHNVIGTKWVFRNKQDENGLVVRNKARLVAQGFTQVEGLDFGETFAPVARLEAIRILLAFASCFDIKLFQMDVKSAFLNGEIAELVFVEQPPGFEDPKNPNHVYKLSKALYGLKQAPRAXYERLRDFLLSKDFKIGKVDTTLFTKIIGDDFFVCQIYVDDIIFGSTNEVFCKEFGDMMSREFEMSMIGELSFFLGLQINQLKDGTFVSQTKYIKDLLKRFGLEDAKPIKTPMATNGHLDLDEGGKLVDLKLYRSMIGSLLYLIASRPDSMFSVCMCARFQAAPKECHLVAVKRILRYLKHSSTIGLWYPKGAKFKLVGYSDSDYTGCKVDRKSTSGSCQMLSRSLVSWSSKKQNSVALSTAXGGICFGGIXILSFGQNEIYPQNKIEKEFEKSFKTKLRRSDRAACXGLTGCGRRSDRPSVRGLTAPDWPMMPPRTRHGRCAPTPDPVSEPEESSGEDYAQSDEEVEANIEGASEEASGDDDSGSGEDEDEGSDDMHVDPSIXFDVNMRNPSQYTILRHHDQFLRPRDTPDPRFHTAFQKLWVAGDYNEMKWMSDTLQCSISRRQFWRLLNIRLDFGYDLHEEHTHNPLSIDYLSQFYEDGVRYTHGKVAGLRTIPSVVNRIVRATILPRLGNNDDIRGVAWHIIDTIIQGRQFDIVSLMMQEIAISKGTFTQGIYYAPYIMRLIQDKLGAAGXNLKKHKQYKPRLQLGAPHAXRMVPSSHLGASSSSAPPPPHGYDPNAFFHPQYTYFGIQPNEYFNPVLGAINTLSKSIQRLSTGHEAXHEDVRGLRTDVGDLNASMGRLHTRVGTLDSQVQMLESSQAFVYHRRRDAPHPSTSARPPSPPQ

SEQ ID NO: 113576 - protein, 42 aa, Oryza sativa
  Clone ID: PAT_MRT4530_17350C.1.pep
AADTEPPLLLTILLHRLICGLKILNYHLLMLTAPVQFFMHER

SEQ ID NO: 113577 - protein, 121 aa, Oryza sativa
  Clone ID: PAT_MRT4530_17351C.1.pep
RYCGWDLKKMDLQTIFSWLRHRSGLLAADRAPLKRRLLLTHNIEPYYSHHQIICIPNAIQKLYQRCDELKSSNKQNGSKSRSIVQREKKKREKHGSNYHSERKSRRKTKRPRSECACAAAE

SEQ ID NO: 113578 - protein, 146 aa, Oryza sativa
  Clone ID: PAT_MRT4530_17352C.1.pep
MARTKHPAVRKSKAEPKKKLQFERSPRPSKAQRAGGTPRQQTKQRKPHRFRPGTVALREIRKFQKTTELLIPFAPFSRLVREITDFYSKDVSRWTLEALLALQEAAEYHLVDIFEVSNLCAIHAKRVTIMQKDMQLARRIGGRRPW

SEQ ID NO: 113579 - protein, 174 aa, Oryza sativa
  unsure (1)..(174): unsure at all Xaa locations
  Clone ID: PAT_MRT4530_17353C.1.pep
TRGWRRRLGSPAAKGKRRPGFSTPWRTHGRRQQAAATAETARRRGCNSAGGGGELCGDCGELRGTGEDGREGKRKRRTRGSYLXPWIEEIGLLPQEIDRENNHLGFGDKLENEFESDKIPNDLLRFLGVKIEENERIKNPLKKSERKEAGLASDWGRTAVAWPARARSADRPSC

SEQ ID NO: 113580 - protein, 156 aa, Oryza sativa
  unsure (1)..(156): unsure at all Xaa locations
  Clone ID: PAT_MRT4530_17354C.1.pep
EILDSKIINDRETGRSRGFGFVTFSSEQSMRDAIEGMNGKELDGRNITVNEAQSRRSGGXGGGYGGGGGGYGGGRGGGGYGGGGGGGYGRREGGYGGGGGYGGGRGGXGGXGYGGKPWRAGTAGDFRAGNWQELIGGGPSWAKFILSYPCQNHLNH

SEQ ID NO: 113581 - protein, 117 aa, Oryza sativa
  Clone ID: PAT_MRT4530_17355C.1.pep
RRRRKWRRWGGSRAPPSRRASPWPRRGRPFGRGTARRWSRTAATPTALSPGSSPWRWRPRLRPRRRRLPQHRRRRHQGPLLRLHPPSPARPPASAGGGSRAPLLPPPPAPAHRWPPP

SEQ ID NO: 113582 - protein, 155 aa, Oryza sativa
  unsure (1)..(155): unsure at all Xaa locations
  Clone ID: PAT_MRT4530_17356C.1.pep
MRPSVVTVVVEVTKAPPLLSSSSSPPLQSPAPRRRRPARRRRRPXAPPVTHLAVAALPRPDLGGQPPPPRVASXRRSAGHAPRRRRPPPASLRPDLGGEGRXPPPPHGRAPPSSAPPPHGQIWEGGAGSRRRRRLNPPRRRVGRRAASTSSPLER

SEQ ID NO: 113583 - protein, 87 aa, Oryza sativa
  Clone ID: PAT_MRT4530_17357C.1.pep
MAGSGLWGTGSASLHLPAVAKDKAGGGFVARPVHVAPRSESPRRKEGLTAGESSGGSEVGGRSGGGQLGFGSAIIYRQVYEYRYYLR

SEQ ID NO: 113584 - protein, 94 aa, Oryza sativa
  unsure (1)..(94): unsure at all Xaa locations
  Clone ID: PAT_MRT4530_17358C.1.pep
MAGGGPRARRRRPRSGHGGRRRHILAPLXSPPAPTPSGGGILGTWRRGSGASSPSSSTTAAVVARPRPPSPVTVARIGAGAGVVGVEGVPARES

SEQ ID NO: 113585 - protein, 110 aa, Oryza sativa
  unsure (1)..(110): unsure at all Xaa locations
  Clone ID: PAT_MRT4530_17359C.1.pep
PAGTGPTGFCKGWARGPPPPGFPGGGEKKKPAPPPPFNPLKARVFFRAPLWGQVSPPPCFKRGPPLKGGALLEVGPPXPNPPGSLSPPPFFCPGAPPIVCFAPFKGAKGP

SEQ ID NO: 113586 - protein, 433 aa, Oryza sativa
  Clone ID: PAT_MRT4530_1735C.1.pep
MEQQHAAAERSGGGNPRGGGGGGPRGCGGGGPRSGGGGGPRGGGGGGPRGSGSSKPRRGDGGLGCGRGDDSDLGLGYGGGGSGSDDGGGGLGFGVSGGGGGLRKRLGCGGDDGDGLRSASLMRSKKRRRGMWYSRRYGHLLEEGKNFVLDTQDGSDDDQFEFIPDSDDEAEDHQFSLDQEFVPETEFQDCGEAEEKGGRIEECSKVEEKGGGIQDCGVTEENVDVIQDCKKVEEKGGEIYGGSSMGHSHDGGTRTAARRGGWHIRGKWFERKSGYLLEEGKNIIFDSQDGPDLDEYEFWPDLDDEGGGLILDWFDGSMKVSTSSNAFYPQGGDLRQGTMANQGGGPSKHIMVEASNISGQSKDVSNPLMPNKEEIHGEEKIPNDKENGGDVFGGVEQFGYSQEEEYEPIDDTKLEMLRLLIPGYIQCFQPKKK

SEQ ID NO: 113587 - protein, 99 aa, Oryza sativa
  unsure (1)..(99): unsure at all Xaa locations
  Clone ID: PAT_MRT4530_17360C.1.pep
SWRWFIAAVRVVLRSPVVLAGYMDDTEVFDAPVFSFQFLFRVARPPPLLDAPPFFWLSASRXRPWSLSVVEEKCSSVKVVXSVYSQGSRASQVLLVPCD

SEQ ID NO: 113588 - protein, 485 aa, Oryza sativa
  unsure (1)..(485): unsure at all Xaa locations
  Clone ID: PAT_MRT4530_17361C.1.pep
TYTKNDDYVLEFFLPVLCKGGEEQQLLLDSISATMRKVCKSLRTVSDAELKEDVTRKLSNENRSGTRCPSPVNLIYSGREIDVSNETKTHAALEYQIEGIDEQLSDTKSTKKLIKCSNASDGEKRRSSTEKSVSLSVLQQYFSGSLKDAAKSIGVCPTTLKRICRQHGISRWPSRKIKKVNRSLKKIQNVISSVHGVEGVLKYDPSTGCLISSVSPSIEPVLMNVEHKGSDPLPIESELPHLNFEPDCDAYRREHAGQDVLHKLQNKQNGEINFDMDDGELFRNSHSTRTLSGAFCEDMPNGLYVAREMTCVAKTGTRTERLEHKPSSRDSFSAPPRIXRMESETDKSNKNSKQSLPSSSSMTDCSTSSGETFKSIKSQSANESNKTVVVKASYKNDPIRFKLLPSMKYEQLLEEIAKRLKLSIGLFQLKYKDDEGDWVILASDADLQECLEILDTTRLRILKLQVQDVVCPIGSSSGSCSMLRP

SEQ ID NO: 113589 - protein, 74 aa, Oryza sativa
  unsure (1)..(74): unsure at all Xaa locations
  Clone ID: PAT_MRT4530_17362C.1.pep
RLLLLLVLAPRRRGRWVERGPHLLLQPQPALLRVVEVHXRRRRRRAAAPAILDGLVEKRDEAFHXRRRLAMRDE

SEQ ID NO: 113590 - protein, 72 aa, Oryza sativa
  unsure (1)..(72): unsure at all Xaa locations
  Clone ID: PAT_MRT4530_17363C.1.pep
NXIIRLNTSKALHRHRGSTATAPXYPIHPSTRRRPLIQSLRRAAVERRRRRRRRRRRREPYGDPPPAXSDXP

SEQ ID NO: 113591 - protein, 72 aa, Oryza sativa
  unsure (1)..(72): unsure at all Xaa locations
  Clone ID: PAT_MRT4530_17364C.1.pep
KEPFVLXASLLXPTPSSAARLGAGXXXRRPRRRERXTWERQRLISXGVWXXVRRXGMQRXRAQTWXXXGKTV

SEQ ID NO: 113592 - protein, 345 aa, Oryza sativa
  Clone ID: PAT_MRT4530_17365C.1.pep
MPAAAAAKTLVPARGGGDMEEPLLAESSERFSMFPIRYPQIWEFYKKAVASFWTAEEVDLSADARHWDAALSPDERHFISHVLAFFAASDGIVLENLASRFMSDVQVAEARAFYGFQIAIENIHSEMYSLLLETYIRDGAEKDRLFRAIDTVPAVRRKADWAMRWIDGGERFAERLVAFACVEGIFFSGSFCAIFWLKKRGLMPGLTFSNELISRDEGLHCDFACLLYDLLRGKLDEARVREIVADAVDIEREFVCDALPVALVGMNGDLMSQYIEFVADRLLMALGCKKMYNVANPFDWMELISLQGKTNFFEKRVGDYQKASVMSSLNGGASANHVFSIDEDF

SEQ ID NO: 113593 - protein, 69 aa, Oryza sativa
  Clone ID: PAT_MRT4530_17366C.1.pep
LYVQDLILFFGVHTLGLCRCANFRDRLYNLTATLEAFIDVWFGETCASTVDAGDYKCTLFEPSCDIMNY

SEQ ID NO: 113594 - protein, 144 aa, Oryza sativa
  Clone ID: PAT_MRT4530_17367C.1.pep
MDQKPKDDFDFLEPSVLLDETHYQTGFKNGYSEGLVSGKEEGRQVGLKNGFQVGEELGFYQGCLDVWTSLVSIDQDAFSARVRKNIEQLAALLRSYPLSNPEDEQVQDIMEKIRLKFRVITASLGTKLEYQGRPTSSKQDVEDL

SEQ ID NO: 113595 - protein, 218 aa, Oryza sativa
  Clone ID: PAT_MRT4530_17368C.1.pep
MVKGRPKPTPVNAPAEVVFDPSAPGARRPRRPGAPSSSSSTGEWHNFMGSSLSDMYRKPAAEKSDDTSDDDEEPDIDIGKLLKDVELFGASTWKERKQLENRKVVQLGGKAIKKHRTPLSVSKPAMKNQKKREEKKAEEERLLGIFRKRDSKNSKAQKTRPEDRVLRATQGHFKNGILDVKHLLAPPKLSGRDAPEQKMRMGKKNGKGKQKGGRRKRR

SEQ ID NO: 113596 - protein, 272 aa, Oryza sativa
  Clone ID: PAT_MRT4530_17369C.1.pep
PLCALESNGWVYWAHCSFSLFTADAAWRCLDGKWLFFWGDSNHVDTIRNLLTFVLGVTNTSAVTRRFDAAFTNPSGGPGTVRITSIFNGHWNMSMNYLGLHSLRNKGFQRLVRSYFLAEDRAPDIVILNSGLHDGCYWTSVRAYVQAAEYAAQFWAGVMAEVRSRGHAVPRMFYRTTIATGGYARDLAFNPSKMEAFNGVLVEKLRRHGVLTGGLIDNFDMTFPWHYDNRCNDGVHYGRAPAKLLWRDGKVGHQYFVDLMLGHVLLNAICNG

SEQ ID NO: 113597 - protein, 212 aa, Oryza sativa
  Clone ID: PAT_MRT4530_1736C.1.pep
MGPFNQTCRNPWRRLWSKNGAKRRVAPGQRLLRRRRSSHTEQQLPPLPPFSRQHCRSSALRAPPLLHALASHTAASPSVQCSCLAAPTVEIKEVLAPSPPRPHAAHIEEVWMSRIEDSGGGINDELGKGANNACSEQVQGVGCRCGVGAGGVEGIYGGRREEGVVGGDEAGGAVDQREAAQERGGPVEDKARVRIVGVAGLERLEVGDSGRG

SEQ ID NO: 113598 - protein, 210 aa, Oryza sativa
  unsure (1)..(210): unsure at all Xaa locations
  Clone ID: PAT_MRT4530_17370C.1.pep
MGKDCGNHGDDDIRQACRRLLTILFGLALIVAIIALIVYLVLRPTHPRFFLQDATLRQLDLSXPPPPGVLSTALQVTVASRNPNDRVGVYYDRLDVYASYKYQQITLAASLPPVYQGHGDVDVWSPVLSGPDVPFAPYLGDALAKDVAAEYLILQVKIDGRVRWKVGSWISGHYHLFVTCPAFFIASGGNGYPGANGLKFQTATYCRVEV

SEQ ID NO: 113599 - protein, 64 aa, Oryza sativa
  unsure (1)..(64): unsure at all Xaa locations
  Clone ID: PAT_MRT4530_17371C.1.pep
RXXADXAHLMRXXFELFDGPLPMRGLLVKVPACFGWRIRGWPTSGVGFPEPCIPNQEWARICLS

SEQ ID NO: 113600 - protein, 75 aa, Oryza sativa
  Clone ID: PAT_MRT4530_17372C.1.pep
MAMEEGEGHRRAGCRRWREGMAEARFPPKAYLCDSCLRPCTLHPTTIPAFALVPPHSYAARDPALTELRVQFPHL

SEQ ID NO: 113601 - protein, 102 aa, Oryza sativa
  Clone ID: PAT_MRT4530_17373C.1.pep
NTGKIVLYALFGIRAPKKQIVSGGMHVSGGGEKHFFFDRSRGGFPLNFILSQEKPPRVHGLKRRGNLGGLGFFLLAGPPCGRSGGGGCDLKSLGPLFAFFFF

SEQ ID NO: 113602 - protein, 234 aa, Oryza sativa
  Clone ID: PAT_MRT4530_17374C.1.pep
TRPASMAGSSSLASPHSLLLPLLLLFLLVAAAIGSYDPKAFCSKTTDIASCLRVFPTLPDIVTKAQDNKELYKRLVRYCSFKTYEATSLAESMIATTTAADPKISAPFFPQWKRDEAMTTKTPPGKCLLSCNKTIGEVDAILTCGHTYMEDRPPIIHQNLTVLFHGGHPPSLCKSGCLDGSSSEGEALLATKFNYIWSLLDLMKAVLPEYLSETGTATTTVPSPYVAAAAAPAP

SEQ ID NO: 113603 - protein, 94 aa, Oryza sativa
  unsure (1)..(94): unsure at all Xaa locations
  Clone ID: PAT_MRT4530_17375C.1.pep
MTVVTVGMVGNTLQPSLGANPHRPGKALDRMAXGGFSRTWDQPNXPMFWLAASSIASLHRLVNFGPIHYVISEFLAHSCLSLILNIVQLIYRLI

SEQ ID NO: 113604 - protein, 65 aa, Oryza sativa
  unsure (1)..(65): unsure at all Xaa locations
  Clone ID: PAT_MRT4530_17376C.1.pep
LLGLFLSSLRSXSXXXRVLPSKILXSLFSLKKKCIQKWKQPHLLHSAHLISVIIIIIIIFTTVFH

SEQ ID NO: 113605 - protein, 351 aa, Oryza sativa
  Clone ID: PAT_MRT4530_17377C.1.pep
MEPLVRSPVTSPPAIAGAASPSPSRSLSRRRAPPDAAAFPKPWVIPSSSVKSAACLQLQQARAPRRCARLLASAAEGGRRGEEGSPASSSDADDQAEALPFLESDSHHTQTSKHGESGGSNSGGSRAGLFRTPISGGVHTATSVHDLPPPARAVRNLMEQVPGWSGLSNARVTIFGDVVPLPADLQVLVDFVNGNSDLKVIFFQEWAHQQYVLKHQQWASHQWGNFYYYKMQTISDIYFIGGFGTVAWLDVKEYEALKPDKIATDGGEQSLKELNAMYSKPLKELLSTEIEVDDAALISIDSKGIDIRVRQGAQFNIQRIAFELHYSVETLEEAKEAIRRILGKSRWHAKF

SEQ ID NO: 113606 - protein, 987 aa, Oryza sativa
  Clone ID: PAT_MRT4530_17378C.1.pep
MGWRRPAPDLAAWRHLPLGSGDPEVGAARLEVRRGEDSRRGGGAADCRFRFESFWCKLDGFTEVVQNAWSAPCAIQDPISRLDFKLRATGRALQSWSDKKVGNVKLQLEMARELIGKFDRMEESRRLSAQERFLHRALKKKYLALASLERTMARQRSRILWLQEGDANTRFFHQHAAYRRRRNFVQQIEHNSQIATAPDEKAVLAQSYFTDVLGLVGQRAFTLELDFLEPRGQLLSELEEPFTVDEVWRAIVDSPRDKAPGPDGFSGQFYHCFWGIIQEDVLAALNQLHRMDGSSLHKVNKAFISLLPKRPDAKNLKDFWPISLVHSFVKLFTKILSRCLAPKLDSLVAKNQSTFVKKRCIHDNFMLVRQSAKRLHDRKVPSVLLKLDIAKAFDTISWPFILEVLEHKGFGHRWRSWIAMLFRTASSRVLINGEPGGPIVHRRGVRQGDPISPMIFIIAMDMLSPSEELLRPLGIPFQISLYADDVVAFIRPALWEIRAATEILAIFGEASGLRTNFAKCSALPIQCNEADHTLLRDELPCQVASFPCTYLGLPLSIFRLKKEDLQLLVDRIARRLPSWIADLMTPIGRATMVNAVLSSIPIYLLMAINVPKWVIKGIDKIHRGFLWAGKAVANGGVCRVAWPRVCAPKEFGGLGIPDLERMGIALRSRWLWQQRNSPDKPWHGLNIPVSQKERNLVTISMICLVGDGTSVLFWEDNWLEGSSIRSLAPAVYAAVPSRLRNRRTVAEALHDRRWVRDIAAALGIQAILEYLKLWEILRAIQLTAVPDSLIWRWESSGEYSSWSAYRALLSGRIHFEYKPIWKSWAPPRCCYFLWLVALNRCWTADCLRSHGLSHPACCVLCDQSDETIDHLLVACPESRQLWWIALRAIGHSECLPINEPSFHIWLCDSRKKVIKAHRRGFDTIATLVAWTIWKERNIRVFNQINRSWVDIARAMAGEADLWRLARAAIPSVVIHLDREGSPNGLGD

SEQ ID NO: 113607 - protein, 53 aa, Oryza sativa
  Clone ID: PAT_MRT4530_17379C.1.pep
HSSLPKNTSPAPDLHHPPLIPSLTTPASALDPPTAFLLNLTISIPHHITFHPS

SEQ ID NO: 113608 - protein, 419 aa, Oryza sativa
  Clone ID: PAT_MRT4530_1737C.1.pep
MQTSTFLLGKSKARNTMDATAIGNGALHSNGAGADTKGKPIKCKAAVAHGPGEALVMEEVEVAPPARMEVRLKVLFTSICHTDLSAWKGENELQRKFPRILGHEAAGVVESVGEGVEDLAPGDHVVPIFTGECGACTYCESSKSNLCKTYRVNPFKSTMVTDGGTRFTMIDRSSGARNPVYHFLNTSTFAEYTVIDSACAVKINPKAPLEKMSLLSCGVSTGVGAAWNTANVSKGSTVAIFGLGAIGLAVAEGARLRGASRIIGVDINPEKFSKGKEMGITDFINSKASGKPVHEVIMEMTDGGVDYSFECTGITDVLREAFVSTHDGWGLTVVLGIHATPRMLPLHPMELFDGRRITGCVFGDFKGKSQLPEIVEKCMQGEININFDGFITQELPFADINKAFQLLEEGKSLRCLLHV

SEQ ID NO: 113609 - protein, 148 aa, Oryza sativa
  unsure (1)..(148): unsure at all Xaa locations
  Clone ID: PAT_MRT4530_17380C.1.pep
MVRRPVRCXYRQIKNKPYPKSRYWRGVLDPKIRIYDVQKNNKGVDEIYHXEHLASWXEDNVTIXAIEDARIECNKHMIKFAQQDALHLMARAHLLHVLLXNMMLSCAVAEXLQTDTSTAYQKSHRTSSRVAIVHILFSVRRLLYNVSP

SEQ ID NO: 113610 - protein, 96 aa, Oryza sativa
  Clone ID: PAT_MRT4530_17381C.1.pep
ARGKGFRSACGLSKAGPLFGFPQAHDLFFGRLGQLGFAFSIFGEIISGKGALGQFYFVSGVPINGIEPLVLFNVVFFFIAAINPGTGKFVIGDDEE

SEQ ID NO: 113611 - protein, 71 aa, Oryza sativa
  Clone ID: PAT_MRT4530_17382C.1.pep
GVFVIIISFRSLTLIYSFLRIPKAVWFRRSAWPFGVRTIRGSAGCRSCPSGCWSRRIPHRDSRGIIATPTA

SEQ ID NO: 113612 - protein, 76 aa, Oryza sativa
  Clone ID: PAT_MRT4530_17383C.1.pep
MGQLGLPGYDGRGFPGLEGPLVFGLLLACFATWLSTYGFALVEPDGLGLVPHWLGGFGRHQCLNKVKWNEDSSDIP

SEQ ID NO: 113613 - protein, 92 aa, Oryza sativa
  Clone ID: PAT_MRT4530_17384C.1.pep
MSGSTSSLSLPSPLSLFSSLTRWLARAAAGGRKEGTRRVVEVGPETARQWAKVEDKYAVTAIGVAALVGLWTAIGAIKAIDRRQASTFARRA

SEQ ID NO: 113614 - protein, 267 aa, Oryza sativa
  unsure (1)..(267): unsure at all Xaa locations
  Clone ID: PAT_MRT4530_17385C.1.pep
LRYSFQTKYRLYLVLDFINGGHLFFQLYQQGLFREELARIYTAEIVSAVAHLHANGIMHRDLKPENILLDADGHAMLTDFGLAKEFDENTRSNSMCGTVEYMAPEIVQGRGHDKAADWWSVGILLFEMLTGKPPFVGGNRDKVQQKIVKEKIKLPAYLSSEVHSLLKGLLHKEAGRRLGCGPGGSNEIKNHKWFKSVNWKKLDSRQIQPSFRPNVAGKTCIANFDECWXSMPVLDSPVASPVAADSNFVGFSYVRPAPFXQRPSPLG

SEQ ID NO: 113615 - protein, 38 aa, Oryza sativa
  Clone ID: PAT_MRT4530_17386C.1.pep
MERKEFGANMIWEKFKFDELKDMIEYYPQSYHATDREG

SEQ ID NO: 113616 - protein, 66 aa, Oryza sativa
  Clone ID: PAT_MRT4530_17387C.1.pep
PPSRAKLPFSSSAAAAAAAAAMQMAATTTTTDSSQAAVPPHQPSPLHAHRAPCTSHRALRTIPIGA

SEQ ID NO: 113617 - protein, 39 aa, Oryza sativa
  Clone ID: PAT_MRT4530_17388C.1.pep
FMHNKSLMEMAMHSLFQNKISLSLYQLMLLILSEISLYF

SEQ ID NO: 113618 - protein, 337 aa, Oryza sativa
  Clone ID: PAT_MRT4530_17389C.1.pep
MAASNLDVFEACHERLQHCARATRCTILTKVAFSQGTSTYVLVFYRNIIAAVVLLPVALAVERKTAPPLSLKVSLKLFVHALCGMSAAMNISCIGLNYSSATAASAVQNIMPVLTFFLAVLMGMESFKLKMCHGIVKISGIVFCAVGVSVLALYQGPDLKSFIKHHLFPHTNRVGTHSSRNWILGIFLQFLATLMWALWAVLQGPLLEEYPSKLLNTTLQIVFSAVQSFFMALVLERDFSRWKLGFDIGLVAIIYCHNKRSADGCGPVYCSLGEEDRRGGYQQSRSIWDVVCDARNAPATATSCPWLLLARAGAEAEQQRRHRFATCSDHHHHQDYL

SEQ ID NO: 113619 - protein, 123 aa, Oryza sativa
  Clone ID: PAT_MRT4530_1738C.1.pep
MLRAISSTVLLLAFFPYAALASSTFDLSGRQWTLQNSNRSISASTTLPSYPLEVLKTKGVINDPLFRYGEADSRWVAAETWTWSTTFDSTELPSVMSSKAVQLRLDGLDTFAFVQLDGQTVLT

SEQ ID NO: 113620 - protein, 71 aa, Oryza sativa
  Clone ID: PAT_MRT4530_17390C.1.pep
AKWMGQLAWSDISRILSQNIKQNDFTKQSILSSKFEISLHSKSQTKFLLSPCSFFVGSFSLERKCYDYLAG

SEQ ID NO: 113621 - protein, 89 aa, Oryza sativa
  Clone ID: PAT_MRT4530_17391C.1.pep
SPLATHHGASTRPHPIQKLVIDDLQHRRHRWPPSAAAPPRRFAFAPAPPPRAAEPPPTATAASPEGRRVLRRPLPPPPRDKGASAGAPP

SEQ ID NO: 113622 - protein, 70 aa, Oryza sativa
  Clone ID: PAT_MRT4530_17392C.1.pep
SSFNFDACSRLEFLFQLLFYQCMFVWALTVCICFWVRHMLMLYIEVSVYIFLYLGPDPILTPGRIQRMIE

SEQ ID NO: 113623 - protein, 114 aa, Oryza sativa
  Clone ID: PAT_MRT4530_17393C.1.pep
MARKEPNGKSNGEHTTRPPATPWSIRFSKFFPANLRILVTGVAGFIISDLYYKLMHNEKHDAIVADNFITGSKDILKKRIGHPIFVLFRHDVTHPLLVEVDQLYYLACDDSPIF

SEQ ID NO: 113624 - protein, 74 aa, Oryza sativa
  Clone ID: PAT_MRT4530_17394C.1.pep
VVRVAGIDRTIPPECSASRCLPMGQRSYASGLGVIGMYGVMGLCMNMCFIGRGLNAMELKIYMLILMKWYNSPS

SEQ ID NO: 113625 - protein, 86 aa, Oryza sativa
  Clone ID: PAT_MRT4530_17395C.1.pep
IRFALFRIITLPVCTALCAHVGFLTFCHRIIVRYADNSNESFAYRLRPVVISVRDYVNKQALDMHTLTLALKNGCHACEIYPFPSI

SEQ ID NO: 113626 - protein, 701 aa, Oryza sativa
  unsure (1)..(701): unsure at all Xaa locations
  Clone ID: PAT_MRT4530_17396C.1.pep
MAEGKIRWSDDEIGIFLEACLEELSAMTITSTCPKPQGYKNLIQKMKERIGRNLTKDQVKYIWCQCRKRWMLWTWLESKATGIGRDPITQAIVADDNWWEDKDQKKDGARVFKDSPLKHIDLHCAIFSGRTVVGNHSAVAGAAPAPPQQPTPRPNINISQLLAQQQNIATLGXVSSAGKGKRPADEAGTSRGSASKKSRSDSAXMESRSRKVEEDRARSAAACIQLVVADGHNPGSDLFFMALDVFERAYWGQWFIDYCPTPESRSHYIVQTWQKQFGGKGAGGQGGGQPGYEGGTGQQRYGVGAPPPTGQQGYGGGVPPPTCSGGHTRFGASALLISNACSLNWYLWNHTMSDGSSWSSDGTEGQYTSDEDDAIIAMMQEILAAPPRAPRRVPTQFGITWMLETMANPAQCRNNSSRESNNRWVRSNSTVSIYFRRVLSRMVMLGSKILKPIDPNFTDIPRRLLQDSRFGPFQFAVGAVDGTHIPVTVGVDSAIEHMNRHDETTKNVLTIVGFDGRVIFADAGWLGSVHDNRVLNEAIDSYPEEFPRLPFRKYLLVDSGYPSRMGFLAPYPRVRYHKDQFKGPRAPPPEGREEKFNYIHAKLRNIIERQFGIVKKQWKILKGIPYNPYKNVQSDIILAAFCLHNFRIDSKQNDFQANNPLYNGNPIAPIAPPFSNMYYAGNSAQAMKAYRDAIANSVENL

SEQ ID NO: 113627 - protein, 65 aa, Oryza sativa
  Clone ID: PAT_MRT4530_17397C.1.pep
MRNPRTGGGGGGMRLGCRCGIPARVPPCYGLHSGDDGGVACGTVLRARQPRDGCGCICADGQPCN

SEQ ID NO: 113628 - protein, 777 aa, Oryza sativa
  unsure (1)..(777): unsure at all Xaa locations
  Clone ID: PAT_MRT4530_17398C.1.pep
MGTRGTKRKRGEDIHPSTAAKGQAVPLAFAAPAPHGLLINLDSGTGSSASGKSDASSAPPCDNDINVAARFLTAVCATSPKGVRSFVRRVSPATVVRSLDLDLIRPISPQKMAEGKIRWSDDEIGIFLEACLEELSAMTITSTCPKPQGYKNLLQKMKERIGRNLTKDQVKYTWRQCRKRWMLWTWLESKATGIGRDPITQAIVADDDWWEDKDQVXDGARVFKDSPLKHINLHCAIFSGCTVVGNHSAIAGAAPAPPQQPTPRPNINISQLLAQQQNIATPGVSSAGKGKRLADEAGTSRGSASKKSRSDSAGDALHRLADLRVESMESCSRKVEEDRARSAAACIQLVVADGHNPWSDLFFMALDVFERAYWRQWFIDYCPTPESRSHYIVQTWQKQFGGKGAGGQGGGQPGYEGGTGQQRYGVGAPPPTGQQGYGGGVPPPTCSGGHTGFGGWNHTMSDGSSWSSDGTEGQYTSDEDDAIIAMMQEILAAPPRAPRRVPTQFGITWMLETMANPAQCRAIFRLTEYQIYTLHGILENAPYNLHGSNDFAVGAVDGTHIPVTVGVDSAIEHMNRHDETTKNVLTIVGFDGRVIFADAGWPGSVHDNRVLNEAIDSYPEEFPRLPFRKYLLVDSGYPSRMGFLAPYPRVRYHKDQFKGPRAPPPEGREEKFNYIHAKLRNIIERQFGIVKKQWKILKGIPYNPYKNVQSDIILAAFCLHNFRIDSKQNDYQANNPLYNGNPIAPMAPPFSNMYYAGNSTQAMNAYCDAIANSVENL

SEQ ID NO: 113629 - protein, 632 aa, Oryza sativa
  Clone ID: PAT_MRT4530_17399C.1.pep
MAEGKIRWSDDEIGIFLEACLEELSAMTITSTCPKPQGYKNLIQKMKERIGRNLTKDQVKYIWRQCRKRWMLWTWLESKATGIGRDPITQAIVADDDWWEDKDQKKDGARVFKDSPLKHIDLHCAIFSGRTVVGNHSAVAGAAPAPPQQPTPRPNINISQLLAQQQNIATPGVSSAEKGKRPADEAGTSSGSASKKSRSDSAGDALHRLADLRVQSMESRSRKVEEDRARSAAACIQLVVADGHNPGSDLFFMALDVFERAYWRQWFIDYCPTPESRSHYIVQTWQKQFGGKGAGGQGGGQPGYEGGTGQQRYGVGAPPPTGQQGYGGGVPPPTCSGGHTGFGGNNSARESNNRWVRSNSTVSIYFRRVLSRMVMLGSKILKPIDLNFTDIPRRLLQDSRFGPFQFAVGAIDGTHIPVTVGVDSAIEHMNRHDETTKNVLTIVGFDGRVIFADAGWPGSVHDNRVLNEAIDSYPEEFPRLPFRKYLLVDSGYPSRMGFLAPYPRVRYHKDQFKGPRAPPPEGREEKFNYIHAKLRNIIERQFGIVKKQWKILKGIPYNPYKNVQSNIILAAFCLHNFRIDSKQNDFQANNPLYNGNPIAPMAPPFSNMYYAGNSAQAMNAYRDAIANSVENL

SEQ ID NO: 113630 - protein, 341 aa, Oryza sativa
  Clone ID: PAT_MRT4530_1739C.1.pep
MAPPQLAGKMTAKAAAAVKPATRAYVTFLAGDGDYWKGVVGLAKGLRKVGSAYPLVVAVLPDVPESHRRILISQGCIVREIEPVYPPENQTQFAMAYYVINYSKLRIWEFVEYERMVYLDADIQVFDNIDELFELPKGHFYAVMDCFCEKTWSHTPQYQIGYCQQCPDKVAWPTAELGPPPALYFNAGMFVHEPSMATAKSLLDTLRVTTPTPFAEQDFLNMFFREQYKPIPLIYNLVLAMLWRHPENVQLEKVKVVHYCAAGSKPWRYTGKEANMDREDIKMLVKKWWDVYNDGSLDFKGLPPIAAADDADEVEAAAKKPLRAALAEARTVKYVTAPSAA

SEQ ID NO: 113631 - protein, 163 aa, Oryza sativa
  unsure (1)..(163): unsure at all Xaa locations
  Clone ID: PAT_MRT4530_173C.1.pep
EIQASIPDDLANTITPSVSLEQHQFKLEKAKQRIADRRERKDIETTIQANRQLVHEEKAKLDQLSVGPIQSNIDRLEARKIDLLAQLEECNAELDFEKQKLANLPSAVEEQXSRLRSAIKNVADMTKSLKVIPGTDAQDIQAIEEVDQIRQRAVSAIQRYLSQ

SEQ ID NO: 113632 - protein, 758 aa, Oryza sativa
  Clone ID: PAT_MRT4530_17400C.1.pep
MAEGKIRWSDDEIGIFLEACLEELSAMTITSTCPKPQGYKNLIQKMKERIGRNLTKDQVKYIWRQCRKRWMLWTWLESKATGIGRDPITQAIVADDDWWEDKDQKKDGARVFKDSPLKHIDLHCAIFSGRTVVGNHSAVAGAAPAPPQQPTPRPNINISQLLAQQQNIATPGVSSAGKGKRLADEAGTSRGSASKKSRSDSAGDALHRLADLRVELMESRSRKVEEDRARSAAACIQLVVADGHNPGSDLFFMALDVFERAYWRQWFIDYCPTPESRSHYIVQTWQKQFGGKGAGGQGGGQPGYEGGTGQQCYGVGAPPPTGQQGYGGGVPPPTCSGGHTGFGASALLISNACSLNWYLWNHTMSDGSSWSSYGTEGQYTSDKDDTIIAMMQEILAAPPRAPHRVPTQFGITWMLETMANSAQCRAIFRLTEYQIYTLHVILENAPYNLHGSNDVSSLEALGIFLFTMAGNNSARESNNRWVRSNSTVSIYFRRVLSRMVMLGSKILKPIDPNFTDIPRRLLQDSRFGPFQFAVGAVDGTHIPVTVGVDSAIEHMNRHDETTKNVLTIVGFDGRVIFADAGWPGSVHDNRVLNEAIDSYPEEFPRLPFRKYLLVDSGYPSRMGFLAPYPRVRYHKDQFKGPHAPPPEGREEKFNYIHAKLRNIIERQFGIVKKQWKILKGIPYNPYKNVQSDIILAAFCLHNFRIDSKQNDFQANNPLYNGNPIAPMAPPFSNMYYAGNSAQAMNAYRDAIANSVENL

SEQ ID NO: 113633 - protein, 126 aa, Oryza sativa
  Clone ID: PAT_MRT4530_17401C.1.pep
SSRLPKEEEGESMCRRGATYIAKSGESIDTIVEGEEAIDGQDCHLTDKDAGEDQVEDAGILQEFQMRRFNYCTDRNHENSWVSNKVPSTSSCMHRAKGYIYLQLYVILYSMFRKQMRNLAKMHSPV

SEQ ID NO: 113634 - protein, 135 aa, Oryza sativa
  unsure (1)..(135): unsure at all Xaa locations
  Clone ID: PAT_MRT4530_17402C.1.pep
MSRIRLINEWAKNVERTRPIGPKFTSLHMGAKEEATSQSPGWLGRXQGIRPNPSHRRWMQGFFWTVEIXTPYGGWKDIRVVFGNLSVVFRLLDIIIWGYMLWKRGGPLMVTAQYGISAPLLGIIFVVISLRNIIK

SEQ ID NO: 113635 - protein, 279 aa, Oryza sativa
  unsure (1)..(279): unsure at all Xaa locations
  Clone ID: PAT_MRT4530_17403C.1.pep
RHHRRRLGRLGRRTLAGERRCFSTNGGHQDVERDAANSPMTKTTAEDERTAAVSRKRRRRPSAXRRRRCSGGLQRRRSGGRGRRRLGDLNGGLPERRRRPERRRRMAGATAATAARGYTTLGRYGRREAKAKVATGRGDTGGPFKGARRRRRRPTATXATAKETSGKTNPKQTRIHRFPNRFSRCFQRRKGRGDPXDCFPSINSAGKGKDRSNLEGNGGAARLGFRAAAXRGRRRXLTGGPHLSASEGARGXWRTGLTWAGEREXGFGPTFGPKPKEDF

SEQ ID NO: 113636 - protein, 52 aa, Oryza sativa
  Clone ID: PAT_MRT4530_17404C.1.pep
MTSTSNDPSCHDLRRPTSYSTPSDGNVLACGRGLLGCDSRWTTDGMSDGGGF

SEQ ID NO: 113637 - protein, 284 aa, Oryza sativa
  unsure (1)..(284): unsure at all Xaa locations
  Clone ID: PAT_MRT4530_17405C.1.pep
IGSSPPLPPRHRCRRRCSRRVGGGGVTSRWPPAPDPWRGEGGRPPDPGGDGHCRRIRAXDGRGPPVVAACRIRCPRAPVTREGRGEGGGEEPPTTLKIGSSPPLPPRRRCRRHYSRLVIVGGGGGATSRWPPTPDPWRGEGGRSPDPGEDGHCRRIRAQXGRGPPVVAACRIRRPRALVTREGRGEGGGEEPRPDPWQGEGGRPPDPCGDGRRRQIRAGTADAHRISCLHRRAATAAAIDAAASASLTDGAGIAEEGEGDGRMGRRRGRGRGRMNGEVVGRVRP

SEQ ID NO: 113638 - protein, 178 aa, Oryza sativa
  unsure (1)..(178): unsure at all Xaa locations
  Clone ID: PAT_MRT4530_17406C.1.pep
HRCRRRCSRRVGGGGVTSRWPPAPDPWRGEGGRPPDPGGDGHCRRIRAXDGRGPPVVAAQTVNRILRAXVSARLKQIAXIGSSPPLPPRRRCRRHYSRLVIVGGGGGATSRWPPTPDPWRGEGGRSPDPGEDGHCRRIRXRRPRAACCRRRISCLHRRAATAAAIDAAASASLTDGAG

SEQ ID NO: 113639 - protein, 34 aa, Oryza sativa
  Clone ID: PAT_MRT4530_17407C.1.pep
WFVFSSQSRLGSGGLRLRYELRYHTHRRLGVEYL

SEQ ID NO: 113640 - protein, 98 aa, Oryza sativa
  Clone ID: PAT_MRT4530_17408C.1.pep
LRSRPPRDRLPSPRLTAGLLPSATDSSLPPLCNSTILFPEGLSPLLPPLTLISPAPPPASTADRRAVPPRLALFNRRPSRRPASCPRRRRRVIPPPQN

SEQ ID NO: 113641 - protein, 253 aa, Oryza sativa
  Clone ID: PAT_MRT4530_17409C.1.pep
MAEHKEEQSVMEKLSEKLHGDSSSSSSDSDDDKKGSSSSSAAAAMKAKIYRLFGRERPVHSVLGGGKPADLVLWRNKKISGGVLAGATAIWLLFEIMEYHLLTLVCHCLILSLAVLFLWSNASTFIHKSPPNIPEVKIPEDLTVNIALSLRYEINRGFATLREIGHGRDLKKFLIVIAGLWILSVLGSSCNFLTLFYIVFVALYTVPVLYEKYEDKVDAFGEKAEIEFKKYYALFEEKCLSKIPKGPLKDKKH

SEQ ID NO: 113642 - protein, 77 aa, Oryza sativa
  Clone ID: PAT_MRT4530_1740C.1.pep
RDMLDELRRDYRYVLKDYEMNTRKLESINKREARLLPEIKFLQKKLNSFEKNDSHQALLKKKAPRVPSYVGINDASS

SEQ ID NO: 113643 - protein, 535 aa, Oryza sativa
  Clone ID: PAT_MRT4530_17410C.1.pep
MAGGGFAAAGGGSARDYGGGITFSVVVTSLMAASCGLIFGYDSGVTGRHLYIPPESYGLHRLPTGGVTQMESFLSKFFPEVLRGMKSARRDAYCKYDNQWLTAFSSSLFIAGTLSSLVASRVARAVGRQAIMLLGGAMFLTGSIINAAAVNIAMLIIGRMLLGFGLGFTLQSAPVYLSETAPARWRGAFTSAYNAFVVIGILSATITNYFTNRIPGWGWRVSLGLAAVPGTIIVAGSLFIPDTPSSLVLRGHHDRARAALQRIRGAGADVDAELKDIVRAVDEARQNEAGAFRRLFSRRYRHCLAVGLGIPVFYEFTGMIVISIFSPVLFRTVGFNSQKAILGSVINSMTNLASTLLSTSVMDRTGRRPLFIVGGVGMMLCEVAISWIMADHLGKHQGVTMPRSYATGVLVLICLCTFSFGLSWAPLRWVVPSEIYPVEVRSAGQALSISVALCLSFVELQVFIALLCAMKYGVFLFYAGWLLTMTIFVAAFLPETKGMPIEAMRSVWERHWYWKRFVNDGDHHDGRVVADEGTD

SEQ ID NO: 113644 - protein, 74 aa, Oryza sativa
  Clone ID: PAT_MRT4530_17411C.1.pep
TCAKKSPALEETSSSTKGAIRLRVPPKKKGPQMEAAADPAETAHGCTCRSTARCNPCNCEYAYLHVREFRCACE

SEQ ID NO: 113645 - protein, 803 aa, Oryza sativa
  Clone ID: PAT_MRT4530_17412C.1.pep
MSGAPCSNLGLVPRDMHGSIPISTTNSSGPSIGVSSLVTDANSSLSGGAQLQPSTSMNADSFMRLPASPMSFSSNNISGSSVIDGPIVQQSPPQEQMQKRRSSSVTSQPVIDAAGALHAQKKSRVDIRQDDILQHNLIQQLLQGQSSLHLQGQQNPQIQALIHQHKLAQIQQQQQHQMLQPFSQIQQSQVGIPRQPQLRPPLAQPGMQLAGPVRTPVENGLCSRRLKQYLYHKRHRPENNPITYWRKLIDEYFAPRARERWCVSSYEKRGNPSGAVPHTAPDSWRCDICNTHGGKGYEATYEILPRLCQIRFDHGVIDEYLFLDMANEFRLPNGLMLLEHTKVVQKSIYEHMHVIHEGQLRIIFTPELKIMSWEFCSRRHDEYITRRFLSPQVAHLLQVAQKYQTVATESGPAGVSNSDAQNICNMFVTASRQLAKNIDHHTLNEHGLSKRYVRCLQISEVVNHMKDLIEFSHKNKLGPIEGLKSYPKQTAAKLPVQNMHEPKQLMAAAGLPNDQTNLKAMGVKTEMNTHANETHGIGPIGNGPQNAAALNNYQNPIGNGLQNAAALNNYQNILRSSVANQSLLQQEASSMFKGPTAMHNGIQLEASRSFRGPNQVHLAQFQHPASFQQPMPQQSSLQGLGVSPQYQQHVLHQLLQEAKNTNNRVLAQQQQQQQLQHAPANSGLASGGTAITGSAASGDHMNNNGAVKGGTPMVTTGPSSVINNTASILPSRSNSFKSVSSNPQVAAAAGGGIGSGGHAATPKADALHELDDLDNLGNLISTELEESGLFLGDQAGGGYSWNM

SEQ ID NO: 113646 - protein, 78 aa, Oryza sativa
  Clone ID: PAT_MRT4530_17413C.1.pep
QNHHFWEKLYYDDRREAGNLNCTPKGRARSLINYLSCERWLEVELCFLQPGSGCLSQHEVIYFIVLKGQVWPWGTINY

SEQ ID NO: 113647 - protein, 128 aa, Oryza sativa
  Clone ID: PAT_MRT4530_17414C.1.pep
GQEPPPKSRVVYPVVWLLMRSIASSTSATSPPLLCSRQQGPVPPPQSCVVYTPPSCGRQQGPAPPPQSRVVYPPCPATVVWLPMRSIASSQPRAAMWPPARSSTSSLSRATLLRCRRRRVTADNDASP

SEQ ID NO: 113648 - protein, 234 aa, Oryza sativa
  Clone ID: PAT_MRT4530_17415C.1.pep
MAAKVHPNLAVPSLIQPPMAPPAAMAAGDSVMKTKAAAAGGDVVLTVWRKSLLFNCRGFTVFDASGDLVYRVDSYAADSRAEVVLMDAAGVPVLTVRRKKAIGSQLGLGGDQWLVHPGEETRLPPLYAVKRTPQYVRGGGSVKTMAHVAPCGVALGAGGGGGYEIEGSYLRRSCAVYDARRRAVVAEVQAKEAVGTDVFRLVVRPGMEVSVAMAVVLALEQMFGKPSLLRSWSS

SEQ ID NO: 113649 - protein, 683 aa, Oryza sativa
  Clone ID: PAT_MRT4530_17416C.1.pep
MKQGKVEMTPAVAAAAVLPVGFRFRPTDEELVRHYLKGKIAGRSHPDLLLIPDVDLSTCEPWDLPAMSVIKSDDPEWFFFAPRDRKYPGGHRSNRSTAAGYWKATGKDRLIRSRPAGPLIGIKKTLVFHRGRAPRGLRTAWIMHEYRTTEPHFQSGKNGSFVLYRLFNKHEQDDTHTPASNLDQQLSTSSQGNPQNGTPAVQPALASIMKDHQTLPSSGFSQLTEIQDASTSVHDKEQTVAHDDAFLDVLSQLPDLEPEQRYNGFPNITSPIRPYSDHPFVGNLGEQDLSAHFGSTLSEQDLQSLLFSPNYTKMDKHPTGNVESNPTASSNNPNNNTLLMDSWRKNDSYQMLLIQRADNTDATCCSSSINAPQTETSDANLEARAQSSSMVYSGVAEGSPLCNQDQLHSAFNPHMESQKSGAFCWAGLWTPYPQHWFDTIVEPGRSGMTFSDALKEQGQEQAPSMKHLTAQDLVDPQQGTAARRIRLVCSVERASVSQPVSSHLQSEYEAGSCCNTRNSSNNKKESVRSEDEAGSCCNTGSSSNNHSEENDDAASQIMVLLQFIDGEPMHIQCKEDTPIQVDHSVEVMDKLQGFSFHEEMLVHANQPRGTNLKQRLLRVESRNSNENNVPSLETREQQHAPHIQKWTSSVVRLGWGWQWPALFVMAGSLLLLVGVWKSLNHTT

SEQ ID NO: 113650 - protein, 55 aa, Oryza sativa
  Clone ID: PAT_MRT4530_17417C.1.pep
VTCMKRGDIPSRDEFTFPLYMSMTLLFMIYAVVFGIPHGSYPIIVQRDACISCRI

SEQ ID NO: 113651 - protein, 323 aa, Oryza sativa
  unsure (1)..(323): unsure at all Xaa locations
  Clone ID: PAT_MRT4530_17418C.1.pep
LNKEESNHTVPQPFAPATEREDSGEGDCTPVPHPTRNGEKLSDKSSTSLASMAKKSPSVTPRRPLPADSTSHSHEDDFIXSRTVTSARTGKIKKTTVPVAPTFICGNRLEKRGEFYTKLEEKRKALEEEKLEAEARKKEEQEEALKQLRKNLVIRAKPMPSFYQEGPPPKVELKKVPPTRAKSPKLTRRKSCSDTPHTPEGKNGSAACCRLHRHSIGNSKEVNSRTQCSPKSAPKTGVAAKPRATKGVMKNVGKPEPWYRDHVVFRVVNLSRFCKGVTESMLSYGIVFKHQLVIVDILAKSTKIFCLVEFGIAKIPCKSTWYS

SEQ ID NO: 113652 - protein, 52 aa, Oryza sativa
  Clone ID: PAT_MRT4530_17419C.1.pep
GSMRRKRYPRKVKACHRVQLEDGGCRRSIDVGGAAATQCKGVSAGGVGGSVE

SEQ ID NO: 113653 - protein, 65 aa, Oryza sativa
  Clone ID: PAT_MRT4530_1741C.1.pep
AAGIRHERQSRSASLLAPRRRGRIAGVCSHRHQRRGSILVCGLRIVDITISFCLIVFDEILFTFY

SEQ ID NO: 113654 - protein, 134 aa, Oryza sativa
  Clone ID: PAT_MRT4530_17420C.1.pep
MASDEAMYNAPPWTVVSGLQLGGWADVPAQWGGGGGLTTYQQPTSSFAPPERDHILEAHRRALLPLPRSSPIAANASEESGESPASGSSELIASRGHGRTRRARYLVAIALPNRRKEREEISNSPAERGESSSS

SEQ ID NO: 113655 - protein, 94 aa, Oryza sativa
  Clone ID: PAT_MRT4530_17421C.1.pep
RKGPTAAVKTDADEDVRGMPATHHHQHNKSLPSVLLSLDFRRSHAGQRVLEEQRKGPTAAVKTDADEDVRGMPAAHHHQHNKSLPSVLQPAGPR

SEQ ID NO: 113656 - protein, 209 aa, Oryza sativa
  unsure (1)..(209): unsure at all Xaa locations
  Clone ID: PAT_MRT4530_17422C.1.pep
MPPPGPNGQNSIWGYNPAKNDPIXRVPLPPHTTTGXPPPEXTRRLNHSLETILPHNTTHRKPKGVXTSSHPAKRKGSPLPPHTQRGPEGARATPXQQHTVHRRPNQXNLTLYPXVEPPGKISVSPTPPPPXNRKPPVPPRGERGLVGGVLLPSFKKLLLRTPQKILNGSQPPVPQSALCGLSPPSRPSSPLEMMLFLPHPSNSLNTTFP

SEQ ID NO: 113657 - protein, 143 aa, Oryza sativa
  unsure (1)..(143): unsure at all Xaa locations
  Clone ID: PAT_MRT4530_17423C.1.pep
RKASARFDALSQSYSQDLLQSHLLLQQPRALXPTIELVTHHNTIAAPAFCIEGTLPWLGNRVGQPQCRHQLXLVAPRVHYQAVTRDQARVHELRPQQVGVVWFVGTQXDSGGQVSFTLPFICGGLRFINNLPRSIASLVGDWQ

SEQ ID NO: 113658 - protein, 299 aa, Oryza sativa
  Clone ID: PAT_MRT4530_17424C.1.pep
YHRTFCCPFHPLGYSRSKSLCNSFLFFFLILRIFSIEERRELWDRFRAMAKEVDPCDHGEVVDAGCVRAVLAELVLTFVFVFTGVAATMAAGVPEVAGAAMPMAALAGVAIATALAAGVLVTAGFHVSGGHLNPAVTVALLARGHITAFRSALYVAAQLLASSLACILLRYLTGGMATPVHTLGSGIGPMQGLVMEIILTFSLLFVVYATILDPRSSVPGFGPLLTGLIVGANTIAGGNFSGASMNPARSFGPALATGVWTHHWIYWLGPLIGGPLAGLVYESLFLVKRTHEPLLDNSF

SEQ ID NO: 113659 - protein, 293 aa, Oryza sativa
  Clone ID: PAT_MRT4530_17425C.1.pep
MQEVSINRFFRRMQMQYKTIQRTAALISFSDIRSVAANSTFHALLLKLVRVCVGYLSVVFPSVRLEKRAPVKPCPSLLDLDYPVVTSTGPDNKADESTELVGNFIGFDGDTSSEEDNVPASYGKVPAGELVALLDGPELSNKIDDMIEANLSGFGNVSNGGRIKCMQVWPIEGIKKFETLSYLPPLTVEDLLKQIEYLLRSKWVPCLEFSKVGFVYRENHRSPGYYDGRYWTMWKLPMFGCTDATQVLKELEEAKKAYPDAFVRIIGFDNVRQVQLISFIAYKPPGCEESGGN

SEQ ID NO: 113660 - protein, 175 aa, Oryza sativa
  Clone ID: PAT_MRT4530_17426C.1.pep
MAPSVMASSATTVAPFQGLKSTAGMPVARRSGNSSFGNVSNGGRIRCMQVWPIEGIKKFETLSYLPPLTVEDLLKQIEYLLRSKWVPCLEFSKVGFVYRENHRSPGYYDGRYWTMWKLPMFGCTDATQVLKELEEAKKAYPDAFVRIIGFDNVRQVQLISFIAYKPPGCEESGGN

SEQ ID NO: 113661 - protein, 833 aa, Oryza sativa
  Clone ID: PAT_MRT4530_17427C.1.pep
MSTSASPSSMPSAEYAEHLSNLVAVPSLSHENHYFLGLIGDLDPTEFIIAETNRIPFRLANPNLGHWKSTFKSWPSLEKTSPEKSWITWFKRVSASKQTHWDEIGIGQALALTIANSAKDEPLMAAATYFWSNTINAFLFNQGPMTPTLIDITMITGLDVTSSANPMSLNTKNQSDFRTMSIGGWSGYLAAYMGKGPVTSREHVAFLLMWLEKFLFCGSSCGPTTNWQFLAEALETKRQFPLGKILLGYLYQMLNNASVKIVVGSVVGAGGPRWLLQTWLNLVVTKAVNWPSVTEAEFPRLEPTTNDDGEERTHHRCMSYGEFASTPADAGTKLSAELLKDWFCSFYEGFQKDARVWFPYEDSVNLEVPSDFRFKDINHERYQKSREVFSTAISPCILPVGIHQGRNIQVSYEFYHPMSSARQFGMGQLPIGLFFTDKIQCRGEISSTLMMDRLLNIPGPSLGSIENIELAKFRSRAFDRWWGEWKLHLFHQPASMYMTDLFPDVIPQTTKSSSPHQSKSGRDTEYAPCLIPNGDPSIEQALDEEEIEEDVDKAVTKKKKIAVKKKSAATTLKPAPPQSPSDQTPSATGSHHVEEEEQPAAPAIPALADLFSFDIQDYLDEEIEADTTSMALAPFSNDVKKTLEDISHRLEAASLDSLVVDCGLIRTWLHEVQALIPYELVNALTPAVHLEQHQFKLEKAKLRLAECQKHKDIEATIQANRQLVHEEKSKLDQLSEGPIKSNIDRLEARKIELLAQLQECNAELDLEHKKLADPPQAIEEQKAKLKSAIKNVVDMTKSLKVIPGTDTQDAQAIEEVEQIRQRAISAIQRYLLK

SEQ ID NO: 113662 - protein, 45 aa, Oryza sativa
  Clone ID: PAT_MRT4530_17428C.1.pep
EESADIIPSFTNNAYLEGRCAELGLIQNQRYPLEGCCSKFGGGPS

SEQ ID NO: 113663 - protein, 87 aa, Oryza sativa
  Clone ID: PAT_MRT4530_17429C.1.pep
ACKVACWCIQDDENGRPTMGQVVQILEGFLDVNMPPVPRSLKVLDESPDVINFFSDVSSSQTSQMHNSTASSQTKSSTSGGSQFQST

SEQ ID NO: 113664 - protein, 109 aa, Oryza sativa
  Clone ID: PAT_MRT4530_1742C.1.pep
DRAGPARPRGGPGRPGPRKRSTPHRGGPTGPPAAGAREGLPWQGRAEIFPGRPHHAARGGRAVVRDAALGVGANAAGAAGAGVGAGIGAAANVAGSLTGAAGVAPKVHV

SEQ ID NO: 113665 - protein, 114 aa, Oryza sativa
  Clone ID: PAT_MRT4530_17430C.1.pep
MAPLSNNQGAPGFTQPVAQLSLSDPLQGSPAREEGEVPESQLDPDTRRRLLILHHGQDTRDPTPALTAVPPDQVPTPSVQPHGNWLPVKDGMNPNNLNRGSAGFPLESETMHYE

SEQ ID NO: 113666 - protein, 214 aa, Oryza sativa
  Clone ID: PAT_MRT4530_17431C.1.pep
MGRRTTGQRRWWWLDERRRQRQLARGGDGGGSTWGGGGGGSVRRGGNNGGGGLYQILKQIFIDVYVKIIMLVKVYRICKVHVLNVGKFLIMNKNRGSLQHENFWTTFWTTAARTHTSVSRCTRTSRIEPSRETVRSVKLYVPAIYVYYAALMCPWKLTTGRGHCKAATGIDANTNNSNWPDRNSFRIVNVARLTVKTLELVDPSLSGFRRLGLF

SEQ ID NO: 113667 - protein, 393 aa, Oryza sativa
  Clone ID: PAT_MRT4530_17432C.1.pep
MPLALLARAALSSTSSSIAMATTRSSSSRVLRASRAELNPGAKEVKRESSVSFDLTKTEAVASMRSKNVKRVLEVTGENIKKEVDIVPDIEDFRYGKASPSLVRLEKKVRVSSAIKVGAPENWEAILKGIKNMRLSGEAPVDTKGCEKAGSLLPPKERRFAVLISTMMSSQTKDEVTHAAVERLSEKGLLDPDAIVRTDEATLANLIKPFLAGNYSAQPLTSYWLLFNQVGFYQRKAKFIKEASKICLERFGGDIPDSLNELLALKGVGPKMAHLVMSIAWKNTQGICVDTHVHRISNRLGWVFREGTKQKTTTPEQTRMSLEKWLPKDEWEPINPLLVGFGQTICTPLRPKCDMCGINNICPSAFKESSSPNPKQKKMRFAVLMAINIADLL

SEQ ID NO: 113668 - protein, 190 aa, Oryza sativa
  unsure (1)..(190): unsure at all Xaa locations
  Clone ID: PAT_MRT4530_17433C.1.pep
YSVPPPKPLQNQTKSRGAWRRRRWRRTAAGTARRLSNAPAPTRLASVYSEVHTSRLKHALPLPSVLRSPFALADGPASSAAGRPGEIVKLFPSLFGQPRVCVVPSAQPASTXQVMAGVVLSGGYVPRCLDVVCGFFDDLRDFAGGSVXCGFAGCPPRVMIGTCAHLTADDVSPYGDHRGFGVICGGRAGL

SEQ ID NO: 113669 - protein, 44 aa, Oryza sativa
  Clone ID: PAT_MRT4530_17434C.1.pep
HASGQTICTPLRPKCDMCGINNICPSAFKESSSPNPKQKKMRSS

SEQ ID NO: 113670 - protein, 78 aa, Oryza sativa
  Clone ID: PAT_MRT4530_17435C.1.pep
IYPHFQFTDLQLFLLTVSLMLPFLCCHVALAAGLHPVISVSFCSQHHHSLQMSKPKSSVENKFDEDMDFGLSCLLIYL

SEQ ID NO: 113671 - protein, 249 aa, Oryza sativa
  unsure (1)..(249): unsure at all Xaa locations
  Clone ID: PAT_MRT4530_17436C.1.pep
TERVNQILEDMLRACTLDFGGVWNKSLPYSEFSYNNSYQASLQMAXLFWDQTGERQLFGTELLSDVEEKXVRTFMERIRISRSRQKSYANNSRRXLIFEARDYVYLRVTPLRGVHHFQPKGKLAPRFVGPYRILERRGEVAYXLELPSSKASIHDVLHVSQLKKCLSVPKEXASSKHIEIQEDLTYVEKQVRILETSVRRTRNKDTRXCRVQWSHHYEEEVTXEREDELNAAHPHLFASFSESRGRDSV

SEQ ID NO: 113672 - protein, 92 aa, Oryza sativa
  unsure (1)..(92): unsure at all Xaa locations
  Clone ID: PAT_MRT4530_17437C.1.pep
RFLRXYLPPGRQAALPLEHRGGVPVARLRKVVLRECVAGRPPWEDDRVARRRRHGGPARAGLPRPRPGVPRALMCASPATPACAAXCGASPV

SEQ ID NO: 113673 - protein, 227 aa, Oryza sativa
  Clone ID: PAT_MRT4530_17438C.1.pep
AGIRHRLWTRRLPPAAAAYRAARSATGAAAPPPRGQEGQGDRSGGDEGGRYGVLLYYKYAEVPDAAALAAFYESHCRALALVGRVRVGPDGVNATLGGRMAALEKHVAEMSSNALFDGTDFKLASCDDPVDERVARECGFTSLSVRLVKELVTLCANPSLATPQITCAGRHLSAAEFHSVLQSVGATSDSEATVEKSEVVVLDARNVYETRIGKFRVPNVETLRGEE

SEQ ID NO: 113674 - protein, 54 aa, Oryza sativa
  Clone ID: PAT_MRT4530_17439C.1.pep
MTVSEPGGSGFDSGSDGGGSDARKRAAASMMVGGSGKDSGDIDVSYYYPIEGSE

SEQ ID NO: 113675 - protein, 495 aa, Oryza sativa
  unsure (1)..(495): unsure at all Xaa locations
  Clone ID: PAT_MRT4530_1743C.1.pep
IEETHKSLSMDXLKERINGQGFSGVTFDVEGRRXMVFRELVXGHAADQPDTPPGAXILDHPGPRSPSAGALTSSPCDVGGFAATGAATAPGAVIPVSSFRYEVFLLLLHILHAGRVSMLRLKGEPGPGCGDRGCSHTLCFAAFVCALDAVAAARSLGVVELDHLTQKQLAGMVEKASIEDVMKVLMASRKQDLHQLWTTCSHLVAKSGLPPEVLAKHLPIDVVAKIDELRLKSMSRRSPFLSHHHHHPHAAAAGIEASSAAELDDHHKIRRMRRALDSSDVELVKLMVMGEGLNLDDALALHYAVENCSREVVKALLELGAADVNHPAGPAGKTPLHVAAEMVCPDMVAVLLDHHADPNVRTVDGVTPLDILRTLTSDFLFKGAVPGLAHIEPNKLRLCLELVQSAAMVMSREDAQTAAVNAAPIYGESPGGGGGGGVYNASGTSSSMVNLSLDNRMVYLNLGMDAQFGKMNDGGDGDDGGSRGPSSLFSPHGFP

SEQ ID NO: 113676 - protein, 142 aa, Oryza sativa
  unsure (1)..(142): unsure at all Xaa locations
  Clone ID: PAT_MRT4530_17440C.1.pep
MATAVRVITKWGHPTADITHLVVSTNAGAHSLGTDEWLAALLGLRATVQRTILYMHGCSASCSALRLTKDIAENNHGARVLVACTEVFLIVFAAPDKAHLDTLVTHCXFGNDASAVIVGTDPRAPVEHSVFHMVYNRMGSES

SEQ ID NO: 113677 - protein, 171 aa, Oryza sativa
  Clone ID: PAT_MRT4530_17441C.1.pep
FLLSAMAPLASVVAGSVLGYLIHGDRHGIPVIGYLKKGINPPSARDLLLSSPHTMVALRTGIITGIIGLAEGIAIGRSFAMLKSYNVDGNKEMIAFGAMNIVGSCTSCYLTAGPFSRAAVNHNAGCKTPMSNAVMAVAVMLTLQFLTPLFHYTPLVVLSAIIISAMIGIID

SEQ ID NO: 113678 - protein, 155 aa, Oryza sativa
  Clone ID: PAT_MRT4530_17442C.1.pep
MVRMAGVDREWLHSMAHALALDTWTWPREDVPGLGALISLKGVRVCAGMVRMAGVDREWLHSMAHALALDTWTWPREDVPGLGLIDGGVDRSWPRVDRRGHRSLLRGQSPKNSRVKRARLGAIWDGHGAHGWCRPGVVTQYGTCAGTGHMDVAKA

SEQ ID NO: 113679 - protein, 134 aa, Oryza sativa
  Clone ID: PAT_MRT4530_17443C.1.pep
NVYVLPTRASNYYLVLGRRRRGRGCSRGGTEEIGGVALAGDADGRDRRGRSRLVREYRRWHGGDRRGGRHCRRGRERSARAEQIGGEIGSGEGDRRTTTLATPGDGDVAARRRAPGKDRGRREERGGAARCVDG

SEQ ID NO: 113680 - protein, 225 aa, Oryza sativa
  Clone ID: PAT_MRT4530_17444C.1.pep
MAAPTAAALSTLSTASVTSGKRFITSSFSLSFSSRPLATGVRAAGARAARRSAASASTGGATIAVGDKLPDATLSYFDPADGELKTVTVAELTAGRKAVLFAVPGAFTPTCSQKHLPGFIEKAGELHAKGVDAIACVSVNDAFVMRAWKESLGLGDADVLLLSDGNLELTRALGVEMDLSDKPMGLGVRSRRYALLADDGVVKVLNLEEGGAFTTSSAEEMLKAL

SEQ ID NO: 113681 - protein, 160 aa, Oryza sativa
  Clone ID: PAT_MRT4530_17445C.1.pep
MRTYEDTFSGARIYPGKGKLYVRGDSKIFRFQNGKSESLFLQRKNPRRIAWTVLYRRQHRKGISEEVAKKRTRRTVKAQRGIVGASLDVIKEKRNIRPEARSAARAQAIKESKEKKQAEAATKKSEKAKLAAQASKGQAVRQVSKQGAKGSAPKVQAKTR

SEQ ID NO: 113682 - protein, 173 aa, Oryza sativa
  unsure (1)..(173): unsure at all Xaa locations
  Clone ID: PAT_MRT4530_17446C.1.pep
APEWLAPSPNMAAPATMVSRPCHCGSRXVVVVLTRPRGAPATLAPPLITRRXHGWRTPPHPSPPHLLPPAGRRTHRRRATAPARLRPSPAAARPTARPPTPPRRXWLLPSCGAAQLVSSHPRQQSARQQPSNGIPKLKNLGPPLAPRRQGGWRRPPPPPALIRKSVASLRPHS

SEQ ID NO: 113683 - protein, 68 aa, Oryza sativa
  Clone ID: PAT_MRT4530_17447C.1.pep
VNESIFKHLTWHFSPLYELMLRHCPFYSTLHTIYISSLECAASELTNYTKYRESSIEILFNNACKITL

SEQ ID NO: 113684 - protein, 135 aa, Oryza sativa
  Clone ID: PAT_MRT4530_17448C.1.pep
MAAALRFAARKVSRGALQQATAFVSPSPAVKEEQRRLLPEHQTIASCKEPASLRAQIEEKKHELFHLLFELKYGRKSIAGGEKLSIQDERILGELTPYRELKAMADKYGLKQALKYIGITYVLGFAVLGMAVNHM

SEQ ID NO: 113685 - protein, 287 aa, Oryza sativa
  Clone ID: PAT_MRT4530_17449C.1.pep
MEPGCHFVPWFLGLQARGPLSLRLRQLEIRCPTKTKDNVYVTIVTCVQYRALADKASHAFYTLINTRSQIQAHVFDVLRTSIPKLALEEVFDKKKEIAEALEEEVAEAMAPYGYEVMRALVVDVEPEEAVRRAMGESRAAADRAVAERAARAGRAEADAEAARLAGVGAARHRQAVVDGLRACVVAFCAAVPGATPREVMDMVLVAQYLDTVREIAAASASGCSAAAAVPFLPHGPAAARDAVAQIRDGLLQAVQPPAAAAAASVAAVGLPLPLPVASVCEGITEEQ

SEQ ID NO: 113686 - protein, 56 aa, Oryza sativa
  Clone ID: PAT_MRT4530_1744C.1.pep
APHRTPRRRRVFPALAPPTSQLEANGMTTACAGGEGSEEAGEGVLAERRRRTTARP

SEQ ID NO: 113687 - protein, 181 aa, Oryza sativa
  unsure (1)..(181): unsure at all Xaa locations
  Clone ID: PAT_MRT4530_17450C.1.pep
GAALDGSGPPEGRSGVGRACGGGGAAELVATASASTGXNSWRERPSQRRQWRGACGDGGNSGNSRWLADGSIGCCGDRGCSGRRHGGGDRGCDGXEARRSRTASRGRGRRPHLASATAIGGXGRRLVLGTERYGXWQWRPARRERHARXGGCRLGVRDATGGGRPDWRDEARLVVEEVGAA

SEQ ID NO: 113688 - protein, 50 aa, Oryza sativa
  Clone ID: PAT_MRT4530_17451C.1.pep
RGMIGIPLWLGVGPPPWMVPPKTSPLLGWDAGGASSQSPPSPSSNWRTYG

SEQ ID NO: 113689 - protein, 200 aa, Oryza sativa
  Clone ID: PAT_MRT4530_17452C.1.pep
MQMQAARPRVGVRPRGGIRPFPLPTLSFNNNSNRSACACACAVSVSDSELAARGFAVRRSSTGLDVGALNEVFARVGFPRRQEERLRRALEHSEVVWLEDSASSSAGRPVAFARAAGDGVFNAVVWDVVVEPSCQGLGLGRAVMERLVADLRGKGVSNIALYAEPRVVGFYRLLGFAMDPDAIRGMAFYRSRQQIQNTSS

SEQ ID NO: 113690 - protein, 323 aa, Oryza sativa
  unsure (1)..(323): unsure at all Xaa locations
  Clone ID: PAT_MRT4530_17453C.1.pep
MEETIFSSTHTSLVADARIAVVTGGNKGIGLEVCRQLXXXXTVVLTARDEAKGAAAVEKLHGLGLSMEETIFSSTHTSLVADARIAVVTGGNKGIGLEVNNAAVGGIVPVDDPSFGLLPTEEKFSGMDGHQRIEWMWKNCRQTYDAAKAGLKTNYYGTKNVTEALLPLLQSSSDGRIVNVASSFGLLRTADTKDCMQFFTNEELKRELNDADSLSEERLDELLGMFVRDFEAGAVAERGWPTEFSAYKVAKAAMSAYARILARKRPALRVNCVDPGYVKTDLTRNSGLLTPEEGASRVVAVALLPAGGPTGALFDGGKEASFV

SEQ ID NO: 113691 - protein, 75 aa, Oryza sativa
  Clone ID: PAT_MRT4530_17454C.1.pep
DDGGCRSTAFTLSLPSSQPLCPAFSGFSVGRTSDQHLLRVRHWTPLVVDVAYNVPVSHAGAERHGGALLTSYFLR

SEQ ID NO: 113692 - protein, 43 aa, Oryza sativa
  Clone ID: PAT_MRT4530_17455C.1.pep
MVSDRASGKRGASRSAKGDDRERPICGHAVTRTYAREEEEEIC

SEQ ID NO: 113693 - protein, 119 aa, Oryza sativa
  Clone ID: PAT_MRT4530_17456C.1.pep
MELAALCTDPVVLSAAFLCLLLNLSLCSYRPPSPGGGRRLPLGPPGVPVLGALPLVGPAPHADLASLARKYGPIMYLKMGTCGVVDVRGEGFLSEPEFEEAPDVVFEGEDPRPVQGKPL

SEQ ID NO: 113694 - protein, 93 aa, Oryza sativa
  Clone ID: PAT_MRT4530_17457C.1.pep
MEEESPRSTVAGRSGPNIEEGVEGVGRGRRGDGRGGGEEAAQLVLAKAWAHRWMDMTMVVAALLACRDDDRCFLPRQSPTTHTLPPLRASSIV

SEQ ID NO: 113695 - protein, 423 aa, Oryza sativa
  unsure (1)..(423): unsure at all Xaa locations
  Clone ID: PAT_MRT4530_17458C.1.pep
PPLFFSRKKNPKRKKALVSPFRFGKKPFGPWWGKKNPGGTRNPKPPRGKKKGGGGKRKXXRXNFGXXXPGXGPXGVSXKGXGKPPFWGPXXXPFXGPPRXXPXGGGGGFFPPPGGVXFPPPNPPPXXKXPXGGKPRXXXGXKXPXLGGGFGXNFGXXKPXXKPPPFSPFXGPPPGXPPGXPFXXPXXPPPGGGAPPFFPPPPPPKIFPXGXPPXGFFPPPPPXKIFPPKXFPXXXPPXGXKXXXXFXRXKKPPPFFPLFXKPXKKKXFFFFPPGKNFPPPXNFWGGGXXXXXPFFFSPPPPPPXGGGKNFLXGGXXGXPXFGGFFXXPGGGXKKGXKXGXKXKGGGXKKXFFXGGGFXKXPLXFSPPFXXPPFFPPPPPPRGXPGGKKGXKNPPPGXPXXKKXXFFLXXPPPPRGKKKXPPGG

SEQ ID NO: 113696 - protein, 570 aa, Oryza sativa
  unsure (1)..(570): unsure at all Xaa locations
  Clone ID: PAT_MRT4530_17459C.1.pep
MSYYIDPHTNIPQYPLYSVYGYPLSTVARQVGEFGAQGFTTMTSSLLDNSVDPGINQGASTSTMLVWTQVGEIVFPVYTTMPISTGAVITSSENGVVTTPVDSMSKDPPAGAENGTSTTSAPEKGPNAASSFRSDKKHEPTRTTSEATRIWCPIHKTKRHTLEACSVFLDVQAEIRACKEHGIQRTSPTRDVYCPIHKAKTHDLSSCKVILSAMRTSPPKVQQSQISPRDADKERGATNIXDRFVRVIDIDPHEPSVLHLLEDQASSSTSTPRNMYAIGGTSTSGGGNTEAEDQLATPAQHIRTINAILRETSNDPVLNADLDQWTERLRESVASLSNAFEEAAARAPPEQPPTGGANGEQPEQRTPPRQATLPPCGTSDLRDHLNGRREARRTXDNENHSPHRVSLRHHENEEQGGHPSENRDRDDHHNHREHANRELWLPGDTSXGRRRNDDDDGGRHWENNDGXRRGSREPERRPRNPAPKPSDSSSSSSSSSSSSSDRHPRRAHDRRQPTAPGGGCRAFTRSLQEVRWPEKFRPGAIEKYDGSTDPEEFLQVYTTNGKEKAFTLIN

SEQ ID NO: 113697 - protein, 65 aa, Oryza sativa
  Clone ID: PAT_MRT4530_1745C.1.pep
SMKLGVYRMPKLQPSKLCELCIYCTALQLNISIHLDSGYISDTNSDWTTHWTIAGIGKYRNSFKS

SEQ ID NO: 113698 - protein, 53 aa, Oryza sativa
  Clone ID: PAT_MRT4530_17460C.1.pep
ICSIPDPQKFRSSHYIWAASSLMGSWSPIYCNLLCCSLSFFYAYGPKLSNLIL

SEQ ID NO: 113699 - protein, 100 aa, Oryza sativa
  Clone ID: PAT_MRT4530_17461C.1.pep
GKHSWDDNETMLLIPSSSITGHVLLKKVFDKILLEPTGNPASIQKKELPPPPDKARGAKSYRPMGTTTPVQSITLITGSARPAHDPRVQFPRMPRALHLC

SEQ ID NO: 113700 - protein, 283 aa, Oryza sativa
  Clone ID: PAT_MRT4530_17462C.1.pep
MPLLVLIFFLVLGVLCPAAAAKEQLILNEFTSTNLHLRRHGDGLLDHADQQRTQNKQGPCLVLVPATRCPIARGMLAVLSPINYAFVIMFEELSNHGMCSAPMPPLPRPAAACSRIDADGVLVQLVGVHRLEDKKGGMKTEREEGRRARPLRPTLCGCGEEKAGDQEGERWKERRMTCFDGEVSERKPRGSGCGGLGGEISSKRQRSAARCKGGSTQSSSGAHHTGSGSVCYPLLAGLPSLPLVAAGSRIGGHSPGVFEKTENEKIEEIRKTRQAINVRLIEY

SEQ ID NO: 113701 - protein, 217 aa, Oryza sativa
  Clone ID: PAT_MRT4530_17463C.1.pep
MGRQEKAGGSVAPLWACGSGKPPSRQPAERPASGEAVVDAARRLGIPRSRSRCEGAQPMNSDELHQDAIGIDPGACSSRPRQWRHWSRAHAVVAQFLEHDDEGIINWRKDCKHPPCYWASCGRHQYKTWPLLVLCTLLVSMIEQPITMPSKMKVCAEERVLDPPVAAAAVVFAPDIRPRHSALLPRCSHRHLVADRRTSSSPASPLVTSSPSAGQLA

SEQ ID NO: 113702 - protein, 224 aa, Oryza sativa
  unsure (1)..(224): unsure at all Xaa locations
  Clone ID: PAT_MRT4530_17464C.1.pep
MMQYVIYSVQKHSMNTVHKALSPSWYALLGAASFLGGSMRMTVSLCVIMVEITNNLKLLPLIMLVLLISKAVGDFFNEGLYEVQAQLRGIPLLDSRPKQVMRNMSAKDACKNQKVVSLPRVSRIVDIISVLRSNKHNGFPVVDRGQNGESLVIGLILRSHLLVLLQSKVDFQNSPFPCGPGILNRHNTSDFVKPASSKGKSIDDIHLTEDEXXLFLDLAPFSNP

SEQ ID NO: 113703 - protein, 129 aa, Oryza sativa
  Clone ID: PAT_MRT4530_17465C.1.pep
MRLLRIPDLIWEVEVKAATRPCLRATDRGPPPHSSPIRLLFLKCSVEAEAMAVSGGRGGEEKRTDWKARAVPSSSPIGGLVLRHWVLLVAVDAATTIGHSSLPPPSLDAGRCYFGTTYATLSQNQIKTV

SEQ ID NO: 113704 - protein, 741 aa, Oryza sativa
  Clone ID: PAT_MRT4530_17466C.1.pep
MARLAWTRLPTADGAGAGAEGPGPVPASPSSAGYELFAGGVESLDYEVIENYAYREEQAQRSKFWVPYYVMLKWLFSLLIGVGTGLAAIFINLAVENFSGWKYAATFAIIQHSYFVGFFVYIVFNLALVFSSVYIVTNFAPAAAGSGIPEIKGYLNGVDTHGILLFRTLVGKIFGSIGSVGGGLALGKEGPLVHTGACIASLLGQGGSAKYHLSSRWVRIFESDRDRRDLVTCGCAAGVAAAFRAPVGGVLFALEEVTSWWRSHLMWRVFFTSAVVAVVVRSAMNWCKSGKCGHFGSGGFIIWDISGGQEDYSYQELLPMAIIGVIGGLLGALFNQLTLYITKWRRTYLHKKGKRVKFYCSKDNEYNDLATIFFNTQDDAIRNLFSAKTFHEYSAQSLITFLVMFYSLAVVTFGTAVPAGQFVPGIMIGSTYGRLVGMFVVKFYKKLNVEEGTYALLGAASFLGGSMRMTVSLCVIMVEITNNLKLLPLIMLVLLISKAVGDFFNEGLYEVQAQLRGIPLLDSRPKQVMRNMSAKDACKNQKVVSLPRVSRIVDIISVLRSNKHNGFPVVDRGQNGESLVIGLILRSHLLVLLQSKVDFQNSPFPCGPGILNRHNTSDFVKPASSKGKSIDDIHLTEDELGLYLDLAPFLNPSPYIVPEDMSLAKVYNLFRQLGLRHIFVVPRPSRVVGLITRQDLLLEENGNNVTTELQSTSVRGQLNGKMLSGSTHLGHPLLDSIVVEE

SEQ ID NO: 113705 - protein, 292 aa, Oryza sativa
  Clone ID: PAT_MRT4530_17467C.1.pep
MSQKRQLEESSGSRAEAWGPLAQPNLGLGARRRPTATGSPSIRWMITEVMQKSSIEKLFMAIEPLIRRMVKEEIESAFANHAIMMARTVMDVVPPTSKNFQLQFMTKLSLPIFTSSKIEGESSLSITIALVDTVTREVVASGDESLMKVEIVVLEGDFEDDSAIQQNIWIYWPSYSQTMQILGSGMSTKMWEVTVEHSKTCILTDKVHLYYPHSLIKTAVVFNVVGEVRGLISEKFVCADDLMEKDKAEAHAAVKQAYENWKNVSTDGFGLSQSSIPSADIGSLSTGNCRKQ

SEQ ID NO: 113706 - protein, 247 aa, Oryza sativa
  Clone ID: PAT_MRT4530_17468C.1.pep
MRSILSLCFHLALAIALAANVPDHIANGRVIEAKSDPKPADPNPKPDPTPKPQPETKPSPQPNPQPNPQPDPKPSPQPDPKPTPQPEPKQDPKPNPQPDPKPSPQPDPKPTPQPDPKQDPQPNPQPDPKPTPQPNPKQDPQPNPQPDPKPTPQPDPKQDPQPNPQPSPKADPKPNPKPKPQPEPSPNPKPEPKPEPKPEPSPNPKPNPNPKPEPQPDPKPEPKPQPEPSLPKPPPLSPAIAIIVPGN

SEQ ID NO: 113707 - protein, 50 aa, Oryza sativa
  Clone ID: PAT_MRT4530_17469C.1.pep
WGAGVSTLAGMRCDGGRRSGCAILRFLTVRPAGEGERMRCGRGCDAVQMV

SEQ ID NO: 113708 - protein, 228 aa, Oryza sativa
  Clone ID: PAT_MRT4530_1746C.1.pep
AAGIRTRTERIAFRYLTSQKYAGDVAQLGIIRAGNTMKVQTVLQPRKHLVPFHVEGGQPSYLIVAGLVFTPLTEPFIEEECEETLGLKLLAKARYSLSTFEGEQIVIVSQVLAHEVNIGYEHMGNQQVIKLNGTVVKNIHHLAHLVDNCKDKFLTFEFEDDFLVVLDREEATTASSDILKEHAIPSVRSSDLSEPYVDTEQEIQKPNDDFGDSPVTNYEMGVDCLLWA

SEQ ID NO: 113709 - protein, 37 aa, Oryza sativa
  Clone ID: PAT_MRT4530_17470C.1.pep
ITYPWEKEVGPTFELGFNVGVLLYMGHENNQRLHPFL

SEQ ID NO: 113710 - protein, 93 aa, Oryza sativa
  Clone ID: PAT_MRT4530_17471C.1.pep
MGKSTAIGPLTGRSRLLPPSGYGGAVEKVVEAQGEVKAASVMAAATTTTSCGDSATATATTSYNDNVTGRRHKHPLAKNLIFACECTTHMEKL

SEQ ID NO: 113711 - protein, 55 aa, Oryza sativa
  Clone ID: PAT_MRT4530_17472C.1.pep
TLAKVRCTPLNYNTRHNTPLNYLIQTLNPPATNFGWFYPFDPTWHIHVANDVAIT

SEQ ID NO: 113712 - protein, 48 aa, Oryza sativa
  Clone ID: PAT_MRT4530_17473C.1.pep
AQIISFTTRGKHASYQGVLPLRFLLWSISLSSLRSTNVVLHITLNLPG

SEQ ID NO: 113713 - protein, 89 aa, Oryza sativa
  Clone ID: PAT_MRT4530_17474C.1.pep
MQDAAREAFSDLALFTELSWRVPIDNFDEEALLEIDDQQRRVGQLETEVHGDQVQQLSDQCNDRRGMMDTLEEQLRESQEHVSQLEEQL

SEQ ID NO: 113714 - protein, 160 aa, Oryza sativa
  Clone ID: PAT_MRT4530_17475C.1.pep
MAGLHKTVGDDLARHRHLHRDMDSDQHDANEEVHNREKEERDLNEPPFPLFTFKFDAPPSSKEQITGNLNGAEINEDQPLVEPIDEMPLSQVDLLAVPCDKEELCDNASLISIPQLVNEHGISSVSLCADFKHVVHIANEVEERIGLICTGKINNPQRGV

SEQ ID NO: 113715 - protein, 649 aa, Oryza sativa
  Clone ID: PAT_MRT4530_17476C.1.pep
MEAAAPEIERCDAGDVESDHDGAAAAAERVPPWREQVTARGMVAALLIGFVYTVIIMKLALTTGIIPTLNVSAALLAFLALRGWTRAPALLLPGGGAASSSSRRRPFTRQENTVVQTCAVACYTMGFGGGFGSSLLALNRKTYELAGVSTPGNSPGSYKEPGVGWMTGFLFAISFVGLLNLLPLRKALIIDYKLTYPSGTATAVLINGFHTPQGENSAKKQVRGFLNCFGISLLWSFFQWFYTGGESCGFLQFPTFGLKAWKQTFYFDFSLTYVGAGMICSHLVNLSALFGAILSWGIMWPLISIQKALIMGDGLYHFIKVTGITAKSLHERSNRRHAKKATDEDTFVIADMQRDEFFNKDYIPNWLAYAGYALLSIVAVIAIPIMFQQVKWYYVVVAFVLAPVLGFSNAYGTGLTDMNMSYNYGKIALFIFAAWGGRDNGVIAGLVGCGIVKQLVQVSADLMHDFKTGHLTLTSPRSMLVGQAIGTAMGCIIAPLTFLLFYKAFDIGNPDGYWKAPYALIFRNMAILGVEGFSALPKHCLELSAGFFAFSVLINLMRDFLPRKYRDYVPLPTAMAVPFLVGANFAIDMCVGSLIVFAWHKINSKESALLVPAVASGFICGDGIWMFPSSLLSLAKVKPPICMKFTPGS

SEQ ID NO: 113716 - protein, 72 aa, Oryza sativa
  Clone ID: PAT_MRT4530_17477C.1.pep
QRGEKDMKPEQLMLLLPLLLRHPAAGTHLTELALVDFAGAEERSGGGRSGWGADDTLPLFPPSLWRKRVVYK

SEQ ID NO: 113717 - protein, 71 aa, Oryza sativa
  Clone ID: PAT_MRT4530_17478C.1.pep
VHSAYAQCLKTNNSAPSLKIKYPEFWGPYSEPISWAQITEGHLITCELPIHNSPSYAVPHYCRLDYNKNKK

SEQ ID NO: 113718 - protein, 101 aa, Oryza sativa
  Clone ID: PAT_MRT4530_17479C.1.pep
MRSMAMWLLQCRVLSGRLGPTATAGRLFRRAGRAAISRRRRQQLAAAAAAKNCTRSQLPTAGQVVADLSSRSRRFRASGARAGHRAVVNVNRRAAAATLGG

SEQ ID NO: 113719 - protein, 568 aa, Oryza sativa
  unsure (1)..(568): unsure at all Xaa locations
  Clone ID: PAT_MRT4530_1747C.1.pep
MPQGGSSSVVRPQRQFFNNNVGNNIRNQALRPVAAPTQQQPAKREQGSKPVVCFNCGDPGHYADKCPKPRRMKVVPTQSNSTVPASKARVNHVAAAEAQDAPDVILESKDLDVILGMDWLARHKGVIDCANRKVTLTSNDGRVVTVHALSSESLRSRLNQITLEEIPIVREYPDVFPDDLPGMPPKRDIEFRIDLVPGTTPIHKRPYRMAANELAEVKRHVDDLLQKGYIRPSSSPWGAPVIFVEKKDHTQRMCVDYRALNDVTIKNKYPLPRIDDLFDQLKGALVFSKIDLRSGYHQLRIKEEDIPKTAFTTRYGLFECTVMSFGLTNAPAFFMNLMNKSAVXWKYLDKFVVVFIDDILIYSRTKEEHEEHLRLALEKLREHQLYAKFSKCEFWLSEVKFLGHVISAGGVAVDPSNVESVTNWKQPKTVSEIRSFLGLAGYYRRFIENFSKIAKPMTRLLVTTGNNPTGVPYVRALILVPGGKAQHTQRQTTNSGRLGRRPQALDGRHELDTKAFILQELLFWVWEKLSKTEYNHRTQQDTPTSATRHIFLTCDHVPHTTTVYGRKT

SEQ ID NO: 113720 - protein, 78 aa, Oryza sativa
  Clone ID: PAT_MRT4530_17480C.1.pep
APPPQWGSSSLRLSMAARPATKLLCFVRTQTPEKRGGLDYLRRSQMIRLLCASFIFFFFLLFFSLNFPLRLRELGGVL

SEQ ID NO: 113721 - protein, 1029 aa, Oryza sativa
  Clone ID: PAT_MRT4530_17481C.1.pep
MAMEAAESDGRLARCPLKNMEREIHAHRRLLLHFAEMIQGHSAAIEQLEIVDGPASRSMHPFRKEMAKDLLVGELRVLERKTNALDFGEGEGGRDRGGRMLQRAASNAYSWWWASHIRTKQSKWLDSHLQDMEHRVKCMLLLLGEEADSFSKRAEMYYKRRPEVITQVEEVYRAYRGLADRYDIISGELHKANHTIATAFPDQVQYAMLEEEDDNIPKAFTPVDPRKIHKSTVDGLMKKKKGGEQPAGSMNKNTTSAPIDKDNAREEISRLQKEILVMQTEKEFIKSSYESGIAKYWDLEKQINDMQEQVCHFQDKFDESAVIEDDEARALMTATALKSCEDTIVKLQEQRKTSASQAMGESERVKVLREKLKAVMEGHGKSLPDSPDPCDKNVRKNHGFEMEEVQHIKLGEFETQTVLEKIKEHFERDGSISVAEITEHIDELVNKVVDLELMVSSQSSQIDRLCRENSELESCLQSLEEENVSDPDKVNEKLKKLEEELVRVQALESCFHKDESTIRSNFSEAISRLSGISEMLQSSEHGGVGGTLAVADGKEEEEDNDAGGIDDVAEPQVQTEAASDDVDPAGKSTADVDPAGKSTATQEEAQAVDVGQEKAGGCSRERGSLVRLRHISSDDLGGCDDEAPAAVDDPDGMRKQKKGQEGEGVEEEKKVILVAEYRALLEENKDAKRRLAEVEKTNQECMHEIRSLRELLSSGSSEAGAAAAGGGGGGGDSSGGRRGHRRTPSYSLGHHRKQSLSSISRMIRMGSTIHEGDESEKVKAEELRLPAVATSSSPLENKLRKDIDTLLEENLEFWMKFSSSLQRVQEFQRKHDELMQQLQPAATDGNSDTKQKQKQEQQLRALKTELQVWSEQNAMLRGELQCRFAALCDVQEEITAALEQGGGGGEFTSYQAAKFQGEVLNMQQENNRVSDELQAGQDHVKGLQAQIEKKLQHGGVTLPDADGPAAGAGAGATTPPPLPLTRVASKSKVPLQSFLFPAKAKKPSLLARVTPVLQKQQPDLRFLAKLQPR

SEQ ID NO: 113722 - protein, 928 aa, Oryza sativa
  Clone ID: PAT_MRT4530_17482C.1.pep
MGVTRAHIVKNDALEGMLGEFVGGGKGGGKAGRAAARHSSRLVAALTCLQLAFAIYATFLLYYMSPAVDLRAKPDFAWATRIAQHWKQLMAQPDGGGGGMAVSPEEVCEHESIDFEQKKSTDAVMIRLKRELYDEVRDFQRRSFGAETLPELLRMRSRWSAAAAAAGNQPRVTVILNHFKRRTLCAQLDTLRRQTVPFHRAWVLAFGSPNEAALRRIVGSYNDSRISFVSSGHDFKYYGRFQMALQSESDFVYVLDDDMIPGARMLEILTHVAGTDKYRNAVLGSIGRILPFRQKDFTFPSYRKFRSKEAGLYLPDPAYDIAVDRIVQVDFLSSSWFLAADLVKALFIEVPFTFMTGEDLHLSYQLQKYMGAGSFVLPVDAGDKETWGDSEHRLAYVAETTVIFKDIVQVRDEQWWRALTSGYVTQWAAMHPQKVDALFYAHSLGEVRALAPLLERFRTTAGRKAYLVVSGGGHCPCEEAAAVLKWPKVVCKERRFKIFDLAVGALSGPSHSDVPVLHAVYSSMRGIVRMHNPSVIVAVADVDSKIKDALRMAADAAVNRTALVLLPRNSISKVLWMANLRPTSLPNWNRMRISVNIITQNRAKSLRRLLASLRDAYYVGDEVPISFNMDSRVDAATLNVVNAFDWPHGGKTLRRRIIQGGLIRAVSESWYPATDDDYGLLLEDDIEVSPYYYLWIKYALLAYRYDPQVSLPELSSISLYTPRLVEVVKERPRWNATAFFGRSKNHHPNTPYLHQLPCSWGAVFFPKHWREFYAYMAARFTEDAKQNPVQIPRSRTNGWQASWKKFLIDMMYLRGYVALYPNFPDQSSFSTNHMEPGAHISAKGNVVKHDKRDFEVPLVADDFSPLLPAGRMPPASKLPVLNLFNQPVSFKALKAAGAKLRQDVIGCAATQLVAVDHVTGLPKNCTAF

SEQ ID NO: 113723 - protein, 169 aa, Oryza sativa
  unsure (1)..(169): unsure at all Xaa locations
  Clone ID: PAT_MRT4530_17483C.1.pep
YATSLPDDQRVDWIRRVLDTTTRGWTDTPRPVTTTRGWTDTPRPGTTTRGWTDTPRPGTTTRGWTDTPTPGXTTRGWTDTPTPATTTRGWTDTXTPGTTTRGWTDTPTPVTTTRGWTDTPRPGTTTRGWTDTPRPGTTTRGWTDTPCPGATTRGWTDTPRPDTTTRGWT

SEQ ID NO: 113724 - protein, 47 aa, Oryza sativa
  Clone ID: PAT_MRT4530_17484C.1.pep
NIITSISQFVINLSLCNNNLHHYHYSAYNSLDTYFIILYFMLSLSSI

SEQ ID NO: 113725 - protein, 85 aa, Oryza sativa
  Clone ID: PAT_MRT4530_17485C.1.pep
NGGVTDSWGILSACSPLNDGLTGQTGTTTRQGGGGARVEHELGCTEHAADLHFLFHCIFLAPPRIKGFNLQIYTLLSFSPAFSEG

SEQ ID NO: 113726 - protein, 96 aa, Oryza sativa
  unsure (1)..(96): unsure at all Xaa locations
  Clone ID: PAT_MRT4530_17486C.1.pep
KPSLGSFESRRTAAAVFPSLLFLKTSFWHPLGGDLVCVPLLVXWRSVTLXGGRSGARLLLGLCVGDVGVWVVFFFSFFXGYDPPGYNLVIFVLLYQ

SEQ ID NO: 113727 - protein, 105 aa, Oryza sativa
  unsure (1)..(105): unsure at all Xaa locations
  Clone ID: PAT_MRT4530_17487C.1.pep
KNGXXGVRXQXXPPXXPPCRAPRGPTPASXXSXXWLRRPRSAXASSTXPSNSPSSRRXNLTKRSGKCXSLKDRNXWRXLQRXDXXNSHCTPXSIRXLVXDCGPLF

SEQ ID NO: 113728 - protein, 389 aa, Oryza sativa
  Clone ID: PAT_MRT4530_17488C.1.pep
MPSAAGSRATPDHGNLLMLGIETSCDDTAAAVVRGDGEILSQVVSSQVVQKALDNANVSESDLSAVAVTVGPGLSLCLRVGVHKARKIAKSFHLPIVGVHHMEAQALVSRSTDDIPISSATKDDRQIRANIAASFQLLKVVSGGVASNQYVRTHLNQIAEKNGLQLVCPPPRLCTDNGVMIAWTGIEHFIAGRFDDPPAVDEPDDLQSQVTAFGTIVEGSVPDKKLDQSDNVCSVASPLGRVASPLFASKAAVFAVLHLEERCQRAVEWAWKMEPSIKYFVVSGGVASNQYVRTHLNQIAEKNGLQLVCPPPKLCTDNGVMIAWTGIEHFIAGRFDDPPAVDEPDDLQYDLRPRWPLGEEYSDGRCVARSMKTARVHPSLASMIQGSVH

SEQ ID NO: 113729 - protein, 186 aa, Oryza sativa
  unsure (1)..(186): unsure at all Xaa locations
  Clone ID: PAT_MRT4530_17489C.1.pep
GLDTILHYEQRDAYQTTGCYNLVCSGIVQTNSRIAMGAAISATFGYEGGQFVINLLVWKDANHGNWCLEFGNGELVVYWPSFLLSHLASHASMPHYAAEGANTMPHGVAHTETQMRSGFFTGEEFDGAMYFRNLDVVDXDNRLVPLVGGXHVTADHPEXYHIQGGVKDRCSNYCYYGVPRQNVKST

SEQ ID NO: 113730 - protein, 143 aa, Oryza sativa
  Clone ID: PAT_MRT4530_1748C.1.pep
MGSLMAGWDSPVLGDENRVLARRNKSLTREEVEAFWKQHGGEMMSGSPLGSPAAGGMARSAPVSRSKAHASSPRGGRIDPATRVEGFFPHDDAAAAESPSKSHDWWTRSNWAFLNEPPQEEIAGKAQNYAPQFHVARIATGNA

SEQ ID NO: 113731 - protein, 252 aa, Oryza sativa
  unsure (1)..(252): unsure at all Xaa locations
  Clone ID: PAT_MRT4530_17490C.1.pep
HASAHASGWNGGHSFPHLIAAGLLLRRLLAPAPSPPVRSPTFRSLSTMPSAAGSRATPDHGNLLMLGIETSCDDTAAAVVRGDGEILSQVVSSQEDLLVRWGGVAPKMAEEAHLLAIDRVVQKALDNANVSESDLSAVAVTVGPGLSLCLRVGVHKARKIAKSFHLPTVGVHHMEAQALVSRFXMRQHKDCNFSYAGLKTQVRLAIESRNISADDIPISSATKDDRQIRANIAASFQXVAVLHLGERCQRAV

SEQ ID NO: 113732 - protein, 444 aa, Oryza sativa
  Clone ID: PAT_MRT4530_17491C.1.pep
MAATLLPTLSPPAPRAAAALLLRRAPPFPSPLPAPLLRRLLAPAPSPPLRSSPTFRSLATMPSAAAAADLLMLGIETSCDDTAAAVVRGDGEILSQVVSSQVRYYTMPPASLFSPLTLCFCIIGHAMLCALLIVLFCAYNIWKEDLLVRWGGVAPKMAEEAHSLAIDQVVQKALDDANVSENDLSAVAVTVGPGLSLCLRVGVHKARKIAKSFRLPIVGVHHMEAHALVSSSIDVRLVNKDLDFPFLALLISGGHNLLVLAHGLGQYVQLGTTIDDAIGEAYDKSARWLGLDMRKGGGPALEQLALEGDPNAVKFSVPMRQHKDCNFSYAGLKTQVRLAIESRNISTDDIPISSATKDDRQIRANIAASFQLLKVVSGGVASNQYVRTHLNQIAEKNGLQLVCPPPKLCTDNGVMIAWTGIEHFIAGRFDDPPAVDEPDDMQGT

SEQ ID NO: 113733 - protein, 69 aa, Oryza sativa
  Clone ID: PAT_MRT4530_17492C.1.pep
AVGGNHYSSVRFLSTMPGVEEVAKHQLVSARVNDGDLSVCKVQAGHKRWFKASSKFVDSPTSSFSVACS

SEQ ID NO: 113734 - protein, 306 aa, Oryza sativa
  Clone ID: PAT_MRT4530_17493C.1.pep
MEGEGIGRRGLPSLLGSSSSESGGIGQEHIASDITQVEMIEDAEEKGLITPGVTTLVEPTSGNLGLGLVLVALRKGYRFVAVMPGQYSFDKQILLKYMGAELFLSDPTLGFQGLVDKVEQLKKELPNVHVLNQFSNPANQEAHMRLTGPEIWKDTAGKVDIFVTGSGSGGTVSGVGKYLKLQNPAVKIICVEPAESPVISGGEPGKHKIQGIGPGLIPDMLDTSVIDEVVTVNTDEAMVNARRLAMEEGLLMGISSGANLAACLKVASREENKGKMIVTMFPSGGERYMNSDLFAAVREECNAMTF

SEQ ID NO: 113735 - protein, 102 aa, Oryza sativa
  Clone ID: PAT_MRT4530_17494C.1.pep
MNSEPQSPHILKYKALPYLNVDTDVALDVPVPNEEEERNMKRASPGAPLAGTLSVYQNATGKICGVWRRVPRDYKRILRDDRLPVVLLWGNKQQAELALAGK

SEQ ID NO: 113736 - protein, 64 aa, Oryza sativa
  Clone ID: PAT_MRT4530_17495C.1.pep
HGYPCYGLPKIKNLHNVKITMMQVTTRETVRGTREPVKPPRLDVIIVDQGWMHTHSECFCYMSR

SEQ ID NO: 113737 - protein, 822 aa, Oryza sativa
  Clone ID: PAT_MRT4530_17496C.1.pep
MSPPHLLLLLLALLLSPPLLLASSSFPLPTIAIAAVSNSSSNPSKQHLACGLVPAAGGAAAGYRISCASVSNRSAAAPHVYAYGGDGTCSPYSAVVAGDGYLCSAAPTSSPPMSMRWWDLNEAGDGSKRVYRGRVLSAVSGGGESVCGLVGERMQCWRCPWGEGAPARVGFSAVAVGGGFVCGLVVGSGEVRCYGGGEVVGREPAGRRFMLLAAGERHACGVDDGGVVGCWGEAAAVAAASPPRISRAVSTVAVGDAVTCVLWGNWTVSCWPEGEASPPPALAGQQFVALEAKGKVVCGVLMSDYSLQCWGAGVAGGVRKVFDKVLPGPCAPSKSCSCGVWSGSAQLCAGSGGGGGGDVSVCYPCGYTPPPMALSPTSNSSSSSSSQSKGKRRPSNLAIALISAGAGSALVALLAALAAVYYLRRHRGSSSPVSGRIHAEPTGTAPRVERRLSALLSKGPNTTVEQFPLVALRAATDCFSPAKRIGSGSFGAVYRASLPDGREVAIKRAERRDTGGPSSSSAAAARRVDHEAAFVSELALLSRVNHKNLVRLLGFCADGGERILVYEFMPNGTLHDHLHRRAASAAAPLSPPLASWPSRLRLALGAARGIEYMHTYAVPPIIHRDIKSSNILLDSCWTAKVSDFGLSLLNTLDGDNAAAGDGGNAGDGDDEERCVTAGTVGYMDPEYYRLQHLTDKSDVYSFGVVLLELLSGCKAIQKYEGSGSPKNVVDMAVPHIEGDRVHRVLDARLPLPTPWEMEAVAYVGYLAADCVRLAGRDRPTMSEVVGVLERAVAACDEYEEGGAGAGGEPALSRSCTDGSTAT

SEQ ID NO: 113738 - protein, 105 aa, Oryza sativa
  Clone ID: PAT_MRT4530_17497C.1.pep
MACFGFDLSARARGIGDVYHPFNETAVREKFKEWIRQFDTDGDGRISRDELRRAMRAVGVRFTGIKCRRGMSHADADGDGYIDDSEIDGLIEYWGRRLGLGVAAY

SEQ ID NO: 113739 - protein, 27 aa, Oryza sativa
  Clone ID: PAT_MRT4530_17498C.1.pep
DCIYSMGGVYYKRTPIGPQSTTFLINR

SEQ ID NO: 113740 - protein, 238 aa, Oryza sativa
  Clone ID: PAT_MRT4530_17499C.1.pep
WIPGLHESARGLIIAIVEEFVSRQSDTGKMKFQDDDEIVEVENLTPVSSTSNLAVANLIDGYLAEIAKDTNLPLSKFIAIAEMVPPASRKNHDGLYRAIDMYLRARPSLSKSEKKALCRLMDCKKLSQDACLHAVQNERLPLRVVVQVLFFEQIRASAASGRTDAAAELTSAVHSLLPRENGNSYGSSRSAATTTTEEDGTGVPTSSDINSFRSLRLANNSGGSEREQWQQRHQQQEL

SEQ ID NO: 113741 - protein, 1048 aa, Oryza sativa
  unsure (1)..(1048): unsure at all Xaa locations
  Clone ID: PAT_MRT4530_1749C.1.pep
TPPNSKLSIEAPRGPALSVPHSPGGADMDLADIAQSLAPIKTTIAPPPPRIPPHPAVPARIKEGEIIPRVSLPRFPRFPLSLSLGSVRIHPVILAGDIYGARDPRAXFPSSPAAFSPSRCYIIAPRAPLFRFXRRSPLALAVGSVLAPCSSLSAVAADLRFAADVAPVLRPTRRHLHPLRRIAVDLVRASVSLADRRSAAVIVIPSRAAAFLHSVRRLRRXSCLGVSRGPXPFRFPLLSALSGAAPPRRWSPAVTIGARARRSRRPCRRGRLRARPRGCQVGPAVSRPRPRVRLTRGTHGADRRQPRAPGPPWTERLTRGPHFPWTRANEGYTSCGPMADNEKGNKVRSQDIGTSSSRVDEAPDTSCVTLVQHLINQNRLLIEILQQHQTPILNLSQTQPQVQLEAVQALTPQVSMPPASRRTHGDVPHVDPKGASNICFMCDEQGHYARERPQQKRKTPMRTEDEVRKMIITSTEWPPPGMTRRQRRNTFRGAPQLTEHLLANGGRVSDSEDSDQVSSDDEDEMERKACSRCGEIGHVASSCATICVHCEEDHPPDRCPTSRITCFFCEGTDHVPKDCQFSFLLTKKMANQPASSNGEKHQGNTNPRQDYSFSLTPVPGQRNQNEKRKCRVREDICCFNCQGMGHFADKCPKPRNIAAGTSVHAAPCNQKLAPQRIVIHASQSSPMARVATAPTPASALPQGVNAHFQPQQRIVVDGRSCVSPRPTPGQAKGDTKQKTVIRFNQQSEGSFSCEEKIPSATGGQAKQFRKVKICWKFVKTQRKKRARPPLSLTGGAHLSSPSSRRARRRARALAPPPPRIAPHPAVPARIKERGITPRVSLSRFPLFSLSLSLGFVRIHPAKFAGVFNGARDLRARFPLSPAALSPSRCYIFDPRASLFRFRRSPLALAVGFVLAPCSSLSAVAVDLRFAADVAPVLRPTRRHPHRLRRVVADPVRRSASPADCRSTVALGIPNRAVAFLRSGSPPPSLRSSSRLGATSLGIAASPSTSSAPPFRSPTVGAPPSSSSRAAPPSFSAPSAVSAAFAASG

SEQ ID NO: 113742 - protein, 647 aa, Oryza sativa
  Clone ID: PAT_MRT4530_174C.1.pep
MAADLQTFGALLKYPKVEGPIRKNASAPASACSSPHRRGDPLDADERRLARGGSRSAEFGAEALILAEGEQASRRVMQGSILVKTESDSPGNAEICAKRSVLMERYVIGRQLGQGTFGKVYYARNLSSGQSVAIKMIDKEKILKVGLMEQIKREISIMRLVRHPNVLQLFEVMATKSNIYFALEYAKGGELFHKMARAKLNEESARNYFQQLISAMDYCHSRGVYHRDLKPENLLLDENETLKVSDFGLSALAESRRQDGLLHTACGTPAYVAPEVLSRKGYSGSKADVWSCGVILFVLVANYLPFHDRNIIQMYRKIAKAEYRCPRHFSAELKELLYGILDPDPSTRMSISRIKRSAWYRKPIAISALNNETGKKSCTSEAPFSGPTICISSERNQEPPNLHNLNAFDIISLSTGFDLSGLFGERYGRRESLFTSRKPAAAVLVKLKELAKALNLKVTKTDNGVLKLATTKEGRKGRLELDAEVSEVAPFLLVELKKTNGDTLEYQRMMKEDIRPSLKDIIWTWQGNSIELPNDELTVQCSEGEVQKQSRLPSIKNFLDRVTVTYSTSRTSWSWTHGHGNCSKNASKNGIKGEAYNADCVSRRSIEVCAKLLEPDDQMTKLIDRLDRRRCKLIDRFRPKERLEMTD

SEQ ID NO: 113743 - protein, 270 aa, Oryza sativa
  Clone ID: PAT_MRT4530_17500C.1.pep
MAAAGDGCGDGGGSGGRARRRRWGMGAASSMGDGCGGGGGGGDGGRARQRRGTATAADHTVYTLYIKTGNPSRPGPSKCGIRAWIQARLLGCIPCRPCRSTSLVNAFVFGQANTRHSSRASLQEKLKREVPGGKMADCCVFLRWPLTLPSLLGYRSLDNSKLPIPAAPREAVRKEESKATLFVDVAILFLSVLCANVLGWMRPSHGGKRRWSRERNGERHAAGGAGVRVLCRHADTADTSMVPTAWYIVPVTPVPDTCDTWYPILVIPGT

SEQ ID NO: 113744 - protein, 112 aa, Oryza sativa
  Clone ID: PAT_MRT4530_17501C.1.pep
MAAENTNTSTARSMALPIPLARPPPLATVARPHPPQDAVQARDGVRRTDPKTPGTAWDAAKQARLDPCPNAAFAGTWPGWVAGFDVQCVYSMVCWMMTVCLNFEEPSPSLVL

SEQ ID NO: 113745 - protein, 55 aa, Oryza sativa
  Clone ID: PAT_MRT4530_17502C.1.pep
RKGLLIQYKHGGYLAGSICTKIKTPKPHMAIMPILASSWLGHFPRALFGQTGIIF

SEQ ID NO: 113746 - protein, 112 aa, Oryza sativa
  unsure (1)..(112): unsure at all Xaa locations
  Clone ID: PAT_MRT4530_17503C.1.pep
FSTPAILDLPGALMLHILSFLTDVRSRHRVALACGRMRAVDRPTRPELSVWGDPRTTGVLLLAHAFRFPALEHLDLSLVXPWGHPLIFSVPPCGGGGGGAPSVSSSSGMNVY

SEQ ID NO: 113747 - protein, 94 aa, Oryza sativa
  Clone ID: PAT_MRT4530_17504C.1.pep
MDDDIDSSCSTPFASAPSSPGRSPATGGGYFFSAPASPIHHLLLSSSSVASGVGSGAVYCGVGDAEFEFGGPGGPMISADELFHNGQIRALTLA

SEQ ID NO: 113748 - protein, 63 aa, Oryza sativa
  Clone ID: PAT_MRT4530_17505C.1.pep
EFEIHTSAAAAVAAMASTINVASATSRFLLAIGNCVMTGYSASPVSFSTNMVERSDRAVSCQL

SEQ ID NO: 113749 - protein, 158 aa, Oryza sativa
  Clone ID: PAT_MRT4530_17506C.1.pep
MDLAPGRRARLLVALALVVLVALAARSGAEVITLTEETFSDKITEVDRARRVQIKEKDTVWFVKFCVPWCKHCKNLGTLWEDLGKVMEGADEIEIGQVDCGVSKPVCSKVDIHSYPTFKVFYEGEEVAKYKGPRNVESLKNFVSDEAEKAGEAKLQDS

SEQ ID NO: 113750 - protein, 55 aa, Oryza sativa
  Clone ID: PAT_MRT4530_17507C.1.pep
PTRSGIAFYVSSTEDDELCLSNQGLIICNMPCGFRMHHPDKITADGQSYAPYYDC

SEQ ID NO: 113751 - protein, 37 aa, Oryza sativa
  Clone ID: PAT_MRT4530_17508C.1.pep
GLLLNMCACYVLSLLGEKDSDESVSGDGMFLLIKHIP

SEQ ID NO: 113752 - protein, 139 aa, Oryza sativa
  Clone ID: PAT_MRT4530_17509C.1.pep
PLSPGGSVRISPSADVRREPSAEGSMAAVSWPPRGRRSGLGDGVSCAAGTHLSLAIFLASATTAPPRRTTSLMVAAQEQARVSRSLHPLPLPPTLARWRARWCRRPCSPFLAGHEVGWQIGRRGRQPRRRLHTSAVERI

SEQ ID NO: 113753 - protein, 55 aa, Oryza sativa
  Clone ID: PAT_MRT4530_1750C.1.pep
ARTIRLVEGARTNGVMVCPRKVDLTNIDKRKGYERGVAGVERRGLATPAHTGQEA

SEQ ID NO: 113754 - protein, 61 aa, Oryza sativa
  unsure (1)..(61): unsure at all Xaa locations
  Clone ID: PAT_MRT4530_17510C.1.pep
YFIGKGLMGSIKYIQGSQVISRCNXQYTEGPHTTLVRSFHIGFQFPKPGAIPPNNTKALWH

SEQ ID NO: 113755 - protein, 247 aa, Oryza sativa
  unsure (1)..(247): unsure at all Xaa locations
  Clone ID: PAT_MRT4530_17511C.1.pep
GGEVGTGVHRGEAGRRCAGRQHLEDDSXEQAEEGGDRRGCGEAGRVVGVIPQPPPSSSFEPLPPEYDEPSHTRCCDDHLWPDDDRRAPLPFPDTCSLEFCAAAERSAARLLPLGALAASPPRALAGIAARLDSLPSAVPSSRRLELRRARWGGRDGRRAPRTLKMTTASSGMRADLPMARERGVRGGHFVALATSLPSAATGEHGAITPAPPCPPPAPAPPLPAAPAAALAARPRAAAAAHCPLTHA

SEQ ID NO: 113756 - protein, 24 aa, Oryza sativa
  Clone ID: PAT_MRT4530_17512C.1.pep
NYIILVSTTSSSSASRSIHSLCAA

SEQ ID NO: 113757 - protein, 690 aa, Oryza sativa
  Clone ID: PAT_MRT4530_17513C.1.pep
MAGLIVLRRERLERRRRRRLGDDSDDSPGLPAPSPVSSLLSPLPGLLTSFLSARPARAPPGPPPPRPHAVVLKMLPAGATTARLSAMDAGAHLSPIPSTSLRAAVRADRRPAPARRCPSHPLTGARLSAMACRRARRCLLLADEERERVYDILQCTSAHVLANRRAAMAMNFEMWGAVWSALASLVFLWPMLQNHVPAGLRHWLTAMADKLASHLSPYLHITISEYGDHRFRRSDFFLAVEAYLSHACARRARRLKADLGRDARSVQVSVDDHQEVTDSFRGATLWWYPSSMSNKSSVISFYPGEDERRLYRLVFHRRHRDLVLDGYLPHVLAEGRAVTVRNRQRRLFTNNASTSWNPYRRGKGVWSHVPFEHPASFDTLAMDPGDKDAIVVDLVAFRDGKDYYAKVGKPWKRGYLLYGPPGTGKSTMIAAMANFLDYDVYDLELTAVKNNTELRKLYIETTGKSIIVIEDIDCSIDLTGKRKKSSGDNKASDGGGEGSDDKPKLPTEADKDDGGSKVTLSGLLNFIDGLWSACGGERIIIFTTNHKEKLDPALIRRGRMDVHIEMSYCGFEAFKVLASNYLGVEQHELLGDIRRLLEEADMSPADVAENLMPMSKRKKRDPDACLAGLVEALNMAKEEAQANKAAKEDEEAKAAKGIEEMKTKEQATTNGEDEGKDKRTSEENKANGDI

SEQ ID NO: 113758 - protein, 96 aa, Oryza sativa
  Clone ID: PAT_MRT4530_17514C.1.pep
LNYLVTLSIISLDMAALNGKVVVAVMVVAMVAHSLPSHPSAGFSAFPSFEAPTPEARVAVAAESSTASPDHPPHCGTSPAWFVTKAHAITSSPVLG

SEQ ID NO: 113759 - protein, 63 aa, Oryza sativa
  Clone ID: PAT_MRT4530_17515C.1.pep
GPGKNWWGRTPTKGGAALFTGIMPGLGFLKKINLLFGPNGSGLKGQPPPLMPIKLSFFVWGVY

SEQ ID NO: 113760 - protein, 166 aa, Oryza sativa
  Clone ID: PAT_MRT4530_17516C.1.pep
MSYRSLLHKRILPAAAAAATAAAGAALRRPAAGSRLLQARLHQATQQQCISDAGFRDSEKDIDREIEQLAQKFEENSKRWKQEREELDNLRRVEEGPAPVAGGTCTHSILGDLPAARKQARRAVEIKHSPIELMSQAEMIVLGGPELVMINIIATQIFGRNREKAK

SEQ ID NO: 113761 - protein, 41 aa, Oryza sativa
  Clone ID: PAT_MRT4530_17517C.1.pep
MHTRVASYCRTPRRLLNPGQMRAGTRDLAMGIGSTAVPEFV

SEQ ID NO: 113762 - protein, 87 aa, Oryza sativa
  Clone ID: PAT_MRT4530_17518C.1.pep
LGFPIFFFWQNISIGTVFSIKSASQNFFFWPPPPPLSLKKEYLFMQVILGAPVYFYFSQLPKKKKKKKKKKKKKKKKTQPKKKKKKK

SEQ ID NO: 113763 - protein, 47 aa, Oryza sativa
  Clone ID: PAT_MRT4530_17519C.1.pep
FFFFCKNEYFHPPGGGVLGIVLPQKGPNYYDRLLDNHRYGSRYSKTH

SEQ ID NO: 113764 - protein, 291 aa, Oryza sativa
  Clone ID: PAT_MRT4530_1751C.1.pep
MVRKANGKWRMCVDFTDLNKACPKDHFPLPRIDQLVDSTTGCELLNFLDAYSGYHQISMANKDEEKTTFITPFVTTGINPTGVPYVRVLFLVPGGKALDGRHELDTKAFNFQGLLFWVWEKLSKTEYNHRRGYSNRLYSDQRRPRRRSGGRRRARAPMVAGGGHRHGGAAAEKGEGKGETKRRSTAHPGSTATTETATGAEEGGGAARVDGVDGVPADGDRNGGVDEVGENAAKPKEAAPRWEVVRGDNGGGPELGGDGGERERRRELDSGEEEGRRVAETDGGGAGRVYI

SEQ ID NO: 113765 - protein, 85 aa, Oryza sativa
  Clone ID: PAT_MRT4530_17520C.1.pep
GGKTKAKPQNGQIIATPQPIIGLKKKGEEKPPPLTKRDRAPQPGGIFSPLRGTDPHPEINSTNLSKAPPPGGGNQKNFQRPPPPE

SEQ ID NO: 113766 - protein, 129 aa, Oryza sativa
  Clone ID: PAT_MRT4530_17521C.1.pep
SSDRSRSRGLGLEAAMGNRSAGVWSRDGATGDGRLSTVSRRDGRGAGLSPAASHPHEVTGRPGRRTLAARCADAAMGAGRPSTAARRDGRRATGGRGAGRSPAASHRPGSGRDRSRALFQFFFRSIPRA

SEQ ID NO: 113767 - protein, 502 aa, Oryza sativa
  Clone ID: PAT_MRT4530_17522C.1.pep
MVALSYALLLLLGVPRAGSSRGALTDGGRGWGDGRRMAPRLTQWKALHDCPHLAGGMKWGRRKMRTGRKMMNRRIIAKKMIRENDAVRNGDLERAKARVTEGANLDTLIQKLPGCSSRDLIDQLTVEFCYLNSKANRKKLAWALFNVPRTSLELLTYYSRLVATLSTYMKDLPSITLSMLEDEFNFLINKKPSSSDCSTAGLSHYHEDFAVAVVDEVLEEIRVGLELNDYSMQQQRLAHMQFFGELYNYEHIGSSIIFQTLYLIIVFGHKTPEPLGYKFNISGEELDLFAHLGSNMTRYSSMEELSVALIELEANGYVASAEKCGNEWHSGSKEQTKQSDYVSFDANHKSSRDRIDENGNDNEELADGHEDTDFPSEGRSDGRSEEDDNGDDNMPVGFDDEEIPQMTMAMITCLLVLMMKKLFMLKKRMSKDLRATELENGGENASVSINDGDGGKVCIKVLVKKGHKQQIKEMFIPGDCSLVQSTKQQEAAELEEKQSIKN

SEQ ID NO: 113768 - protein, 44 aa, Oryza sativa
  Clone ID: PAT_MRT4530_17524C.1.pep
MEVERSEIERTRKGSATFAKAANGVSEREKRDDPLCFFQVPNRS

SEQ ID NO: 113769 - protein, 239 aa, Oryza sativa
  Clone ID: PAT_MRT4530_17525C.1.pep
PRVRPRVRIFKTTTGTPFLFPTTGTGAWESALTNTLSPGDKIVSFLIGQFSLLWIDQQQRLNFNVDVVESDWGYGADLAALDYKLRQDPSHSIKALEASKTAKSVRVFFDWKDYLKFYKMGTYWPYTPSIQLLYGLRTALDLIFEEGLENVIKRHNRLGTATRLAVEAWGLKNCTQKEEWFSDTVTAVVVPPYIDSAEIVKHAWKRYNLSLGLSLNKVAGKVFRIGHLGHLNELQLMGA

SEQ ID NO: 113770 - protein, 402 aa, Oryza sativa
  Clone ID: PAT_MRT4530_17526C.1.pep
MADYVYGPGRNHLFVPGPVNIPDQVIRAMSRQNEDYRSPAVPALTKTLLEDVKQIFKTTTGTPFLFPTTGTGAWESALTNTLSPGDKIVSFLIGQFSLLWIDQQQRLNFNVDVVESDWGYGADLAALDYKLRQDPSHSIKAICIVHNETATGVTNDLSAVRKILDKHRHPALLLVDGVSSICALDFRMDEWGVDVALTGSQKALSLPTGLGIVCASPKALEASKTAKSVRVFFDWKDYLKFYKMGTYWPYTPSIQLLYGLRTALDLIFEEGLENVIKRHNRLGTATRLAVEAWGLKNCTQKEEWFSDTVTAVVVPPYIDSAEIVKHAWKRYNLSLGLGLNKVAGKVFRIGHLGHLNELQLMGALSGVEMVLKDIGYPVKLGSGVAAAAAYLSNSTPLIPSRI

SEQ ID NO: 113771 - protein, 96 aa, Oryza sativa
  unsure (1)..(96): unsure at all Xaa locations
  Clone ID: PAT_MRT4530_17527C.1.pep
TPVRRTXFQRQPSKXGPPFRANQTLGFQPVQXLPRPCPDEDAQPVNISAGDAGWPQVNFNLTREEEGRSLRRVEECVKCTCKLSSSWEMNLKTCSF

SEQ ID NO: 113772 - protein, 127 aa, Oryza sativa
  Clone ID: PAT_MRT4530_17528C.1.pep
ALLAILLGIIIPAPVPCIGGAGEPPPRAQQPPRGQTQPESARVWWARTPGEYRARLGGEHRRGPQEGGGGAGYEPVHRCPRRRLQGSSIAPPAPPVGRRPTWLRRRRNCGCSGWRGSGFCRVNHLVD

SEQ ID NO: 113773 - protein, 51 aa, Oryza sativa
  Clone ID: PAT_MRT4530_17529C.1.pep
MRNGHHTPPLRPQPPPQLPRRPRRLPPHHHHPLPPPQPPVRTPPPGKTPPA

SEQ ID NO: 113774 - protein, 80 aa, Oryza sativa
  Clone ID: PAT_MRT4530_1752C.1.pep
MAGLTSSTYSTTTRVIRHRPAGGVIGVRAHPPHLHARAPLVSPARCRDDSNAASEPQEAMNWDLEDSLLYLIQIKNPNSS

SEQ ID NO: 113775 - protein, 133 aa, Oryza sativa
  Clone ID: PAT_MRT4530_17530C.1.pep
KKKKKKKKKKKKKKKKLKKKEKKKKKKKKKKKKKKGGGGEKKKKKKKKKKKKKKKKGGPLLKEPNLPPPPFKVKIFFKGPQKKKNCPGFKNLGPGKTPGFPNFISLEQIPFFPIGVNTKRPPPIPFPKNWPPL

SEQ ID NO: 113776 - protein, 82 aa, Oryza sativa
  Clone ID: PAT_MRT4530_17531C.1.pep
MEGRRLDGGNGGYDKIEEAGFEIRATSGGFPRQQRLAGGPSATAWVPGSSGGDRTMGRQRGLCTLKKWLKLLSLPPSPLPAA

SEQ ID NO: 113777 - protein, 55 aa, Oryza sativa
  Clone ID: PAT_MRT4530_17532C.1.pep
RHIGAHHRFSHSWKGLLHGSMSDFTPTFLLAFGLRQANVTNTRLVIRSWITRRAF

SEQ ID NO: 113778 - protein, 80 aa, Oryza sativa
  Clone ID: PAT_MRT4530_17533C.1.pep
LSPYLERIQSTVWCHSQNHSGEYHVELHLNSTKMLYLAGKQEAFLLELLYVGYNHADVLATLAMALISLGDHLLKKGPIT

SEQ ID NO: 113779 - protein, 825 aa, Oryza sativa
  unsure (1)..(825): unsure at all Xaa locations
  Clone ID: PAT_MRT4530_17534C.1.pep
SSYIKTGYMETLSSVTNIVVGKLFALLEKKYEQWRGLEDSIGFIKRELRVIHGFLHDQLPRDRNGEDPPISAVQATCIDELRDLAHDIEDCLDRFLPCAACERDSSFLRRLAADSRFAGEVERLKSRLEEAHERRAXTASTASPAPPPSCGLVGINVPRQELLDLLLLEDVEGRPERMRVISIVGFGGSGKTTLARAVYDCPDIAGQFDGRAWVVASKHRDDTMGLLSALLGQIRQEDDQRFNQIPQDDEQRFQLQSQVQADIISIIPARYLLVFDDIEEKQWNCIKSTFPTETRSRVLVTTTIKPVANACSHGTGSVYNMRTLNVNHSKDLLQSVLKEYSPELELDLPSILEKCDGLPLALCCNLGHHIEKEHAFAELRQVLANNYNTLPGHPLKTCLLYTTVFPNGCSIRRSSLIRRWLAEGYVQCQYPRSSLEVADANLEELMDRNIIRSMDVTNNGRAKNCRAHGIMHEFMLHKSRCDNFIASLHDPDRSKCRHLFLTQSLTSGNQSYMDCGTNPKGKQPRARSLTIFGNAGEFALDYAKCELLRVLDLEECDDLKDDHVKYIYKLLHLKYLGLGSTITYIPRKINKGLHCLQTLDLRKTRINTLPVEIIIMPHLAHLFGKIKIREFTQAGMDTTGAHSLSLRSRKFPNRLLCCLEKSYGYLSSLKLQGELSRFPQFITSLCGLTELCLSSTNLNKEDLSNVCTLHHLLYLKLVESDLQGFIIKNGDFPRMRHLCLVVQNPNLPTVEKGALPHLLSLQLLCKDLVGLSEIKIEYHDYLEEVALDSMVNIETIEGISAWCAAGGRRRWERRRPWSGAASLDI

SEQ ID NO: 113780 - protein, 976 aa, Oryza sativa
  Clone ID: PAT_MRT4530_17535C.1.pep
METLSSVTNIVVGKLFALLEKKYEQWRGLEDSIGFIKRELRVIHGFLHDQLPRDRNGEDPPISAVQATCIDELRDLAHDIEDCLDRFLPCAACERDSSFLRRLAADSRFAGEVERLKSRLEEAHERRANYGVNGVAGSAAAAGGSSSGSANTTDYMAQSCGLVGINVPRQELLDLLLLEDVEGRPERMRVISIVGFGGSGKTTLARAVYDCPDIAGQFDGRAWVVASKHRDDTMGLLSALLGQIRQEDDQRFNQIPQDDEQRFQLQSQVQADIRQHLNAKRYLLVFDDIEEKQWNCIKSTFPTETRSRVLVTTTIKPVANACSHGTGSVYNMRTLNVNHSKDLLQSVLKEYSPELELDLPSILEKCDGLPLALVSVGNFLWRERITECYRNQVCCNLGHHIEKEHAFAELRQVLANNYNTLPGHPLKTCLLYTTVFPNGCSIRRSSLIRRWLAEGYVQCQYPRSSLEVADANLEELMDRNIIRSMDVTNNGRAKNCRAHGIMHEFMLHKSRCDNFIASLHDPDRSKCRHLFLTQSLTSGNQSYMDCGTNPKGKQPRARSLTIFGNAGEFALDYAKCELLRVLDLEECDDLKDDHVKYIYKLLHLKYLGLGSTITYIPRKINKGLHCLQTLDLRKTRINTLPVEIIIMPHLAHLFGKIKIREARGLWVLETNKIEKILSDKSKLQTLAGFVVDKNSLFPRLMVHMNKLRKVKIWCEPAAERNSSISLISAAIQKFTQAGMDTTGAHSLSLRSRKFPNRLLCCLEKSYGYLSSLKLQGELSRFPQFITSLCGLTELCLSSTNLNKEDLSNVCTLHHLLYLKLVESDLQGFIIKNGDFPRMRHLCLVVQNPNLPTVEKGALPHLLSLQLLCKDLVGLSEIKIEYHDYLEEVALDSMVNIETIEIWENEAKKHPNRPKVLFRKRVDPTDAQSTAKYAATERPVPETGCPAVIKKRKFHAIQSYYNESVETKKSLRCCSGV

SEQ ID NO: 113781 - protein, 1379 aa, Oryza sativa
  Clone ID: PAT_MRT4530_17536C.1.pep
MEFSLLLSALPLWTFMKKVKADFLFEDLCMQIGGIGKVTEQMLRQVLGISTCQEMLQKASFLCALFSESSADFFISVGLGLGGTETPEQRLRKSISCERTFRATDDCSMLFEKLDSLADNLADDMQKECLKGRTLTLKLKTAAFEVRTRAVTTQNYINSKEDILIYARKLLKAELPLSLRLMGLRMSQLRDEKDDSSTQTQKTLDRFFRTPDNSNVIGANSPSIGNTTGGDNYCTNVMTKVDYLEHDSMDDQALFLHEKNLFVPEGRSSDNYNNDAASSNPLMCDGVGGKELDDDSSSSKGTHTVKFDGQLTSSNATTSSSKPDQLFWINGYICSICGFELPPGFEEERQEHSDFHLAEMLQQEEAVDSTGPLSKERLAERPCSSTPTPKKKLKSSKEGKHIPIDAFFHKEKLQVAALPSKATLEFEHGVSLRSAYIVPEDVQAAGFQIDADELASIVESRDTKKLTVHGQLNGIADKLGTSLTNGIVTDKDLLNQRQDIYGVNKFAETEIRSFWEFVWEALEDTTLIILSACAIFSLVVGITTEGWPQGAHDGVGIVASILLVVSVTGTSNYQQSLQFRDLDKEKRKILVQVTRNGLRQRVLIDDLLPGDAVHLAVGDQVPADGLFISGFSVLVDESSLTGESEPVFVNEDNPYLLSGTKVLDGSCKMLVTAVGMRTQWGKLMAVLTDGGDDETPLQTRLNGVANTIGKIGLFFAVLTFIVLSQGIIGQKYLDGLLLSWSGDDVLEILDHFAVAVTIVVVAVPEGLPLAVTLSLAFAMKKMMNDKALVRQLAACETMGSATVICSDKTGTLTTNRMTVVKACICGNTIQVNNPQTPNMSSNFPEVAVETLLESIFNNTSGEVVTNQDGKYQILGTPTETALLEFALLLDGDCKEKQLGSKIVKVEPFNSTKKRMSTILELPGGGYRAHCKGASEIVLAACDKFIDERGCIVPLDDKTSSKLNDIIKAFSSEALRTLCLAYREMEEGFSTQEQIPLQGYTCIGIVGIKDPVRPGVRQSVATCRSAGISVRMITGDNIDTAKAIARECGILTKDGIAIEGAEFREKSAEELHDLIPKMQVLARSSPLDKHTLVKHLRTAFNEVVAVTGDGTNDAPALREADIGLAMGIAGTEVAKESADVVILDDNFSTIVTVAKWGRSVYVNIQKFVQFQLTVNVVALLVNFTSACFTGDAPLTAVQLLWVNMIMDTLGALALATEPPNNNLMKKAPVGRKGKFITNVMWRNIVGQSLYQFAVMWYLQTQGKHLFGLEGYHADIVLNTIIFNTFVFCQVFNEISSREMEDINVLRGMAGNSIFLGVLTGTIFFQFILVQFLGDFANTTPLTQQQWLISILFGFLGMPIAAAIKLIAVEPHEKADTRRTP

SEQ ID NO: 113782 - protein, 275 aa, Oryza sativa
  unsure (1)..(275): unsure at all Xaa locations
  Clone ID: PAT_MRT4530_17537C.1.pep
MYLVQSFIKQGNNNRVPEDPYAKVKFKIPSFSGYYDAEKYLDWEMTVEQASSEFKDFAIMWGAGLSDKGALSTIWEELKGAMRDRFVPPSYHRDLRKKLMRLEQGDKSVQDYYGELQKGVRRFAMLAKKELQGREQQGKXKASTYTSHTMPSAGLPKAVSFRAXSNQRASXPAAFGAFAAPPKPFSPRPAELGXKSFQVPRQECSFVAFIGRIXCHRAQGFGMFQKDCPIXQAYVVQKMGSLTTSXWEEEEEEEKIXVKDGEIFGRDAPWAYRTL

SEQ ID NO: 113783 - protein, 89 aa, Oryza sativa
  Clone ID: PAT_MRT4530_17538C.1.pep
IGACVRPAHGWNPQVCGGVRSGAFSALQLCSVRRTVKDVPGMAARSVIKVCVSCTCLVAAERCQHLYTVLYSSNHGTLYWLWAGSLDRS

SEQ ID NO: 113784 - protein, 168 aa, Oryza sativa
  Clone ID: PAT_MRT4530_17539C.1.pep
QNQPKHLNTHGEQIGQAPKIPIKKATNFQRTTSNLAAKAKTSLTDGVTEARVSESGRQQKIHLDLAAAALHLLLRGATVLAVVAPSSPSPLTLCWSQAWGSLDLAPATPRLLLHLMREERTRCIGERAGEASAAAQGEGAEPAATRVGIGAGYRARREKRLRSLVPNS

SEQ ID NO: 113785 - protein, 59 aa, Oryza sativa
  Clone ID: PAT_MRT4530_1753C.1.pep
SARTNAEAENQVATPAQHIRAVDAILSNAFEEAAAAAHPEQPPTGDANGENPERRESPH

SEQ ID NO: 113786 - protein, 162 aa, Oryza sativa
  unsure (1)..(162): unsure at all Xaa locations
  Clone ID: PAT_MRT4530_17540C.1.pep
MALSLSIYVVAAAGGRALAGRVTTTTTRGHAASAASSAIRRAAAAEEGKGAAGITHANDRSSXXXXXDVSCXPHPLTAHYLPSNFVGDTDPXTCRPTNSARDTHVRDARDLAGERPENKASIHIKIVPANNILPNEQTTEPGGKHVRHRSILTRRNKTLIGG

SEQ ID NO: 113787 - protein, 87 aa, Oryza sativa
  Clone ID: PAT_MRT4530_17541C.1.pep
MAPTWVGKAARLGGAAGDGDSAAAAVLVPSRAAAGATHHLQRIEGRDRGRDETIQGSPRYACCLLKTVADFVVPEQEASFGVDSLNP

SEQ ID NO: 113788 - protein, 121 aa, Oryza sativa
  unsure (1)..(121): unsure at all Xaa locations
  Clone ID: PAT_MRT4530_17542C.1.pep
WQAXTNRFPDLGKRASEPNXKLNGEVSSTSISNPPALYTFMAFRLEYVVWNCEQDNKFHTGNSYDHDYSQALIRLTIGKAGTACRYQVRNSQGQTPQQSSCSAQACQAMAAKQAAFLRYCR

SEQ ID NO: 113789 - protein, 57 aa, Oryza sativa
  Clone ID: PAT_MRT4530_17543C.1.pep
IIWGGTNKPYHGTTFRLTSGRIRHTPYYDRTVIPTFTWTTIDSTFPSTRSQSRIDFT

SEQ ID NO: 113790 - protein, 69 aa, Oryza sativa
  unsure (1)..(69): unsure at all Xaa locations
  Clone ID: PAT_MRT4530_17544C.1.pep
AXMDCPWXHMLXKSTXXXFLKXIYIXIVXXXYXKLXLXXYNISFIQVNXLFXVRNLSNXPVRTRTYSLS

SEQ ID NO: 113791 - protein, 139 aa, Oryza sativa
  Clone ID: PAT_MRT4530_17545C.1.pep
MAMKNNSNSRLVGAGAGERIAYGAGVKGAFIDIEIIIERAGLRAASALFLEGDPTYRRHFVIPLEDRIVIDALSDVLLIKAQKFIDPKVHIYGKTVMSGVGNDIGPGLRNEFNSWNGVNSVAVFDIHEVLSRVDLNMLF

SEQ ID NO: 113792 - protein, 55 aa, Oryza sativa
  Clone ID: PAT_MRT4530_17546C.1.pep
MGSRGLGIRRSISFQLASGRLVLTGRQWMKVDYPAACGIGLLEADEDGTSGDSLR

SEQ ID NO: 113793 - protein, 332 aa, Oryza sativa
  Clone ID: PAT_MRT4530_17547C.1.pep
MAASNIGMMDGAYFVGRNEILAWINTTLQLGLSKVEEAASGAVACQLMDAAHPGAVPMHKVNFDAKTEYEMIQNYKVLQDVFNKLKITKHIEVNKLTKGRPLDNLEFMQWMKRYCDSVNGGFMNSYNASERRESSKGGKETNRRTSVPSQAPAKSSSATHKAQASSHGAKKANGHAPNAPPSRSAKPSPANSAGPAYDEQITELKLLVDSLEKERDFYFSKLRDVEILCQSPEVEHLPIVNAIHKVLYAAEDDPSMVAEAQAMISQQQQSEQPMLSPILEASEERPAKQEAHKRKSISDLELEEFGMASSSRQRLSDISDVQLCGSPLTSFT

SEQ ID NO: 113794 - protein, 289 aa, Oryza sativa
  Clone ID: PAT_MRT4530_17548C.1.pep
MAGRPGYVTVPILSVLAAIGYVYYTAVFLAIPAWLGLATAAGVANAVAFTALAAACVATYAVAVSRDPGRVPPAFLPDVEDAESPIHEIKRKGGDLRYCQKCSHYKPPRAHHCRVCKRCVLRMDHHCIWINNCVGHENYKIFLVFVLYAVVASLYSLVLVIGGAVHSLPKNEQLGSDSSRTSIVSNVQIICGVFLCPLALALSILLGWHVYLIFHNKTTIEYHEGVRAMWLAEKAGNLYHHPYDLGVYENLVSVLGPNALCWLCPISRNTGNGIRFRTSYDIPLSTPPI

SEQ ID NO: 113795 - protein, 85 aa, Oryza sativa
  Clone ID: PAT_MRT4530_17549C.1.pep
GVEAQTGETLDISPVRLVASPDPRSPPCTIPGRATRRATPAGEEEEAYTEVETYRSCLEDFHRSTYDLVCSCRRSLYPFPYIFLN

SEQ ID NO: 113796 - protein, 168 aa, Oryza sativa
  Clone ID: PAT_MRT4530_1754C.1.pep
MMQPPYTYSNSYHHIHSSLPPEMSDRDVDMHILTALMADMADSSSSSSSSSSSSSSDDSDMRASAAAAEPEHRRSPAPPTPPRQQQMIGVRKRPWGKFAAEIRDSTRKGARVWLGTFDSPEAAAMAYDQAVFSVRGAFAVLNFPLHRVSGVASRPLPFGRRPGGNRPG

SEQ ID NO: 113797 - protein, 219 aa, Oryza sativa
  Clone ID: PAT_MRT4530_17550C.1.pep
MEWAYYGSGYSSSGTPSPVGGDGDEDSYMTVSSAPPKRRAGRTKFKETRHPVYKGVRSRNPGRWVCEVREPHGKQRIWLGTFETAEMAARAHDVAAMALRGRAACLNFADSPRRLRVPPLGAGHEEIRRAAVEAAELFRPAPGQHNAAAEAAAAVAAQATAASAELFADFPCYPMDGLEFEMQGYLDMAQGMLIEPPPLAGQSTWAEEDYDCEVNLWSY

SEQ ID NO: 113798 - protein, 117 aa, Oryza sativa
  Clone ID: PAT_MRT4530_17551C.1.pep
MAAFQICAQVWLAMSLLADGLAIAGQALLASVFAKKDHYKVAVTTARMLQLTVVLGVGLTAFLAAGMWFGSGVFTSDTAVISTIHKGVPFVAGTQTINTLAFVFDGEWRGMASIRIG

SEQ ID NO: 113799 - protein, 204 aa, Oryza sativa
  Clone ID: PAT_MRT4530_17552C.1.pep
MSCNGCRVLRKGCSDGCVLRPCLQWIDAADAQGHATVFVAKFFGRAGLLSFISAVPEAQRPALFQSLLYEAAGRTINPVHGAVGLLWTGNWPLCQAAVETVLRGGAIGPLPELGGACGGAGGDLYGAAKRNGGWSTFSTAKRVRKAEVPEAPSCDLGLCLSPCSPPAVGERKPALRPGTPSMSSDESGTTTGGERDPVLLNLFV

SEQ ID NO: 113800 - protein, 68 aa, Oryza sativa
  Clone ID: PAT_MRT4530_17553C.1.pep
KESPPSLLFFWVIKRSSKLLKLCYKNVIVLRENICTRKSFHKQNCEKEEGIFVFWTSFRKKSILLDRC

SEQ ID NO: 113801 - protein, 252 aa, Oryza sativa
  Clone ID: PAT_MRT4530_17554C.1.pep
MAGQFAKPRSDGFEERDGVKLPSYRGDNINGDSFDEKSRLPDPHRMIRAYSQSAATLNLLRAFATGGYAAMQRVTQWNLDFTEHSEQGDRYMELAHRVDEALGFMAAAEFWTSHECPLLPYEQALTREDSTSGVYYDCSAHFLWVGERTRQLDCAHVEFLRGIANPLGIKVSDKMDPKELVKLIDILNPQNKPGRITIITRMGPENMRVKLPHLIRAVRGAGQIVTWVTDPMHGNTMKAPCGLKTRSFDRIL

SEQ ID NO: 113802 - protein, 63 aa, Oryza sativa
  Clone ID: PAT_MRT4530_17555C.1.pep
AEVRAFFDVHEQEGSHPGGVHLEMTGQNVTECIGGSRTSLELAFIIAERLRKRRIASWQLNKN

SEQ ID NO: 113803 - protein, 506 aa, Oryza sativa
  unsure (1)..(506): unsure at all Xaa locations
  Clone ID: PAT_MRT4530_17556C.1.pep
MPLAPCPSPPLPSSPWPARAPRRGGLLRARAVRAAPRPPSKWSLGSWRSLTALQQPEYPDKAELDEVLRTVEAFPPIVFAGEARKLEERLAEAAVGRAFLLQGGDCAESFKEFNANNIRDTFRVLLQMSVVLMFGGQMPIIKVGRMAGQFAKPRSDGFEERDGVKLPSYRGDNINGDSFDEKSRLPDPHRMIRAYSQSAATLNXLRAFATGGYAAMQRVTQWNLDFTEHSEQGDRYMELAHRVDEALGFMAAAGLTMDHPIMTTTEFWTSHECLLLPYEQALTREDSTSGLYYDCSAHFLWVGERTRQLDCAHVEFLRGIANPLGIKVSDKMDPKELVKLIDILNPQNKPGRITIITRMGPENMRVKLPHLIRAVRGAGQIVTXWVTDPMHGNTMKGPCGLKTRSFDRILAEVRAFFDVHEQEGSHPGGVHLEMTGQNVTECIGGSRTVTFDDLGSRYHTHCDPRLNASQSLELAFIIAERLRKRRIASWQLNKNSHLGNIPSLGL

SEQ ID NO: 113804 - protein, 38 aa, Oryza sativa
  Clone ID: PAT_MRT4530_17557C.1.pep
MYLPNSHPSKFTNRYASPTFGGRHMGPGGSYVGHRLPG

SEQ ID NO: 113805 - protein, 278 aa, Oryza sativa
  unsure (1)..(278): unsure at all Xaa locations
  Clone ID: PAT_MRT4530_17558C.1.pep
YPCVPRRRRRGQLRRRRRRRRRWPCNSFXGRLKSSLGPTRFSWLSRPASRVVVMRERGEMEGREGSRLDNSLTRKRRSSSTARRRPRPESNHVVDVEQQQQQQQQQQRDGYSSSSSSAIGSDEDANSDGEEHQRREIHLNAPSPDRAARRAAMEGGAMSSNPNPRSSHKTKGSNQLHSEGSGGGGGGSSRKGESGHGAVVSAGNRESSTGDKTRKLKLKIGGIRRSVPAKPSPDMSHSRSLPVKPPRPGDSQQRQKHSSQAEGVKDSSRLASSRDKKT

SEQ ID NO: 113806 - protein, 60 aa, Oryza sativa
  Clone ID: PAT_MRT4530_17559C.1.pep
RPEQARIVEEAVACTDMALERGGAYIRAQGALSRMFDPDLILYIKRAVTIPFMAIARIGH

SEQ ID NO: 113807 - protein, 131 aa, Oryza sativa
  unsure (1)..(131): unsure at all Xaa locations
  Clone ID: PAT_MRT4530_1755C.1.pep
RLAPHSAVSSFTCPDGSCVKKMDATRSAQSIHGQDEQKLYDELKSAVWVIHVESDESNGTGTGFCIDQRGLIMTCAHCVSGKTCFVARQNDKKFQKAYVLHKIESWDIAILXFVPNGSDAYSAGSLPMMGP

SEQ ID NO: 113808 - protein, 51 aa, Oryza sativa
  Clone ID: PAT_MRT4530_17560C.1.pep
TPPPPRKKKKRAIRGLPPPPRGGPPREIPEGPGPKTPGKRGGGGGAPALGA

SEQ ID NO: 113809 - protein, 78 aa, Oryza sativa
  Clone ID: PAT_MRT4530_17561C.1.pep
YAVRSGHAAVYLCQPRHNVMSASPCCSLLTRPFLTLLQRSSLLAPCNARFPLAMLRVSIYRLAPFQISDVSSYSQEML

SEQ ID NO: 113810 - protein, 69 aa, Oryza sativa
  unsure (1)..(69): unsure at all Xaa locations
  Clone ID: PAT_MRT4530_17562C.1.pep
LVXXXXXXRPLELTXXKXTNGXAXXVRXAIXKGXQPGQXXWPGNXGGXXGXXXXEXPXPXXXLVXGFSA

SEQ ID NO: 113811 - protein, 131 aa, Oryza sativa
  Clone ID: PAT_MRT4530_17563C.1.pep
NGESNKLATHRRGQRTNMLGFARHISVTWTWPLDYDPVAGPGFRGWVFEPNGTQPARRDEGEGREGSSPEGRRLIIPPPANSPSSLAPVTTAIDFPNQNKNLDLGSGAARRRWTEPRGWRREVRGFCGVGS

SEQ ID NO: 113812 - protein, 64 aa, Oryza sativa
  Clone ID: PAT_MRT4530_17564C.1.pep
RMRFAYYIYISGGTKHIHYSPFDVLFLLFFSSMTDHACLAYVMNIFLGGTQRSLYLGGVPWGNP

SEQ ID NO: 113813 - protein, 109 aa, Oryza sativa
  unsure (1)..(109): unsure at all Xaa locations
  Clone ID: PAT_MRT4530_17565C.1.pep
SKDCNQYAFIVSRMQEXYGRVASIIPVSVDSIPDQKRFRRDEPGYYYSGGVPQPVILDKSGKKIFDAQGALKFQVVDDVLRDLFDLLPRSESMELKQRTYNEFNSELVD

SEQ ID NO: 113814 - protein, 63 aa, Oryza sativa
  unsure (1)..(63): unsure at all Xaa locations
  Clone ID: PAT_MRT4530_17566C.1.pep
NQNXYLHNFXXXXXATARRIXCXXKXXTFHPHTXTXHDXRARXXLLXDXXPXSLTXXMXXXXT

SEQ ID NO: 113815 - protein, 82 aa, Oryza sativa
  unsure (1)..(82): unsure at all Xaa locations
  Clone ID: PAT_MRT4530_17567C.1.pep
ATEAARXGDGRRVGEGGAGVGGDGGWWRQREGGRRLRRRGRMTGARPIHFDPARVSNWKITILPLRTTFFMDKIIPPHFYSH

SEQ ID NO: 113816 - protein, 181 aa, Oryza sativa
  Clone ID: PAT_MRT4530_17568C.1.pep
MDDAAGNCDGMTAFALRLAKRLADNGDDVNNNRNLVFSLVSLYAALALVAAGGQGTTLHELLALLGASSLDDLAESVYRAVEPKKSRKKINEWVSKATNKLIPEILPDGSVHRLTTLVLVNAIYFKGKWSDPFPRESTTTGKFHRLDGSSVNVRFMRSREDQYIGFYDGFNVLKLPYNGGL

SEQ ID NO: 113817 - protein, 285 aa, Oryza sativa
  Clone ID: PAT_MRT4530_17569C.1.pep
MTQYIEVPAKVFLEEFVRMLDLGPLTITGRHIYSSTGLHVVGVQVNLGPADRVPYLYYEAAKTTVAEAEQTASLMAIHALAAERQIEIRDVNYPQVQHLRHQVARLRGRVVEAEKLCAELLTIVRSSENEVMFLERLTHRLYHRVRYLSETITVLQRGGGGSDSSSGRNRTQSVWPEETFARLRYLLGGLRPIETVYLRLSLGPRVGLTQGTPLLKVVRAFPGSMAWVTYFSAVAPGMSLVEKQWLVHGAHTSALQRLVLGPRLEAFSLPLLTLKKQGHLVSLNL

SEQ ID NO: 113818 - protein, 120 aa, Oryza sativa
  unsure (1)..(120): unsure at all Xaa locations
  Clone ID: PAT_MRT4530_1756C.1.pep
MSMAEASSGLSGVRASASAGGGTDGGXTRARWLRLSPLPSGPHAPPSPLVXPTTSVPPSPAILSSPLSTWRGRWXRPPPLLWPRPPPLQLXPPVLPAVGRRGEEKEKEREKGRRRRKGER

SEQ ID NO: 113819 - protein, 88 aa, Oryza sativa
  Clone ID: PAT_MRT4530_17570C.1.pep
VFSTYPPVSVSGTGTPLLKVVRAFPGSMAWVTYFSAVAPGMSLVEKQWLVHGAHTSALQRLVLGPRLEAFSLPLLTLKKQGHLVSLNL

SEQ ID NO: 113820 - protein, 146 aa, Oryza sativa
  Clone ID: PAT_MRT4530_17571C.1.pep
MGLLDQLWDDTVAGPRPDSGLGKLRKYASFSPSSSSSTMAASPSPISAAAAAADAPAVTRSITILRPPALSVTSPRGSESGPSTPSSPASVPDSPFGSAPTPKGSEGWKKLRRGAARMADGVDASAGGQPRSPTVYDWVVISSLDR

SEQ ID NO: 113821 - protein, 105 aa, Oryza sativa
  Clone ID: PAT_MRT4530_17572C.1.pep
MLPQPINPDLSGASSRLPPCQRYHPPTVRAPSTNQAPRDGSSLGGIRELRIWPLRLRGVVDPVLVASSPTPHLPPSPSCQRFSSSTPNLTPSQLVNLDPGSGSSH

SEQ ID NO: 113822 - protein, 205 aa, Oryza sativa
  Clone ID: PAT_MRT4530_17573C.1.pep
VRGRRHEGLVHARRASDGSQPTRRGPCKQEGVQQRRGSHRGAPTAGRVSTGCAPSHGGVRAKDRRPHRAGRTPLAAKGGRGGAATTLRPRQAHGLALTPGHGQSRLIRHVLPLSPGARIVGIAVGTEVLGGANAGLAEALIGAVVNIHDALKMLGLATKIELTTPHSEAVFANSYPPSACVFLGDLMASGTINRSLVLVGNTNRD

SEQ ID NO: 113823 - protein, 57 aa, Oryza sativa
  Clone ID: PAT_MRT4530_17574C.1.pep
DEQEHSLRASPRLTPSQLPPASLPNRSISVCIPSVYRSLKSAQRFRAYVRLSHSNYC

SEQ ID NO: 113824 - protein, 58 aa, Oryza sativa
  unsure (1)..(58): unsure at all Xaa locations
  Clone ID: PAT_MRT4530_17575C.1.pep
LYCNLLWXPXRGFXXLXLFXXLVRLPAXXPGASERSVXLIHVXXDEXASAPAASRSXR

SEQ ID NO: 113825 - protein, 108 aa, Oryza sativa
  Clone ID: PAT_MRT4530_17576C.1.pep
FGFFIFFGFFFFFLEPKNTQAGFNVNEYNYTTLYSAALQEHKTFDLTRTRKKKKEGKHKHSRIELLRSFSVAKFFKRKNRGIGKPLYGGKGAPTWLCKHKENLNPGGD

SEQ ID NO: 113826 - protein, 47 aa, Oryza sativa
  Clone ID: PAT_MRT4530_17577C.1.pep
MERLAYEAIRRPAYEATSGCVQRREGVAVIQGMSAMRPRHYTVGCSK

SEQ ID NO: 113827 - protein, 819 aa, Oryza sativa
  Clone ID: PAT_MRT4530_17578C.1.pep
MEQPSPSPYQPSASDHHLWSSSTGAPWNYSMNNSNQNTVYYDPQRDVSVPGSTENVTSGATHVVQSAMGITGATDSYAPYSNSVQPGYNAPQYPNYYYNCPQSTNESSVQQGVDQSSGAAYQPLTSFQNSGSYVGPTSNTYYNAGAHQTAPGYATSNNYYQSNSWTGGSSGDNHVQSYQSYTPSDTNAAQSSSSLPNNSYHYHQQYNQWPYYYDQSAPSSGGPAVAVSSVSDANTASVSSGYVYPSTQPPPPGTTWRSDAGATAVPPPQGSATSDALRVNKIQIPTNPRIAPTLPMAMPKVEKRNLEADSSKKPAYVSVAVQKNDVKAAQDGHEAVTQGSIPVSLRTYVGRNVSRCKDDAQRSAVQNILKEIITKATADGILHTKNWDIEPLVPLPENITSTNLTSSAKDLSPFSFSTSRRSPSRRAKSRWEPVVEEKVANKVELISKESAKTNTYNSSETTKRAGRSWDIGKFLQSRQAPLSQYNQRPSKKKRIGGNSSLTENGNVSSDSDKEQDLTKYYANAITIANSPEEKKRREHRSKRFERSQGAASSKSRSSVPDKDGTSNTYARRSMPMLLSRSNGDDVSFAVEDLDWDALTVKGTCQEIEKRYLRLTSAPDPATVRPEDVLEKALHMVETSQKNYLYKCDQLKSIRQDLTVQRIQNELTVMVYETHARLALQSGDLPEFNQFHYARLLTALLEITRSQRFEPNLYVERMRFEAIKCISKSYRPTLPVKYAAQVLGFMAIDEVCEAKRADGLEECEEWLKAHGAVLSVDNNNGELQIDTKVSSTSLYMPEPDNAVSHGDASLAVDDFLARTS

SEQ ID NO: 113828 - protein, 57 aa, Oryza sativa
  Clone ID: PAT_MRT4530_17579C.1.pep
GGDNTRQREPPLSGGFCYSGRHQSFSVKVTTVPEQIGTTLEGWERGDLEAWWSIYEP

SEQ ID NO: 113829 - protein, 134 aa, Oryza sativa
  unsure (1)..(134): unsure at all Xaa locations
  Clone ID: PAT_MRT4530_1757C.1.pep
MVTAGDHRRGGAAPERAERRGKREGRSTAHPGTTRTAETTAGAEERGGAVRDDEGDGAPAVGGRSEGADGVGDNAAKPMEVAPSREEDRSDDGGXPKVGGDGGERGERREHESEGESERQAAETEERSSGNDYI

SEQ ID NO: 113830 - protein, 111 aa, Oryza sativa
  unsure (1)..(111): unsure at all Xaa locations
  Clone ID: PAT_MRT4530_17580C.1.pep
MAAATMALSSPVMARAAPATSSALFGEARITMRKTVAKPKPAVSSGSPWYGADRVLYLGPLSXGEPPSYLTDEFPGDYXWDSVALSVHPQTWDNNGETQVNRLGAHTLFAS

SEQ ID NO: 113831 - protein, 76 aa, Oryza sativa
  Clone ID: PAT_MRT4530_17581C.1.pep
ILFFLFFFFFIFPFFFFYVFVFFFFFFFLMDNFNISVQTGRLRIQRHRDVLKLTYYGFVSHSKVLMKSTDPIWDIN

SEQ ID NO: 113832 - protein, 60 aa, Oryza sativa
  Clone ID: PAT_MRT4530_17582C.1.pep
THGQALPANSESVYNIQGPPKTNQMDWARQNDFYLLQNCLIASVYGETLSSIRTNSTRAV

SEQ ID NO: 113833 - protein, 68 aa, Oryza sativa
  Clone ID: PAT_MRT4530_17583C.1.pep
KKVVFDPQPRCARVWRPGVQSHLPSVQPLGSVLSSFFLSFRVIVIRLDPKFPVEIPCCSWGPAENYLT

SEQ ID NO: 113834 - protein, 196 aa, Oryza sativa
  unsure (1)..(196): unsure at all Xaa locations
  Clone ID: PAT_MRT4530_17584C.1.pep
QEGITSGYTAIKRALKVVREQSESGKLTLGGLIHEFAGVKAKFPEEYRTNSMPYKAISFAAPLLHSQLSRQYSAGEYGGTEPLLNRTLVMVEALKDTLGADASAAYPRLIHDLVMAPPLDAWWWSAXLLLQATMDSILDEVILPTLVAAADVFRLCGGISDYDYKLALPWKKVFDPASXDEHIERHVLPLLRKALH

SEQ ID NO: 113835 - protein, 659 aa, Oryza sativa
  Clone ID: PAT_MRT4530_17585C.1.pep
MKMVCSALTRDMEGGVPKRCIWRGEAPAEYEEEAAAAMAGTVDKSTYNSFVLILQLLALQVLCLYSKINLSGKNNMKNETLVFWPALTGRRTLHPMLILASVISMASVGDEGRNQGGSLSHGETNAGQELETSDRTPPNSSNTKTSGVQEIAAAASKDVPTIHFVRVSSGDTDHHCQSLFSPPAYCNSYYPPLPPQPGSMATNQIVARLMAQMNYEEGTGLGKYGHGIIDPINPTKKYGKGGVGKFESSYDSDSDYDTGPPVEPKLERGTGEAEPEAVVDVEEVRAMDTLQREREAYAAARAWERRHEKVRAYNMRRQRPPKHATAADDWEGMASRYTAIKRALKMVRELNESGKLTLGGLIHEFAGVKAKFLEDYRTNCEYGGTQPLLNRTLVMVEALKDKLGADASAAYPRLIHDLVMAPPLDAWWWSAEEPEPMLRFVNRWKGLLPQATMDSILDEVILPTLVAATDVFRLTRPSKLSVCVGMWIPHLSHARLRIVYIISRRLRDWLCGGISEYDYKLALPWKKVFDPASWDEHIERHVLPHLRKALHDLEISIRMTWLQNNNFFPLVMRWASIVPVKYMVPLLIQGFFKKWMYANYRYLMGERPRLDEAMAWYEVWKGLFTPELLAEKRVVVHVEAGLDMINRATQGLEISVPEH

SEQ ID NO: 113836 - protein, 588 aa, Oryza sativa
  unsure (1)..(588): unsure at all Xaa locations
  Clone ID: PAT_MRT4530_17586C.1.pep
MLILASVISMASVGDEGRNQGGSLSHGETNAGQELETSDRTPPNSSNTKTSGVQEIAAAASKDVPTIHFVRVSSGDTDHHCQSLFSPPAYCNSYYPPLPPQPGSMATNQIVARLMAQMNYEEGTGLGKYGHGIIDPINPTKKYGKGGVGKFESSYDSDSDYDTGPPVEPKLERGTGEAEPEAVVDVEEVRAMDTLQREREAYAAARAWERRHEKVRAYNMRRQRPPKHATAADDWEGMASRYTAIKRALKMVRELNESGKLTLGGLIHEFAGVKAKFLEDYRTNCMPYKAISFAAPLLHSQLSWXYNAGEYGGTQPLLNRTLVMVEALKDKLGADASAAYPRLIHDLVMAPPLDAWWWSAEEPEPMLRFVNRWKGLLPQATMDSILDEVILPTLVAATDVFRLTRPSKLSVCVGMWIPHLSHARLRIVYIISRRLRDWLCGGISEYDYKLALPWKKVFDPASWDEHIERHVLPHLRKALHDLEISIRMTWLQNNNFFPLVMRWASIVPVKYMVPLLIQGFFKKWMYANYRYLMGERPRLDEAMAWYEVWKGLFTPELLAEKRVVVHVEAGLDMINRATQGLEISVPEH

SEQ ID NO: 113837 - protein, 131 aa, Oryza sativa
  Clone ID: PAT_MRT4530_17587C.1.pep
MVSELSIRGVSSVGKICSDVPCNSLSDLDKDGAHGTNAHQLFDGMPSQHEVSEDDSRIHEKSLDDALDQIMEKLELMEARRRQNEKIDRILEKFNEMEKKERESMQRRTASWRSSVPASKRPLRSSWLHHL

SEQ ID NO: 113838 - protein, 388 aa, Oryza sativa
  unsure (1)..(388): unsure at all Xaa locations
  Clone ID: PAT_MRT4530_17588C.1.pep
MDHHCSSLFSPPAYCNSYYPPLPPQPGSLATNQIVARLMAQMNYEEGTGLGKYGHGIIDPINPTKKYGKGGVGKFESSYDSDSDYNTGPPVEPKLERGTGKAEPKAVVNAEEVRAMDTLQRERKAYAAARARERRHEKGKAGRDNLRVHGHQARLEGGPGAERVGEAHIGRPWQSMTYESYQMPGLGEGGTLQEGITSGYTAIKRALKVVREQSESGKLTLGGLIHEFAGVKAKFPEEYRTNSMPYKAISFAAPLLHSQLSRQYSAXDTLGADASAAYPRLIHDLVMAPPLDAWWWSAXLLLQATMDSILDEVILPTLVAAADVFRLTTWSSKPSVCVGMWIPHLGHARLRIVYIIISRRLRDHLCGGISDYDYKLALPWKKVFDPAS

SEQ ID NO: 113839 - protein, 41 aa, Oryza sativa
  Clone ID: PAT_MRT4530_17589C.1.pep
NINRSQRFTTHTFIQNTNNLANQIQNCRTDYTAGVTRTSYI

SEQ ID NO: 113840 - protein, 1348 aa, Oryza sativa
  unsure (1)..(1348): unsure at all Xaa locations
  Clone ID: PAT_MRT4530_1758C.1.pep
MSYYVDPRTSVPQYPLYPVYGYPPSTVARQVGGLGAQDSTTVTSSFVDNSVNTNLNQGVPTSTMLVWTQVGEIVFPVYTTVPISAGPSMAGNENAVATTQNDSMSKDPPAEAEIGTSTTSEPEKDPSAAKPCLSDKNHEPTRMTSEVTRSWCPIHKTRKHTLQACWVFLNVHAEIRACKERGIQRTSPTRDVYCPIHKTNNHDLSSCKVFLSAMKTSPPKVQQSHISLRDEDKEQGATLISDRMVGVIGIDPHEPSVLYLLEDYGSSSTSTPREVLAIDETGTSARANAEAENQVTTPAQHIRAVNVILRETPYDPVLNDDLARWTERLQESVTNPEQPPTGDANGENPEQRESPHRVTPPPRGTGDLRDHLNGRREARRTRDNENRSRHRVSSQRHDNEERGGRSSEDRDRDNRHDHDNRERRVLGDTDLWQQFVANFQGTYKRHTIEDDLHALSQNPDESLRDYVRRFNECRNTIPEITDASVIRAFKSEYMDPPKRPDPQGSDTKKTWCPIHKSDRHSLEDCLVFKKSLAKHMALKKGKRVRVVEKDAEAATQESDSAYPDSDLHVSHIFGGSTAYSSKREYKKVEREVYSTWQGAAPKMKWSEQKIEFSEEDHPKTAVIPGRYPIVVEPTIRNIKVARVLIDGGSSINLLFASTLDAMGIPRSELTPTDQPFHGITPQSSSKPLGKITLHVTFGQANNFRTEQITFDVAEFDTAYNAIIGRTALAKFMAASHYAYQVLKMPGPKGTITIQGNAKLAVQCDKRSLDMVKHTPSPPVTAEPPKKICTRSKTSIREELDKLLKAGFIREVLHPEWLADPVMVRKANGKWRMCVDFTDLNKACPKDHFPLPRIDQLVDSTAGCELLSFLDAYSGYHQISMAKEDEEKTAFITPFGVFCYVKMPFGLITAGNTFQRTVQGALSDQLGNNVEAYVDDIVVKTKTSDSLIDNLRETFDNLRRYRLMLNLEKCTFGVPSGKLLGFLVSGRGIEANPEKIKAIENMKSPTRLKEVQKLTRCMAALXQEAEEPFIALKRYLSNPPVLVTXRHYFQAHRVTVVSSFPLGEVVRNKDVVGRIAKWVVELSQFDVHFVPRTAIKSQVLADFVADWTMPDNRSDNQIDNETWSMAFDDALNSQGARAGFILTSPLGDQFKHAIHLNFRATNNTAEYEGLLAGIRAAAALGVRWLIVKGDSELVANQDYCIRLGVKICFASVSHPQSNEQVERANGIVLQGIKTRVYDRLMSHDNKWVEELPSILWAVRTTPTTSNKETPFFLVYGSEAMLPTELRHQSTQVQKYSNEDQEEQRNDDVNLLEEHRERVAVQAASYQQALRHYHEKRIRARTLSIGSYVL

SEQ ID NO: 113841 - protein, 61 aa, Oryza sativa
  Clone ID: PAT_MRT4530_17590C.1.pep
VGLYDVLSQSNDLQAFVHVIAIRTCKFSAHAAMNTCGYYWPPRSFIGNDYMALVHPKSSFS

SEQ ID NO: 113842 - protein, 654 aa, Oryza sativa
  Clone ID: PAT_MRT4530_17591C.1.pep
MATSRLTPAYDLKNAAAAVYTPLPEQPHSAEVEIRDRKPFKIISAIILSSLLLLALILVAVNYQAPPSHSSGDNSQPAAVMPPSRGVSQGVSEKAFRGASGAGNGVSFAWSNLMLSWQRTSYHFQPVKNWMNDPNGPLYYKGWYHLFYQYNPDSAVWGNITWGHAVSTDLINWLHLPFAMVPDQWYDVNGVWTGSATILPDGRIVMLYTGDTDDYVQDQNLAFPANLSDPLLVDWVKYPNNPVIYPPPGIGVKDFRDPTTAGTAGMQNGQRLVTIGSKVGKTGISLVYETTNFTTFKLLYGVLHAVPGTGMWECVDLYPVSTTGENGLDTSVNGLGVKHVLKTSLDDDKHDYYALGTYDPVKNKWTPDNPDLDVGIGLRLDYGKYYAARTFYDQNKQRRILWGWIGETDLEAVDLMKGWASLQAIPRTIVFDKKTGTNVLQRPEEEVESWSSGDPITQRRIFEPGSVVPIHVSGATQLDITASFEVDETLLETTSESHDAGYDCSNSGGAGTRGSLGPFGLLVVADEKLSELTPVYLYVAKGGDGKAKAHLCAYQTRSSMASGVEKEVYGSAVPVLDGENYSARILIDHSIVESFAQAGRTCVRSRDYPTKDIYGAARCFFFNNATEASVRASLKAWQMKSFIRPYPFIPDQKS

SEQ ID NO: 113843 - protein, 68 aa, Oryza sativa
  Clone ID: PAT_MRT4530_17592C.1.pep
RVQTQPKFFFGIFFDCFTSTFRENNFSVGDTIYAPNTSFEKNQIQHSPNNFLFTMGIQKMVHHFISCI

SEQ ID NO: 113844 - protein, 682 aa, Oryza sativa
  Clone ID: PAT_MRT4530_17593C.1.pep
MVPVSTKISPLLEVVTPIPQEDHTRQADLKEVPAIRASALILTSILAWALTEVESPHEVTSGEDQTEPDMEMAEPSKGPDNEGVTERTYSGVEEAIHLATYGVAEDGHATSTEYVFSNVMEVWNMYVFHFQPEHNWMNDPNGPATHEMGWYHIEFYQWNPEGYAWYGMSTNNHTSWAHAVDSKDLDQWYKALPWAMYPENPFDLQGVWDSASYTHLDPGKLSDAEADMYTEGESEDEWAALVQDQCEADAVQETDPFLYYVDWVKESVNPDIIYPPPGIGVKDFRDPTTAGTAGMQNGQRLITIGSKLGKTGISLVYETTNITTFKLLYGVLQAVPGTGMWECVDLYPVSTTGENGLDTSVHGLGVKHVLQTRFDDDKHDYNALGTYDLQKNKWTPDNPDLNVGIGLRLDYGKYYAARTFYNQNKQRSILWGLIGETDLEAVDPMKGWASLQAIPRSIVFDKKTGTNVLQRPEEVESWSSRDPITHGRIFEPGSVVPIHVTGATQLDITASLEVDETLLETTSESHDAGYDFSNSGGAGTRGSLGPFGLLVVADEKLSELTPVYLYVAKGGEGKAKAHLCTYQTRSSMASGVEKDVYGSAMPVLDGENYSARILTDHSIVESFAQAGRTSVRSRDYPTKDIYGAARSFFFNNATEASVRASLKAWQTKSFIRPYPFIPDPKS

SEQ ID NO: 113845 - protein, 71 aa, Oryza sativa
  unsure (1)..(71): unsure at all Xaa locations
  Clone ID: PAT_MRT4530_17594C.1.pep
QAYRGAEWWRLMGHLKTINKPPNKILMTIKRKDDGHVVKXSVKAVVTVKKGGSGRAAEEYSDKVADVLAEF

SEQ ID NO: 113846 - protein, 118 aa, Oryza sativa
  unsure (1)..(118): unsure at all Xaa locations
  Clone ID: PAT_MRT4530_17595C.1.pep
FFFFFVPFHFFSLFLSDGFFFFVRFQLFCLFTQTKSCFWSIYTKLILIPFYFSFFLVHVVCXVISISSFFYFDSYSYFKLPKKKIYISYITIMAXFSCLGVKIXKYMNTHLKELNVVQ

SEQ ID NO: 113847 - protein, 64 aa, Oryza sativa
  Clone ID: PAT_MRT4530_17596C.1.pep
LSQSTNGTTTPEKKKKSTFSSTGKFLTVAGGTIGLGISFSSGESVQGLQAASRKASIRVALHLL

SEQ ID NO: 113848 - protein, 659 aa, Oryza sativa
  Clone ID: PAT_MRT4530_17597C.1.pep
MALELSLVSASPPGGLAASPPPPAAIPGKEQQVAGVGILLQISMLVLSFVLGHVLRRHRFYYLPEASASLLIGLVVGGLANISNTETNTRTQSGFSLSPKPFFANFGAIVTFAILGTFIASVVTGVLVYLGGLTFLMYKLPFVECLMFGALISATDPVTVLSIFQELGTDVNLYALVFGESVLNDAMAISLYRTMSLVRSQAAAGENFFMMVFQFLETFVGSLSSGCITAQNILNYFKGTFGIVVLELDLSLLLYPFPKFYMETLFAKHERLCMLSIDHVKLQYLCITIYHLLIACFTVNYFIYYLILCNLDHSVYLFKYAGLDIDKYMLAEGLGLSGIVSILFTGMVMKHYTFSNLSNNSQRFVSAFFHLLSSLAETFVAVNVFSCAYLVNMSRPEHRRIPLKHQKALWFSGLRGAMAFALALQSANELPGGHGKTIFTTTTAIVVLTVLLIGGSTGTMLEALDVIGDENRSIENYDDNNGYIPPTYEEGSSSGGGLRMKLKEFHKSTTSFTALDRNYLTPFFTSQTDEDDDVFEIGHYATPKSGFRQNAILPNGFVKMPCTRDTKHLFCHLRQFSPFLPNFASGLTKIPLRAGSRPVLRNTSSGCAAAAACADQYSAATSPKPSAGRRMLTMRVAPAAWAAALAGSRCASRGLWCTR

SEQ ID NO: 113849 - protein, 339 aa, Oryza sativa
  unsure (1)..(339): unsure at all Xaa locations
  Clone ID: PAT_MRT4530_17598C.1.pep
GPKIVQARVNHISTEEAQAAPEVVLVLFDSSATHSFISKKFVGXHGLRKVELSAPMKVNTPGNSTRLVSFCPSMMIEIQGSPFLANLILLECKDLDVILGMDWLSRHKGVIDCASCTVTLVDEKGEVVIIQFPMTQKKGVVLNQMEGEKQDEVEKDVQKLENIPVVCEYPEVFPEDLTTMPPKRDIEFRIDLVPEXYIRPSTSPWXAPVIFVEKKDKTKRMCADYRALNEVTIKNKYPLPRIDDLFDQLKGATVFSKIDLRSDGEVPFTTRFGCKLAGSSCLELAFTRCSFRRAAVLGWRVAAVTSMGGGCFGSSTSAPQLTSPPDDAAWWDGHAFGPA

SEQ ID NO: 113850 - protein, 56 aa, Oryza sativa
  Clone ID: PAT_MRT4530_17599C.1.pep
YKYSKNLYFGGATCSQILLTYHCSQHDNNTYLLLNHQKEHIVHREDLYDLISYLLS

SEQ ID NO: 113851 - protein, 1492 aa, Oryza sativa
  unsure (1)..(1492): unsure at all Xaa locations
  Clone ID: PAT_MRT4530_1759C.1.pep
MQARAARAAAAGDDVTADVIVALSPPGLEWYIPGLEIELCSRDGCSEWLGLYNRMPRYKPEYLFGVEGFVQELRTXIPHDRHEEKCRVKXVTLNSNSEDIPSVMFEAGGRNCIHACQEVARIAIGELRDRYSDQLADTEYRYHPRQPQGSDRGNYLETEGIENDATTRHLVEMLWAMDESRAETVLAAQDHEDRNRGKICKLEDKVDRLEKELAALKGEAPLQKARIRLTARKRALFVPRYQLAPKVRVVEKEVAPTLADPPVIIISEDEEEESKRNHSKFPPVSLLVPCPCQMVNTRSNGNGPSNHNNEGNPTLAQVLAQQTQLMNMMMQQLQNQQNQGNNHAPPQNKLAEFLHVRPPIFSSTTNPVEAGDWLHAIEKKLDLLQCTDQEKVSFASHQLHGPASEWWDHFRLNRTTAEPITWLEFTAAFRKTHISSGVVSLKKKEFRSLTQGSRSVTEYLHEFNRLARYAPEDVRNVEERQEKFLEGLNEELSYPLMTGDYSDFQKLVDKAIRQEDKYNRMEQKKRRIAQFKTQQGNNQKPRLTLGPQSMPHGGSSSVVRPQRQFFNNNAGNNIRNQAPRPVAAPAQQQPAKREQGSKPVVCFNCGDPGHYADKCPKPRRVKVVPAQSNSAVPASKARVNHVAAAEAQDAPDVILGTFLVNLVPATVLFDSGATHSFLSMSFAGNHGMEVEDLRRPLMVSTPSNQALSLQRSPSVRIEIQGVPFLANLILLESKDLDVILGMDWLARHKGVIDCANRKVTLTSNDGRVVTVHALSSASLRSRLNQITLEEIPIVREYPDVFPDDLPGMPPKRDIEFRIDLAPGTTPIHKRPYRMAANELAEVKRQVDDLLQKGYIRPSSSPWGAPVIFVEKKDHTQRMCVDYRALNDVTIKNKYPLPRIDDLFDQLKGATVFSKIDLRSGYHQLRIKEEDIPKTVFTTRYGLFECTVMSFGLTNAPAFFMNLMNKVFMEYLDKFVVVFIDDILIYSRTKEEHEEHLRLALEKLREHQLYAKFSKCEFWLSEVKFLGHVISAGGVAVDPSNVESVTNWKQPKTVLEIRSFLGLAGYYRRFIENFSKIAKPMTRLLQKDVKYKWSEECEQSFQELKNRLISAPILILPEPKKGFQVYCDASKLGLGCVLMQDGKMVAYASRQLRPHEKNYPTHDLELAAVVHALKIWRHYLFGTRTEVYTDHKSLKYIFTQPDLNMRQRRWLELIKDYDMGIHYHPGKANVVADALSRKGYCNATEGRQLPLELCKEFERLNLGIVSRGFVAALEAKPTLIDQVREAQINDPDIQEIKKNMRRGKAIGFLEDEHGTVWLGERICVPDNKDLKDAILKEAHDTLYSIHPGSTKMYQDLKERFWWASMKREIAEYVAVCDVCQRVKTDGQTERVNKILEDMLRACALDFGGSWDKNLPYAEFSYNNSCQASLQMAPYEALYGRKCRTPLLWDQTGEHQVFGTDILREAEEKVKIIQERLRVAQSRHKSYADNRLEI

SEQ ID NO: 113852 - protein, 255 aa, Oryza sativa
  Clone ID: PAT_MRT4530_175C.1.pep
MFDGGGEQRRNNCAARPVSTNVDPGSHHVEEEVQPAAPAIPALADLFSLDIKDYFDETEEETTSKALAPLDDTVKKTLEDISIRLESSLDNLVADCGLIRARFAEIQASIPDDLANTITPAVYLEQHQFKLEKAKQRIADWREQKDIEATIQANRQLVHEEKAKLDQLSVGPIQSNIDRLEARKIDLIAQLEECNAELDLEKQKLADLPNVVEEQKSRLRSAIKNVADMTKSLKVIPGTDAQDIQAIEEIDQIRQ

SEQ ID NO: 113853 - protein, 182 aa, Oryza sativa
  Clone ID: PAT_MRT4530_17600C.1.pep
MGSALAGVMFVWSMLSPLLPRQLFEHFVGRFLRRHARRLAGLVDPYLTVTISEHCGERMKLGDVYEQAKAYLSHRCARRARSLRAERAARDGGGDRFLLTMGDGEEVYDVFQGATVWWNSVSSGGGRRYESPWFGGGGVFYDYDRRAYRLLFHRAAVIWCASSASRIAAALCRSFALVFFRL

SEQ ID NO: 113854 - protein, 74 aa, Oryza sativa
  Clone ID: PAT_MRT4530_17601C.1.pep
NDPGPAPPTGWIPATAYLPLTHLESGPGPPSPDNVAAQVSLVVWWEITPRGDFFLYGIGKKEFLLPFHKVKPDF

SEQ ID NO: 113855 - protein, 93 aa, Oryza sativa
  Clone ID: PAT_MRT4530_17602C.1.pep
PSGGGGGANQTPMGIQRPTRNPNFSRGGGFFLQKTAPSVGNFLTGKNFFFPFFFPGPTKGFGALEPGSWVGFQFQLKGLFLINAKNGGHFECS

SEQ ID NO: 113856 - protein, 74 aa, Oryza sativa
  Clone ID: PAT_MRT4530_17603C.1.pep
SSLQYTISITHTHTLLMIIHTCTSVTPTIHSHLIYYYSTHKTLINTIITFPFPNYPFTNLNSYTHSIFPTPYET

SEQ ID NO: 113857 - protein, 134 aa, Oryza sativa
  unsure (1)..(134): unsure at all Xaa locations
  Clone ID: PAT_MRT4530_17604C.1.pep
VVHPRGLLKNAEQVLATSSSSQVAGPTRARGERGEERGGGGGGEGGADGERGAAAPAMPPSDLRRPGAAPRSTPARARQPCRHSAWLRERRSXSGSARGRARSRRRSARLRARTTALLLAAWAAQASLLESYLF

SEQ ID NO: 113858 - protein, 397 aa, Oryza sativa
  Clone ID: PAT_MRT4530_17605C.1.pep
MQHSPSNEMTLLLLLFLLGCTHYGHAGSDRPKIDSIFSFGNSYADTGNFVKLAAPVFPGIPFNNLPYGETFFGHPTGRASNGRLNVDFIAEGLGVPLLAPYHGESQDFSHGANFAVVGATALDLAFFQKNNITSVPPFNTSLSVQVEWFQKLKPTLCSTTQGCKDYFERSLFFMGEIGGNDYVFLYAAGKTVDEAMSYVPKVVQAISAGVEAVIKEGARYVVVPGQLPTGCLPIILTLYASPAAADYDAGTGCLWRFNALARYHNAVLFAAVSLLRAKHPSVAIVFADYYRPVIKFVQNPDEFGFSESSKLRACCGGGGGAYNYDVAAACGFPGAAACPDPDAAINWDGIHLTEAAYGQVAAGWLRGPYAHPPILAAVQRSDEGNPIQMATSMPASF

SEQ ID NO: 113859 - protein, 102 aa, Oryza sativa
  Clone ID: PAT_MRT4530_17606C.1.pep
ARSVQISSVLGILLEPIFRFLHPDCFIPCTLQIDLFFLLFSCQEVFHAWASLLVFLCIRKFLFCEKPSVKSCNTSSLLLSWWMDVQFTCCFYAGTRTQFYMY

SEQ ID NO: 113860 - protein, 252 aa, Oryza sativa
  Clone ID: PAT_MRT4530_17607C.1.pep
MFHGGRPLSLRGSLKALEADIHHANTLAHAIHRAYGGACVQMRLSYSSMAPIILNLIQWMDCSCSLSYTLPSYLGLLEVLVYKVYVDEDASISTNIERRASLKEFYAVIYPFLQQLEGNLMEKDCNEKGWCKEAASGGGGRKLYADDKDDEREDECGICLETCTKMVLPNCNHAMCINCYRDWYTRSQSCPFCRGSLKRVRSRDLWVLTGDDDVIDTVTLEKENVRHFHSFIDSLPLIVPDNLLLVYYDYLV

SEQ ID NO: 113861 - protein, 418 aa, Oryza sativa
  Clone ID: PAT_MRT4530_17608C.1.pep
MALVLHTFDGNKNAFKALIAAEYSGVKVELAKNFQMGVSNKTPEYLKMNPIGKVPILETPDGPVFESNAIARYVTRSKSDNPLYGSSLIEYAHIEQWIDFSATEVDANTGKWLFPRLGFAPYVAVSEEAAIAALKRSLGALNTHLASNTYLVGHSVTLADIVMTCNLYMGFARIMTKNFTSEFPHVERYFWTMVNQPNFKKVMGDVKQADSVPQVQKKAAAPKEQKPKEAKKEAPKEAPKPKAAEKPEEEEEAPKPKPKNPLDLLPPSKMILDEWKRLYSNTKTNFREVAIKGFWDMYDPEGYSLWFCDYKYNDENTVSFVTMNKVGGFLQRMDLCRKYAFGKMLVIGSEPPFKVKGLWLFRGPEIPKFVMDEVYDMELYEWTKVDISDEAQKERVSAMIEDLEPFEGEALLDAKCFK

SEQ ID NO: 113862 - protein, 414 aa, Oryza sativa
  Clone ID: PAT_MRT4530_17609C.1.pep
MALVLHAGSGNKNAFKALIAAEYSGVKVELVKNFQMGVSNKTPEFLKMNPIGKIPVLETPDGPVFESNAIARYVTRSKADNPLYGSSLIEYAHIEQWNDFSATEVDANIGKWLYPRLGIAPYVAVSEEAAIAALKRSLGALNTHLASNTYLVGHSVTLADIVMTCNLYMGFARIMTKSFTSEFPHVERYFWTMVNQPNFKKVLGDVKQAESVPPVQKKAPPPKEQKPKEAKKEAPKPKAVEKPEEEEEAPKPKPKNPLDLLPPSKMILDEWKRLYSNTKTNFREVAIKGFWDMYDPEGYSLWFCDYKYNDENTVSFVTMNKVGGFLQRMDLCRKYAFGKMLVIGSEPPFKVKGLWLFRGPEIPKFVMDEVYDMELYEWTKVDISDEAQKERVSAMIEDLEPFEGESLLDAKCFK

SEQ ID NO: 113863 - protein, 62 aa, Oryza sativa
  Clone ID: PAT_MRT4530_1760C.1.pep
GFLHTCGPVVVGLAKVFCANDFCRKVVQIFVTSPWYVLILFPTVEVDLPKNQEKCLPSALGV

SEQ ID NO: 113864 - protein, 135 aa, Oryza sativa
  Clone ID: PAT_MRT4530_17610C.1.pep
MAVEKNTNTRAAHSMALPITHACRCRPAAAQVALCLQASARAWSRTSKVLDLDALSTHDATATGLYDAQGFIVRSIMNANDDQKLHLETEASHANLGCSEVDEVEICSCEHSSGQIYSNLATGFRRDQLQEKSPS

SEQ ID NO: 113865 - protein, 989 aa, Oryza sativa
  unsure (1)..(989): unsure at all Xaa locations
  Clone ID: PAT_MRT4530_17611C.1.pep
MALVLHAGSGNKNAFKALIAAEYSGVKVELVKNFQMGVSNKTPEFLKMNPIGKIPVLETPDGPVFESNAIARYVLSHCHFPEVTRSKADNPLYGSSLIEYAHIEQWNDFSATEVDANIGKWLYPRLGIAPYVAVSEEAAIAALKRSLGALNTHLASNTYLVGHSVTLADIVMTCNLYMGFARIMTKSFTSEFPHVERYFWTMVNQPNFKKVLGDVKQAESVPPVQKKAPPPKEQKPKEAKKEAPKPKAVEKPEEEEEAPKPKPKNPLDLLPPSKMILDEWKRLYSNTKTNFREVAIKGFWDMYDPEGYSLWFCDYKYNDENTVSFVTMNKVGGFLQRMDLCRKYAFGKMLVIGSEPPFKVKGLWLFRGPEIPKFVMDEVYDMELYEWTKVDISDEAQKERVSAMIEDLEPFEGESLLDAKCFKFTNIYMNVKNARKSYNLKRRKNAQGPFRSNGLDWKGPECQTNARLRSGWICSAPSDLSQGLLIGRPRSPARNPRRDHLKSSEWELRRRPRRDGALDLVEKLGMMRWGVVFFFSFSNCSICGLLYESSVKHIVFFCTIRVDLVLHTFDGNKNAFKALIAAEYSGVKVELAKNFQMGVSNKTPEYLKMNPIGKVPILETPDGPVFESNAIARYVLSSSHFPEVTRSKSDNPLYGSSLIEYAHIEQWIDFSATEVDANTGKWLFPRLGFAPYVAVSEEAAIAALKRSLGALNTHLASNTYLVGHSVTLADIVMTCNLYMGFARIMTKNFTSEFPHVERYFWTMVNQPNFKKVMGDVKQADSVPQVQKKAAAPKEQKPKEAKKEAPKXEAPKPKAAEKPEEEEEAPKPKPKNPLDLLPPSKMILDEWKRLYSNTKTNFREVAIKGFWDMYDPEGYSLWFCDYKYNDENTVSFVTMNKVGGFLQRMDLCRKYAFGKMLVIGSEPPFKVKGLWLFRGPEIPKFVMDEVYDMELYEWTKVDISDEAQKERVSAMIEDLEPFEGEALLDAKCFK

SEQ ID NO: 113866 - protein, 94 aa, Oryza sativa
  Clone ID: PAT_MRT4530_17612C.1.pep
KHQCIHIVGKVDISVVEEADKAAAAWAIHSRVVNLWKNSFEGPPSFSTSKSCCEGGGRCVDLLQRSDATAVSNARLAELAPILRPIQHMDGFNR

SEQ ID NO: 113867 - protein, 130 aa, Oryza sativa
  Clone ID: PAT_MRT4530_17613C.1.pep
MRRRVQAIGGAHAAGAARHGVRRRQGIHFGHLPADAAAAATGAAGAFGPPTLSPPPITVPPRGKAATRDGLAVAFSVSRHKSKPLPMHPHRPRISNFAARAGALASFHRGRHPRPHGHFAPGPAAAALLL

SEQ ID NO: 113868 - protein, 59 aa, Oryza sativa
  Clone ID: PAT_MRT4530_17614C.1.pep
MSRHLKIPSLLWSAVGLAMVTISKRLQSSFWEVQMKRNENGSYSPALAPPLLELELSST

SEQ ID NO: 113869 - protein, 130 aa, Oryza sativa
  unsure (1)..(130): unsure at all Xaa locations
  Clone ID: PAT_MRT4530_17615C.1.pep
XYLSRVLEVAFXALEGLNNQSFLTELGNRLHKGLLNHWQKFTFSPSGGLRLKRDITEYGEFVRSFNAPSIDEKFELLGIMANVFIVAPESLASLFEGTPSIRKDALRFIQLRDDYKTAKIASMLNSIMAE

SEQ ID NO: 113870 - protein, 528 aa, Oryza sativa
  Clone ID: PAT_MRT4530_17616C.1.pep
MGSKTKGCCGWLIVALVASLVATAAVVAIMKKKVGGGSGRKLKPLPVPGPPGAIDSKYGDALGVALQFFQVQKAGKLENNQIPWRGDSALDDGKPAGLDLSKGMYDAGDHIKFSFPMAFTATVLSWSILEYGDQMSATKQLDPALDALRWITDFLVNAHPSDNVFYIQVGDPDLDHNCWERPETMSEKRPLTQINTKSPGSDVAAEAAAAMASASIVFKSRDTTYSDSLLQHAQKLFTFADTYKGLASDTYPKLQNYYNSTGYQDELLWAASWLYHATGDQTYLSYVTVENGKAFADWGRPTWFSWDDKLAGTQVLLSRLNFFGSKQTSNAENMGLKMYRDTAEAVICGLLPDSPSATASRTGGGLVWISGWNSLQHATNAAFLAVVYSDYMLTSQTAAVQCSGKYYSPTDIRNFAISQANYILGDNPMKLSYLVGYGSSYPQQVHHRGASIPADAKTGCKGFQYLHSTSPNPNVAMGALVGGPFQNDTFVDSRDNAVQTESSTYNSGTLVGLLSGLVTTSSVAQSFT

SEQ ID NO: 113871 - protein, 142 aa, Oryza sativa
  Clone ID: PAT_MRT4530_17617C.1.pep
SLQGGLMPPSPSRSRLSMDAASTTTSSANIVTKTTTRKMTTNSARRVRPCHHDEEEAKTSRCQIRRLRLPHRRIHHPRRRTVCHGRGSTAAAPFPSNTTEPRRCCRSALLSHLPAKMGIGYSQAVGHWTPLHTTYNYTGGQS

SEQ ID NO: 113872 - protein, 46 aa, Oryza sativa
  Clone ID: PAT_MRT4530_17618C.1.pep
FSGTVNSCDPRLSCSVSNYVNRHAFPVIVYGFSPQTSDFKKRTTGQ

SEQ ID NO: 113873 - protein, 850 aa, Oryza sativa
  Clone ID: PAT_MRT4530_17619C.1.pep
MTVSGEPRRVVLLVDVDPLLPSPKASAPTAQPLASHYLAAVLPAATSLLSASPAASLSAARLFFSSLSPILSFSLLPGPLPAAPAPLSFHLHGETLASLAPLRRLALPACAHRRVPPSSSIAKSILQLEHDYPWDDDPESIRRRRVFQQTPNLVVLFTAAAEFEEFGGDADFGGRFRGVFRPVRDRLAARGVQVCWVAVGGCGEGVRRAVTELGWWFTAADAVALGSAIATPGLVWGCLGLGGEEGGSRGEVVLEIADVEGKPLVCKGCEVEVIGSTPWRLRGDSVFKMHVKAVCEVGNWEQLITGDGDAVMVRGCFQEAGKIDGEEAAEKEFFAHKIVELMLGDDKDKLGGGKPIWQLILVFLHRKNYCAMVSISDGDGNPLDGVIVPLSMNYALLHVAKNGAGFGQVVAKGPALLDSCMSDTSKEQSARKKRSKLVSKLFEATTWISFCDVLLKSADGSMPVVDLEDLYFSRYAATSKKMRFLKCWMKQVKQQCLSTSSSIVAVAEEEKHLSSKDEAETKSPVLEEDASAPLVNFSVDELVCDKEDKPMDEINCNKVDKPVGDETSDFSSMEDLEAFLDSVPQKIEQSLCSEDADLGNLAGRLVGLSVHALMIKHGKISVRYSNRGEVEDVSDGKIACEASGILLFIDINLQGDSFQSNSILEFAEKTIKIRYIESMEDVIKKIYTEMEFDLFDDEVECSESLPSSSNHDVDGSNSRRHRSNSAPHLLRRDHGGGSSHEERLARAEERRNRDRRLSSFTSWVPDLRRVWALKHPGKEPAAAAPPQSRQGASKRRKRRRAACTDMVCETPMTVAASGKRKPGDAAGSLATVSKALFHDDEAAGISSSSV

SEQ ID NO: 113874 - protein, 155 aa, Oryza sativa
  unsure (1)..(155): unsure at all Xaa locations
  Clone ID: PAT_MRT4530_1761C.1.pep
IXFHQPPIISIGIQXPATCGTSKSPPLTGVTSISTLSPNTLXHPIPRGAHHAHHCHHLITGTTVTVTISLWHRCHHPPTAHHSSFVADRHCAIGSVHTLRLSYQHCTVAHSXLPQCGSPLGRVVVGWGLTXMGLGGTRTDCXVLXVPPKXRIVXL

SEQ ID NO: 113875 - protein, 79 aa, Oryza sativa
  Clone ID: PAT_MRT4530_17620C.1.pep
MCPLRVILIFLSATIAGFFLIRGLNADPDLHDDADASESPRERPPVPLHSKVGSALKTGFWTMVDMASGKYLWRPVMEF

SEQ ID NO: 113876 - protein, 92 aa, Oryza sativa
  Clone ID: PAT_MRT4530_17621C.1.pep
MCPLRVILIFLSATIAGFFLIRGLNADPDLLHDDADADASESPRERAPVPLHSKVGSALKTGFWTMVDMASGKYLWRTLVSPPTKCESEKAQ

SEQ ID NO: 113877 - protein, 99 aa, Oryza sativa
  Clone ID: PAT_MRT4530_17622C.1.pep
MSAMETDINAPPPPAPAPAGAGEGSSSAAGPSSRKPNKRFEIKKWNAVALWAWGIECQANQASATSEECTVAWGYQVSVIMLFTSIASAGGSRLAKCAR

SEQ ID NO: 113878 - protein, 233 aa, Oryza sativa
  Clone ID: PAT_MRT4530_17624C.1.pep
KKSHLPIPTWSGGIPESGSIESSRCRPWRPTSTRRRPPSPPPPAPARDPPLPPAPTPASPTSASRSRSGTPSRGRFSSRPNLLLLLALPSHPRVRHGQGRRRRGRAPLHRRRLLLRGQEGQALRDQEVERCLPLGLGHRRGQLRHLPQPHHGPLHRVPGEPGERHQRGVHRRLGSLQPCIPLPLHQPLAQDPSSVPSRQQRVGVPEVWSLDNSLSGAKAASSFSYQVLALSDN

SEQ ID NO: 113879 - protein, 114 aa, Oryza sativa
  Clone ID: PAT_MRT4530_17625C.1.pep
REERAFVLKFSAIEIYNEVIRDLLSAENTPLRLWDDAEKGTYVENLTEVVLRDWNHLKGLISVCEAQRRTGETFLNEKSSRSHQILRLVCSLLKSMNYSLRPKISAAMVFCAQL

SEQ ID NO: 113880 - protein, 41 aa, Oryza sativa
  Clone ID: PAT_MRT4530_17626C.1.pep
MPFLLQSTADSFVFALRTEFEEAPDAAFEGEDPHPVQGKPL

SEQ ID NO: 113881 - protein, 521 aa, Oryza sativa
  Clone ID: PAT_MRT4530_17627C.1.pep
MAAVGACFLQQLAVVALLALWCSHGAIASDPGLLQDFCVVDKMSQVRVNGFPCKDAKDVVAGDFFFSGLHMAGNTTNKQGSNVTTVNVAQIPGLNTMGVSLVRIDYAPNGLNPPHTHPRATEIPTVLEGSLYVGFVISNPENKLFTKVLNKGDVFVFPQGLVHFQFNNGTNNAVALAALSSQNPGVITVGNAVFGSKPSISDDILAKAFQEMFKFECDSSERNFGYVAPSPLRLLTITLSLPYMSFTLSSVLISYLKIANSIKILLVQGVEQGIYGLGIELEIAMVNILQVVAGDSKTYINNISNVEAHSLKPLVYQSDRSQRGHTGVGSISSGSPNGGHHTGSLAARPIECGGLGIMNLEFFGQALRLKWLAQRLEQKGRPWTLVNSRPTTDKQDLFRAASTLEGLENADRIVGGAVPTARRRDRRAIKVVATSPARLWLQGGLRLVVHACLLGGLERKECQDFRAQKLHGGVGLQGYPGGSPRLERSRRVQRMRVKLRESFFVLFWGLWFPADLPTSTV

SEQ ID NO: 113882 - protein, 196 aa, Oryza sativa
  unsure (1)..(196): unsure at all Xaa locations
  Clone ID: PAT_MRT4530_17628C.1.pep
MSHEVGKAPIYNGTNYYTXKNKMFTHFKAMSFHIXNIVDVCFAITGNNLKNVDHRNLQFNAQAINALFNSLNQEDFDRISNLEIAYENWNMERKIYEGTSEYKDAKLHFFKIQYETFAMLPDESVNDMYGRLNVIVNNLKGLGATFQXLALVRYSIXSVPKNIDSVYTFVLNIEVFDANPAFVFRGTNNNELYIVK

SEQ ID NO: 113883 - protein, 143 aa, Oryza sativa
  unsure (1)..(143): unsure at all Xaa locations
  Clone ID: PAT_MRT4530_17629C.1.pep
IPPAPAGVFFXPAGYRDKIVDFPWDFLDPWAIVRGFYKGERTGGGGTFPIWGLSGLIYRPKKXVFSKLGNFQTPLAHCGSRRLIVGPFVLPRPVKTLGGFLFFGPLKSSLPKMGLSFGGGPRLGPLQGLGGFFSLLGWPQSGR

SEQ ID NO: 113884 - protein, 140 aa, Oryza sativa
  Clone ID: PAT_MRT4530_1762C.1.pep
MGGLFKTATLPEQRTNLGEPICFAWRYGDDGPLHLSAGPILFARGRISRALFLREAARGALGFCADDLGVGGRQARPSRSGPEAILTPSDKQVRDAADHIVHSFEGTAPRLAFALDSDEEGGDGGADDSDDKAGDPGASE

SEQ ID NO: 113885 - protein, 2122 aa, Oryza sativa
  unsure (1)..(2122): unsure at all Xaa locations
  Clone ID: PAT_MRT4530_17630C.1.pep
MAKPGSGGGAEAHARSRKYDYVENSNLVLGSGSGSRPRGGADEHTGEPETLRGRIDPRSFGDRAVQAKPPVEPPRRRKARDAADHDIGHRLDAKRRRRAASACTAQREVSVLTLIDDVVYRPRTKETRAAYEALLSVIQRQLGGQPPDVLGSAADEVLAILNNDKIKSPEKKRGIDKFLDPISDQMFHQFVSIGKLITDFHDTAVCDSASELDENFGVAVEFEQNEDDEGSDSDQVLDDLDEDDGDTMLNAAGAMQIGDELDDDDMHNSNEELAINAQDIDAYWLQRKVSQAYEDIDPQVSQELSLEIMSFLSESDDKDVENRLVTLLGYDNFDFIKLLVRNRLKIFWCTCLARAEGQEKRKMIEENMLSDPTLSPILEQLHATRVSAKDRLKNMEKSIRDEAKRLTEKQNAGINGARDQRVVKRDMESGWLKGQKQLLDLENLTFHQGGLLMVNKKCELPPGSFRTPHNGYEEVHVPALKAKPYENGEKVVKISDMPDWAQPAFAGMTQLNRIQSKVYDTALFKPDNIILCAPTGAGKTNVAVLTILQQIGLHMKDGEFDNTKYKIVYVAPMKALVAEVVGNLSARLKEYNITVRELSGDQNLTKQQIDETQIIVTTPEKWDIVTRKSEGLFWRALFRSVRQTETTKEHIRLVGLSATLPNYQDVAVFLRVHSGGLFHFDNSYRPCPLAQQYIGITVKKPFQRFQLMNQICYEKVMAAAGKHQVLIFVHSRKETAKTARAIKDIALSNNKLTCFPKVESASLEILADHANHVKSNDLKDLLPYGFGIHHAGLTRVDRELIEGLFADKHLQALVSTATLAWGVNLPAHTVIIKGTQVYNPEKGAWTELSPLDVMQMLGRAGRPQYDTHGEGIILTEQSELQYYLSLMNQQLPIESQFISRLADHLNAEIVLGTIQNVREACTWLGYTYLYIRMLRNPTLYGLPADIMETDNTLDERRVDLVHAAANILDWNNLIKYDRKTGYFQVTDLGRIASYYYVSHRTISTYNECLKPTMGDIELCRLFSLSEEFKYVSVRQDEKMELAKLFNCVPIPVKESLDEPSAKINVLLQAYISRLELEGLSLSSDMVYIRQNAGRLLRALFEIVLKRGWAQLAEKALNLCKMIDKHIWNVQIPLHQFPSIPKEILMKLEKKELAWERYFDLSSQEIGELIRNPKMGMQLHKCIHQLPKLNLSAHVQPITPTVLGFELTITADFQWDDELHGYVEPFWLIVEDNGGDNILHHEYFMLKKQYVDEDHTLNFTVPIYEPLPPQYFIRVVSDKWLGSQTILPVSFRHLTLPEKYAPPTELIDLQPLPVTALRNARYESLYCAFKHFNPIQTQVFTASYNSDDSVLVAAPTGSGKTICAEFAILRNHQKAVSGDSNMRVVYVAPIEALAKERYKDWESKFGELARVVELTGETAADLKLLDKGEIIISTAEKWDALSRRWKQRKNVQQVSLFIFDELHLIGSENGHILEIIISRMRHMANHIGSNIRIVALSASLANGKDLGEWIGTSSHSLFNFPPAVRPLPLEIHIQGWDVAIFEARMQAMSKPTYTAITQHAKHGKPALVFVPTHKHARLTAVDLCAHSSAESGGTPFLLGSEDEMDTFTSGVNDEALKYTLKCGVGYLHEGLSDFDQELVTQLFLGGRIQVCVASSKMCWGRSLPSHLVVVMGTQYYDGRGNSHTDYPVTDLLQMMGHANRPLQDDSGKCVILCYAPRKEYYKKFLFEAFPVESHLQHFLHDHMNAEVVAGLIENKQDAVDYLTWTFMYRRLAKNPNYYNLQDVSHRHVSEHLSELVETVLNDLESTNCLAIEENIYLKTLNLGLIASYYYVTYTTIERFSSMLTQKTKLKGLLEILASASEYADLPSRPGEQKSIERLVHHQRFSVEKKVRYDDPHVKANALLQCHFSRRTVEGDLAADQREILLPAHRLLQALIDVISSNGWLTLALNAMELSQMVTQGMWDRDSVLLQLPHFTEELARRCQENEGKAIETIFDLAEMSTHEMQDLLQLPSSQLQDIVGFLRRFPNIDMAFQVLEGDGGSVTVQVTLEREMADLLQSEAGPVHAPRFPKPKEEGWWLVIGDRSTDQLLAIKRVKLQKRARVKLEFAAPXEAGRKDYMVYLMS

SEQ ID NO: 113886 - protein, 111 aa, Oryza sativa
  Clone ID: PAT_MRT4530_17631C.1.pep
MTMVAAACMHRSGISAADGLVTNGSSLTCGGDEAKGSTATTTTVATCGLRSSGSATGRLQNGGSTASNRGSERAEERTLRLHCPTAAAEAGARRDGSGGGGGEGGEAVAAS

SEQ ID NO: 113887 - protein, 164 aa, Oryza sativa
  Clone ID: PAT_MRT4530_17632C.1.pep
MDNYQGQHGYGADRVDVYGNPVGAGQYGGGATAPGGGHGAMGMGGHAGAGAGGQFQPAREDHKTGGILHRSGSSSSSSSSEDDGMGGRRKKGIKEKIKEKLPGGNKGNNHQQQQMMGNTGGAYGQQGHAGMTGAGTGVHGAEYGNAGEKKGFMDKIKEKLPGQH

SEQ ID NO: 113888 - protein, 164 aa, Oryza sativa
  Clone ID: PAT_MRT4530_17633C.1.pep
MENYQGQHGYGADRVDVYGNPVAGQYGGGATAPGGGHGVMGMGGHHAGAGGQFQPVKEEHKTGGILHRSGSSSSSSSSEDDGMGGRRKKGIKEKIKEKLPGGNKGNNQQQQQMMGNTGGAYGQQGHAGMTGAGTGTGVHGAEYGNTGEKKGFMDKIKEKLPGQH

SEQ ID NO: 113889 - protein, 55 aa, Oryza sativa
  Clone ID: PAT_MRT4530_17634C.1.pep
IFLNLNSISIIRNKNDKFNCKPTLTNMTSEVQILQGKDIHHGWLIARRVDAAAAA

SEQ ID NO: 113890 - protein, 101 aa, Oryza sativa
  Clone ID: PAT_MRT4530_17635C.1.pep
LLGRAGRFLEAIQIIERMPFMADDSVWGALLGACKIHGNIELSAQIREKLIVLGGQQPGRYVTVRNMYLEEGNWYAATRMGEVMQDAGIKKKVCVNSVQLN

SEQ ID NO: 113891 - protein, 47 aa, Oryza sativa
  unsure (1)..(47): unsure at all Xaa locations
  Clone ID: PAT_MRT4530_17636C.1.pep
FIEGCACWKFFFLGHSSLSXYKHFYDISILNIHRGVALNVQGFGQKE

SEQ ID NO: 113892 - protein, 80 aa, Oryza sativa
  Clone ID: PAT_MRT4530_17637C.1.pep
KQQTKALLGVGSGPQANTGPYNQCTRPASGNKSTSRKTVERVPIEFTLGPCYGRQTACTIDHALSCVHSPYWTSYLIHDA

SEQ ID NO: 113893 - protein, 175 aa, Oryza sativa
  Clone ID: PAT_MRT4530_17638C.1.pep
DYDRAWARGGLMWSGRRRAQAEPQRTGHYRAQQQQWRQRLRCHNGWIHRHRPYDRQIWWICAATVIGVRRGSDGGTRRGDGGDELRGLGDGDHDRWQTVATTSPADGSLAKANNISTRPRKFDFRVQMSHPHEKLTILHTPPGRRTAQPPHGQKAISVKIAVNTIYPGPWRKRLD

SEQ ID NO: 113894 - protein, 126 aa, Oryza sativa
  Clone ID: PAT_MRT4530_17639C.1.pep
TCHHKHQTNGNSPAEDADAAVVQGRRAGGGNTPATAEAGGARREGAGDGEEGGRHRRERRGGGRRQWVHGQRAPPLRLLRRRPAGRALPVCVRGDGRCRRARRVNYREGVFTCAFATSFVLIDVWR

SEQ ID NO: 113895 - protein, 178 aa, Oryza sativa
  Clone ID: PAT_MRT4530_1763C.1.pep
VLLLALPNDPSTGVAHAAVFFFMGFAISWNASSTNNPIFAEIVPEKARTTVYALDKCFEAVFASFAPPIVGVLAEQVFGYKPVSSDASVETDRENAAALAKAVYTEIAVPMAICCLTYTFLYCTYPRDRDRARRNILMASDDQLCQEAGESDSSEICTQEDEEFAVGSINQRLIHARE

SEQ ID NO: 113896 - protein, 66 aa, Oryza sativa
  Clone ID: PAT_MRT4530_17640C.1.pep
MALPPYPADRRSGQGASGCHVVPLGPSPVLPRGLGRPNCPLPHSMRGVPRVRQGTALNPTQGQSVA

SEQ ID NO: 113897 - protein, 530 aa, Oryza sativa
  Clone ID: PAT_MRT4530_17641C.1.pep
MAEIFVEIEIEIHAWRCTLQMGAHLVETNCCRERVWRYAMHGSCSIDIQRLAADLETKLCNVDLDGGRRWRRSPECLISKVKPQVRRVDDSQYTPQVVLVGAYHHKPLDSTDQLAKWTALRRVLPDDGEQRASTLRRCLEAIAGVEDEARSYYEDGAKTWRENQMFVQMLLLDAWFVLDIFNVGGEAAAAVGSRGGSAVDYIFAVRDVFYLLENQIPFFILEKVYELVRVGNSGQDQDQRTQTCTSPPPPQPPGATAIAGGGPSSSSTVVVDGFLRHLRSLLQDQGYSNVEVDITSTRPCHLVHLLHMHFTPMAMSPADDTDDAAAVPNRRARATVYRWRGATQYHAAGVRFKKRALGAAAGDARCVLDVELRRLTTLHVPTLTVDNNTWRVLRNLMALEQNNPHLGSHVTAYCLFVSQLAGTASDVALLARKGVVVHFMATDEDVADGFAGLCRGVALDVDDARRNYLQPTWERMERWYSSRPVNWMALLRRRHLSNPLVAIALLAAITGLVCEVVQAVYAVKTYRPTI

SEQ ID NO: 113898 - protein, 96 aa, Oryza sativa
  unsure (1)..(96): unsure at all Xaa locations
  Clone ID: PAT_MRT4530_17642C.1.pep
HLSVLSASSTNHVGFVILVELGPRHQGRRDTFFSPFGLNPKCRSQHRQCVMCRFRGAQQSRLPLCQXQCTYFQAQGSSGSAFPPYPCAASHFSDLR

SEQ ID NO: 113899 - protein, 219 aa, Oryza sativa
  Clone ID: PAT_MRT4530_17643C.1.pep
MDVDQLILFVFVCCLSSRFADAYDPVDPNGNIIINWDFQSIENVYTVMVSVHNHQLYRHIEQPGWRLSWRWAGNEIIWGMTGAEATEQGDCHRIRGATRPHCCEKQPVIVDLPPGTPYNNQVSSCCRGGVLSSLTQNNRTSTAAFQMVVGGFRRATYHDGDRGPALPSRFGVGVPGYSCSNATKVNATRSPIGRTGTSSLCVRLLPFLSYRGACVEREF

SEQ ID NO: 113900 - protein, 174 aa, Oryza sativa
  Clone ID: PAT_MRT4530_17644C.1.pep
MSGSFGGWILKNSPIPITKKPDLNDPVLRAKLAKGMGHNYYGEPAWPNDLLYIFPVVILGTIACNVGLAVLEPSMIGEPADPFATPLEILPEWYFFPVFQILRTVPNKLLGVLLMVSVPTGLLTVPFLENVNKFQNPFRRPVATTVFLIGTAVALWLGIGATLPIEKSLTLGLF

SEQ ID NO: 113901 - protein, 72 aa, Oryza sativa
  Clone ID: PAT_MRT4530_17645C.1.pep
MACGATCHFEFGPNSELVRALHTDQPTYPARSCGGKPQILPMLVSVRRTRPGRGRTAECRPHASWASMTRTD

SEQ ID NO: 113902 - protein, 157 aa, Oryza sativa
  Clone ID: PAT_MRT4530_17646C.1.pep
MVRSLDSYPSIKDVTYSCGYCGYALNLSSSTRNTANIGSKYGKQIKKGVVSFFAVDESRFTQADEVTCVPYFHSRRSWGLFRRRSRLLCRKCGGRIGSAYEEDEPAAAALPACDGPDDLRTTSSGSSGSASSQKNYVIKINALQPSSDDSDAVAFTL

SEQ ID NO: 113903 - protein, 118 aa, Oryza sativa
  Clone ID: PAT_MRT4530_17647C.1.pep
TPPTPPTPASASSSSASACARAAAPPPGEASWRCAARTPPSPSRHPSPPRTTPAATAASCSATAPRRRRPRRTTCSSATAPTPSPLARRRTHTRPGHGPRRRRRRQRRRLSSAWTDWW

SEQ ID NO: 113904 - protein, 240 aa, Oryza sativa
  Clone ID: PAT_MRT4530_17648C.1.pep
MAEKGCLKRLQKEYHSLCKEPPPQIVARPLPNDILEWHFVLEGSAGTPFEGGYYYGKLKFPPDYPFKPPSISMTTPSGRFAPHKRICLSMSDFHPESWNPMWSVASILTGLLSFMMDDALTTGSIRSTEGEKRRLAKASLAYNCESKNCPHFRKMFPEYVEKYNQQKQMEQTVAEPETQENPAPAPSPAVQQQAAVVANKAKPAAEAAGEQKQKKRVPFWMMLVMFSVFGAVMALPLMQL

SEQ ID NO: 113905 - protein, 118 aa, Oryza sativa
  Clone ID: PAT_MRT4530_17649C.1.pep
MAKASRLVVNPSSFAQQVRLRWFAYGETLRTQLKGFAIMSKGPTGKSSLQAKQEGFARRCEAFAKKPKDQNGPRRPFTNMGRAQKPMKRPLNQMDIVCPRKCPYQKGIHVNSPANIKP

SEQ ID NO: 113906 - protein, 321 aa, Oryza sativa
  unsure (1)..(321): unsure at all Xaa locations
  Clone ID: PAT_MRT4530_1764C.1.pep
NATPSFRSIVLAPSRASPWSLAISPPSSSLSCAAGRLQPPLPPRRSAVRSRRRLLQHRSRLLSHGLPSVSRGDPRSYVPAVALLFPSRRPPPAASPSSPERRPAAPSSPSASQPPPLPRSALRFAGKPPEARPRRQPVALPPPTPSSRLLFLVGTPIDVAVYFVDAVASSPSSSTPRFRPEAAAHRREPLHPPRRSCSAARPSSPVHRSAAPPPPSASQPRRRPRHRFPFGRTPPXPLPAALAVSSPAPVVVVVVLPSFPVVVAPXSSSSSSAPRRQALCRPRLAFVQGSPPKPSPRRSSPSFPAASAAPVRHCRSLASLR

SEQ ID NO: 113907 - protein, 316 aa, Oryza sativa
  Clone ID: PAT_MRT4530_17650C.1.pep
YNVIGMCASLEGAFCKLLDSFSVCGTLLKDVESMDFRHLTMLIKYTIVPLVKSCPPDLWVEWIDMLLPPVFHYCEETLYSSWCSLLYKDIVSVPDKFCESFSKEMVEKAGKGLLSELTREASYLLAAMALPEQNGSIVSTADLESTSSSLVGYLLCHDNIRSSILRLINYIFGYWKDGEARIIAAPFCHSLIQLAIATHNDELLYFVQDDILPKIVQCLTLEPKSDNNALYLLCEDAYHCMQSQGSAQEGERNGNTAEIFEDWLSKQMIVARYKYTSSDELQDMVWIWEIEEEFIAYLHTYVDMLHKVDEIGDTME

SEQ ID NO: 113908 - protein, 55 aa, Oryza sativa
  Clone ID: PAT_MRT4530_17651C.1.pep
PPLNGGTGTTKRLGPKRTRQDLAGLLDMVLAYLVGTYLQLKLTRRLTGTSVWPYV

SEQ ID NO: 113909 - protein, 67 aa, Oryza sativa
  Clone ID: PAT_MRT4530_17652C.1.pep
MEATTNLKRYVVLERSVEMYKIYILRLKAKEARQHRLFLKRSKCFFGVTSVAYLGHTISGECVSMDK

SEQ ID NO: 113910 - protein, 55 aa, Oryza sativa
  Clone ID: PAT_MRT4530_17653C.1.pep
MSTTVVGLTSVSEDGDAKPKDEREWGGGGGGGSVGRGGQRWGKRGMMTVMPVREG

SEQ ID NO: 113911 - protein, 70 aa, Oryza sativa
  unsure (1)..(70): unsure at all Xaa locations
  Clone ID: PAT_MRT4530_17654C.1.pep
ISYTMESQELTSNCIIQMSCSSHLXWKVTITELHAHDKSCCFVQRSGVSLYLNSEEKLVKYLNALNYTPI

SEQ ID NO: 113912 - protein, 344 aa, Oryza sativa
  Clone ID: PAT_MRT4530_17655C.1.pep
LDSLPHLDQLDALVMVFAWSDESSFLTLQNWVSSVDVQRFEILLCIGNKADLVLGHGAHVEYRRRMQKIGESSTDPHPEYLDFGINESEGCGLLSEEEPQIEIRDSASHWCIEHNIEYVKACASNADFDKCLSVNGDSQGLERLLGALSAHMWPGMILKSGNRITVPSLVEKEESTDDESNYEFEYEVLSHGSDEQWEFIGESSTSRDLEGLNEDTATHDKTNQVVDADANSVASNPLPNGRMTETAEEKLVPQSHKSEVSNDMDNTQADASEKLQAGIPEGNKLFEDEHYGLDDLERLMSEIGNMRSNLRLMPDFQRKEMAAKLAMKMATMFGDNDEEGSEDI

SEQ ID NO: 113913 - protein, 851 aa, Oryza sativa
  Clone ID: PAT_MRT4530_17656C.1.pep
MEGDDFLPEGGKLPELKLDARQAQGFISFFKKLPQDSRAIRLFDRRDYYTAHGENATFIAKIYYHTMSALRQLGSNSDGLSSVSVSKTMFETIARNLLLERTDRTLELYEGSGSSWRLTKSGTPGNIGSFEDILFANNDMQDSPVTVALFPVFQEGQLYVGLSFVDLTNRKLGLSEFPEDSRFTNVESALVALGCKECLLPADCEKSIDLKPLQDAITNCNVLLTERKKVEFKSRDLVQDLGRIIRGPVEPVRDLVSQFDYALGALGALVSYAELLADDTNYGNYTIEKYSLDRYMRLDSAAVRALNIAEAKTDVNKNFSLFGLMNRTCTVGMGKRLLNRWLKQPLLDVNEINNRLDMVQAFVEDPELRQGLRYQLKRMSDIDRLTHALRKRTANLQPVVKLYQSCIRVSYIKNVLQQYDGSFSALIRTKFLNSLDEWLTEDRFGRFASLVETAIDLDQLENGEYRISPRYSSDLAVLKDELSEVENHINNLHKHTAADLDLTIDKQLKLEKGQLGHVFRISKKDEQKVRKKLTSNYIIIETRKDGVKFTSSKLKKLGDQYQALLVINLKFLSQVFENFAAILSELDVLQSFADLATSSPIPYVRPEITASVGVNVLMAQVGSFVPCDRASISVRDCIFARVGAGDCQLRGVSTFMQEMLETASILKGLAWAICEHLVEVTRAPTLFATHFHELTALGHKSGDEHQHVPNLGIANYHVGAHIDPSSRKLTMLYKVEPGACDQSFGIHVAEFANFPEAVVALAKSKAEELEDFSTAPNFSDDSKDEVGSKRKRVFSPDDVTRGAARARLLLEELASLPLDEMDGTKAAETVTKLKSDFEKDAADNPWLQQFL

SEQ ID NO: 113914 - protein, 85 aa, Oryza sativa
  Clone ID: PAT_MRT4530_17657C.1.pep
NGTPTRTRPEIPGGTQGAPPGSKKLNSQRLGDSPLNGNWVKAKLCWVLKGPLKKGFPPGEKGAPKPFPPLGGFFKKFLKKKGLEI

SEQ ID NO: 113915 - protein, 1239 aa, Oryza sativa
  Clone ID: PAT_MRT4530_17658C.1.pep
MGDKMITRKLSFNQKDMDVTEIDLQDYKDVDSIAFYQVPTNVGSGMSMESERLVRVHACTDHNGVSFLHKLLHRLLEHKEMYSNVVNLLFHGIEWQTEGVQLLCSFLGPGSSVKQVEFQKNVFGTKSSAALVPLSEMIQRNNTIKAIVFSECRIGASGVKLLASALAYNRSVEEVQLLDDSIGAKGAEEFSKMIEVNCVLKLLVILDNSSIAAAPIFSAVLARSRRVEVHVWGHCRDTRGGMNSCKIAEFQAGTGSLRIYNNINSTGLQRIACAMAWNTTVTTLDMSGVPLKSKWTKELRGVLERNRMLKTVKLTKCCLRDKAVVYIAAGLFKNSYLESLSLDGNRFGGVGLEHLLCPLSTFSPLQRQANLTLKVLSFGGRQTNIGRYGITAILQMLETNQSLLQLAICDDVNPWIEEIDLHETPLHVAGKTREIYEKLGQNGSSVVPNDLLDLPLSAPTCCQVFLCGQELSGKSTLCSSIKHCMNSMKLPRMDEIRTSKTPIEQMSHTNEYGMNIIFDGNTKLTMCNIGGPEESIPLHDFMFVVHGGPRIFMIVSSLIGKPADKYPKSIDVIEQELIYWLKFVASNSRRRVSHSFIPCVTIVLTHYDKVSHLAEGLQLIVAAVQRLREDFCSYAEIYPTVFVVDSRSQVSVSKLTHHLRNTTKTVLQQAPQVYEVCNDLIRYLHNWRLKNDKSVVKWSEFCEICQLSIPVLRLRSRHDNAEKLDTRRHAVAKSLHDLGEIIFFEELGVLIMNCEWFCQDILSQLGALKSIKIENSGFVRKQDLEKILQEKLCNQIQRSNWRAGASLQSGDIINMLLKLELCYEQDPGNPNTLLLVPAMLEESKEGIQRWQLTMPECRYAGRHMECEDTHMFLTNDFFPRLQVRLHNKIMCPGNQQGAVYNLEKNLIYTVIDGVHVRVELGLDHARDLLSDDDFHDVLHRRYYDLQHLATELAVTPDNLQQSETIAESDAVDPSILGIAKGVEMVLQRLKRIEQGIQDLKEEIARLRYYEYHLVTELHRKMDYVMNYSIQLEDRKVPQLFYLVSLDSRSKKLVTRILPGMRSLRVHMLCEFRQEMHVLEDQVGCDLIQVDNRAVQSLLPYMSKFMKLLTFALKIGAHFIVGMGEMIPDLSREVVHLLDSSVMYGATTSALSLGALGAAAMYGKARNNGSQSGTNDMEDDMKTARQWLVDFLKGQGILTGMDIAQRFGLWRVRYRDDGHIAWICRKHIVARADEIFELPL

SEQ ID NO: 113916 - protein, 176 aa, Oryza sativa
  unsure (1)..(176): unsure at all Xaa locations
  Clone ID: PAT_MRT4530_17659C.1.pep
NLCRRGTLYPHDVTNPESPSRISKADSGSSYANWRGPTDQHQXVPDHTVPGSPGVLPDTTPANPLVPWQQDFPGXLITQPGASHITHVVVLDICSDXFPRNRSLERERTDRTSNFXFEGSXRYSYARCEYRDFTXGCQGXLVTCLARDLELLPRNPRTAGLRAPRLHAERDDSTKR

SEQ ID NO: 113917 - protein, 118 aa, Oryza sativa
  Clone ID: PAT_MRT4530_1765C.1.pep
AAGDLPAEPLSSVNSASAVATRRPVPPCDLCLDSLQLGSSEPLPRFPPTRSTRCSSCNLPLGTLLYGASGFIAASPTTAFWSPHLRLEDLASVKHLQILATFFDGDYMDLGITLMLSS

SEQ ID NO: 113918 - protein, 190 aa, Oryza sativa
  unsure (1)..(190): unsure at all Xaa locations
  Clone ID: PAT_MRT4530_17660C.1.pep
NLCRGGTLYPHDVTNPESPSRISKADSGLSYANGRGPTDQHQXVPDHTVPGSPGVLPDTTPANPLVPWHQDFPGXLITQPGASHITHVVVLDICLDXFPRNRSLERERADRTSSTKFEGESRYSYARYGYRGFTXGXQGSKVTCLARDLELLPRNPRTAVLRAPRLHVKRDDSTKQXKEALLMTTSCATR

SEQ ID NO: 113919 - protein, 538 aa, Oryza sativa
  Clone ID: PAT_MRT4530_17661C.1.pep
MAHAVDSGQTGGPWGGAALLTDPIRFAGVGGGGGEMDLPASRGRWRKRSARSHAPLLVAVLVLLIPASLLLSSAYSSLLRSILPFSGFGGGGGGGGRRCGRSPELEGERFLWYAPHSGFSNQVGELRNAAVAAALLNRTLVVPPVLDHHAVVLGSCPKFRVADASDLRAAVWDHSMQLLRERRYVSMGDIIDLSPIKATVRTIDFRVFVSLWCGVDMRKTCFSGLCCAVSGGGSLPGDYDRCRSMLSGLGGSENGCVYPVQDDCRTTVWTYQENNDGALDSFQPDEDLKKRKKISYVRRRKDMYKALGPGSEAEDASLLAFGTLFSGPYKGSESYFDIHESPKDRRLQTILEKVEFLPFAPEIIATGKEFARKKIKEPFLCAQLRLLDGQFKNHWKATFSALKEKLKAVALEMKKTQGSGPIHMFMMTDLPPANWSKTYLADIAKDGRYKLHTLKESDELVAQTAERLMAAEHGVRSGFIPKNIANTRKDCDPVQLPEILLYVEESVCSCASLGFVGTAGSTIAGSIETMRKNNVCQL

SEQ ID NO: 113920 - protein, 99 aa, Oryza sativa
  Clone ID: PAT_MRT4530_17662C.1.pep
SPHAVPVAAPGSTPPRAAVASPPSAPSASQSRYHLRLPPSPLPNASASLCHFRRRRALPQHRPPLPPPSPSTATASFAAIADGYCSALCCCCHRRNGGG

SEQ ID NO: 113921 - protein, 100 aa, Oryza sativa
  unsure (1)..(100): unsure at all Xaa locations
  Clone ID: PAT_MRT4530_17663C.1.pep
QIHQHPLLLPSNRQRRLLXXRFXXXGXRXLQQQRVAATATERVAATEGERARXARSLXLSPSXLLSXRPPASLLSPPPLASLHSPPLXGEGXCGGGRRGS

SEQ ID NO: 113922 - protein, 391 aa, Oryza sativa
  Clone ID: PAT_MRT4530_17664C.1.pep
MGGAIERDGALLGAALVEPEAAELIPGLPDDVAMECLARVPSRSHRAVRRVCRGWRRAAASEAFRRRRRAAGAAEDVVFLVQATPARGGDDGKGPSAATECALAAANLTTGEWRRVEGAGEGEEEAWGGGVPFFARCAAAGDGRHVAVVGGWEPAALCLTRDVRVLDVPAGVWRRGAAMPDSRGFFGCTGSGGVVYVAGGHDESKNALRSAYAYDVASDAWRALPDMSEERDEPQLVANPGRVLAASGYPTDAQGAFKKTAERYTTTTTGDATAWSSEGDMAPNTAETCLAAVGGKVWAVGAGKGGVREWDGGAWRDVADGPPGMKACVKAVGAGDGDGAAMFVFVFGKVEDGKQYAAWVMEDAGGAARWRGVAVPPGFGGFVYSGAAVRV

SEQ ID NO: 113923 - protein, 124 aa, Oryza sativa
  Clone ID: PAT_MRT4530_17665C.1.pep
VGIVYSYNDRVVQIARKMSSFGLVSSQTQHLIAKMLSDEEFVDEFIRESKLRLAARHAEITTGLDGLGIGWLKAKAGLFLWMDLRNLLKTATFDSETELWRVIVHQVKLNVSPGGSFHCHEPGW

SEQ ID NO: 113924 - protein, 70 aa, Oryza sativa
  unsure (1)..(70): unsure at all Xaa locations
  Clone ID: PAT_MRT4530_17666C.1.pep
VLFSTTAHSHTLSDDIXLLCFFFPSPSSRIRGRRDQWRRRGRASXRSXGXRRSSSPPXSXXSXRXXSXTT

SEQ ID NO: 113925 - protein, 335 aa, Oryza sativa
  Clone ID: PAT_MRT4530_17667C.1.pep
MANGGVCLSCSALVCALVFLTVDGDFVDITYVASAVAKGAVCLDGSPPAYHLARGFGSGVNSWLVHFEGGGWCSNVTTCLQRKRTRLGSSKQMAKQIAFSGILSNTPDYNPDFYNWNKVKVRYCDGSSFTGDVEKVDPATKLHYRGARVWQAVMDDLLAKGMNSANNGSAKNLPSACTSRLSPGMCFFPQNEVKQIQTPLFILNAAYDSWQVRNILVPGFADPHGKWHSCKHDIDQCPASQLQILQGFRDDFLKALKEQGTPSTRGLFINSCFVHCQSETQETWFASGSPMLETKTIADAVGDWFYDRNPFQKIDCPYPCDSTCHNRIYDDPSEA

SEQ ID NO: 113926 - protein, 344 aa, Oryza sativa
  unsure (1)..(344): unsure at all Xaa locations
  Clone ID: PAT_MRT4530_17668C.1.pep
SSHAQPPLLSRTEASAHLRTPSPPHSHPLSLSLLHSPRNPMPAPPSPPXLPPPSNPSPHSPPPATPTPAAXPYPNAPPPXPSSPSSPSPPPPPRWRRHRRSRPRATGSRGSADRRRRRRRSLPPATASSRPPSPPRHQEAPXGAPLRRRRTSPAPPRPSPXSTRPPAPVPPXSSTXYSPATPPPPWLPPLFSPDAQPSRHFPPPPPPPETPXPNSEPPPPXPNAAPPSLHAGPSDAECRSASRXYSPPPPPDPTPTGTMPPSPYPCFSENDVSPYRRIAYPYPYPPSPAPANPLALSPSPLPSSFVSRLSYLPSLSTANRSATGVGGVNKPWEWRSDDGPSGER

SEQ ID NO: 113927 - protein, 56 aa, Oryza sativa
  Clone ID: PAT_MRT4530_17669C.1.pep
AAVQVKIPNQNSLYRKKKSTVHITSIKISKPSGKQPSNQQVPTLLHYSNLEVKKVS

SEQ ID NO: 113928 - protein, 566 aa, Oryza sativa
  Clone ID: PAT_MRT4530_1766C.1.pep
MEVDEVGGRWTFSRANEGYTSCGPVVEMSWHRAGVLLLGAQSCLPVPGVPAVGGIGSVLLSMARMGWKLCHVFRLYTVVKRSSRRMKASVSSSCLPSSACGRRPSLPLFLVCLCLSGEAVRHRVGQVMISGPTTASNVPVPLCEKGAAKRNAAINVVPLTDIIEPLADHQVAASLKEKVAKEVSDAAAVAATTSGGDVPTKGRKFSSVIGHRRKAPTPSPSRRAARAKAAQDESGGTSGAPPSVTSTDVVVVPGSREATPSGPASDLAAGRGPPAAVLTWEELQVEMGRLLEASARGIGHEIMEARSAAASANERADRLAHDLAEAREDLKKIRELVAGNERQRQGLEHRMSELGNNLSEIRGSLRVTYTGLHQLAGECGIKSTIPANPDEFLLTSSLAELAAVMEEIPSKHAASIGEETSNGIYTGACHVLACLRLTHPELDLREILDQGAASDTRKEVMEEVGDLGEYVLPLFKEDVDDEDVQQRGQPKSPAIIPALAFEPHASPDDVDQILAARTKMATTSLDLESALAGQDRRIQYWKTKFEVAELERTMLEVKKEQAVETL

SEQ ID NO: 113929 - protein, 131 aa, Oryza sativa
  unsure (1)..(131): unsure at all Xaa locations
  Clone ID: PAT_MRT4530_17670C.1.pep
SQLLLRRRRRSPARRRPCSRRCPSSPSPPPPPRWRRHRRSRPRATGSRGSADRRRRRRRSLPPATASSRPPSPPRHQEAPXGAPLRRRRTSPAPPRPSPGRRGRRRRCRHGSSTGTRRRHRRRPGSASSCP

SEQ ID NO: 113930 - protein, 53 aa, Oryza sativa
  Clone ID: PAT_MRT4530_17671C.1.pep
ILGVINPPYAAGKWILYLPPPFEFWNPPIFSSSRVKKLEIKQKEKKKKKKKMY

SEQ ID NO: 113931 - protein, 53 aa, Oryza sativa
  Clone ID: PAT_MRT4530_17672C.1.pep
LVHWGFRFLAQCLHQCNHLSLPNNSDCRTWSMCPKSMALTSTIALPLFLPRED

SEQ ID NO: 113932 - protein, 58 aa, Oryza sativa
  Clone ID: PAT_MRT4530_17673C.1.pep
LAFFLHSFLHAPCKQARKERKRRQLGAILERPKTLNNSILLQRDSELGSEYIYTSTSE

SEQ ID NO: 113933 - protein, 68 aa, Oryza sativa
  unsure (1)..(68): unsure at all Xaa locations
  Clone ID: PAT_MRT4530_17674C.1.pep
SPRSLLNXSSASFXXTFLXHAGXADSARPAAPXPRPQEXRPPQTXTCDPYVIRCSVRFFALPASTDDD

SEQ ID NO: 113934 - protein, 45 aa, Oryza sativa
  unsure (1)..(45): unsure at all Xaa locations
  Clone ID: PAT_MRT4530_17675C.1.pep
RFCSASNRMALKLDTSTPNRTTLNARWHADSVSRPRXHDILRQLT

SEQ ID NO: 113935 - protein, 62 aa, Oryza sativa
  Clone ID: PAT_MRT4530_17676C.1.pep
MAGETPPLALTLTELSMRIEEMGGGRFDGRRSLVVLKEALGCCHRSGNLEEEIQTPPLRRNG

SEQ ID NO: 113936 - protein, 62 aa, Oryza sativa
  Clone ID: PAT_MRT4530_17677C.1.pep
GYVCFNNSTYATVIYNSIFASEENEDRRLIFKTDFGSCQKKKAMIVMAGLFPMQRVNKMNSC

SEQ ID NO: 113937 - protein, 69 aa, Oryza sativa
  Clone ID: PAT_MRT4530_17678C.1.pep
MKIGNAGRYGHMHRRAPAIADVERSVTLTSPRPRSLAVADQCSLWPSGDGSVLLTIAFPTRRHLPEHRR

SEQ ID NO: 113938 - protein, 374 aa, Oryza sativa
  unsure (1)..(374): unsure at all Xaa locations
  Clone ID: PAT_MRT4530_17679C.1.pep
MEGYDREFYQFSDQLRLQTASFSGLSLGDSIWSSPSDRRNEPAFDGEYHHFSSPSPAKNAIANINGVAGNLDGPGLIGSGKLAFGATKADRYNSVNLPVDNNNNNKSYGGAAKINNNNVNAFGFNKMGGYNNSSNGGGNYGGNGGDVKSYFNKSVGRPASNNNNNNSNGGGGYYGKKGGDGAGGKKKHAKNSDSGAQASDKRFKTLPASEALPRDEAIGGYIFVCNNDTMEENLKRQLFGLPSRYRDSVRAIRPGLPLFLYNYSTHQLHGIFEAASFGGTNIDPTAWEDKKCPGESRFPAQVKVATRKIYDPLEEDAFRPILHHYDGPKFRLELSVAEALSLLDIFXTRMTPEATASLLLLAEEYQGTAGEGHK

SEQ ID NO: 113939 - protein, 93 aa, Oryza sativa
  Clone ID: PAT_MRT4530_1767C.1.pep
SVRENCSKLKDRSIDLVIANRCMRINICFGPKLIDTLVEWSTEGVTLNLGQNHQWSKSSSQGLEVLQSSWLNVASSRACPTGRSGMQQPPWWR

SEQ ID NO: 113940 - protein, 316 aa, Oryza sativa
  Clone ID: PAT_MRT4530_17680C.1.pep
MELRELGATGLRVSPVGFGASPLGHVFGDVPRDVARAAVRRALDLGINFFDTSPYYGGTVSESVLGDCLRAAGVPRDRFVVATKCGRYREGFDFSAARVTRSVDESLARLGLDYVDILHCHDIEFTDLDQIVNETIPVLQKIKESGKARFIGITGLPLSIYTYVLDQVPPGSVDVILSYCHYGINDTALVDLLPYMKSKGVGVISASPLAMGLLTDNGPPEWHPAPKELKLACRAAADHCKKKGKNITKLAMQYSLMNNEISTVLVGMNSPEQVEENVAAAIELSTSGIDKELLHEVEAILEPVKNMTWSSGIEQA

SEQ ID NO: 113941 - protein, 59 aa, Oryza sativa
  unsure (1)..(59): unsure at all Xaa locations
  Clone ID: PAT_MRT4530_17681C.1.pep
CTVLIRGHKTITKAFPKTNSSDKPFKSISVLRFSLKSFSWSIIYQEXLCYHVSNQPRAE

SEQ ID NO: 113942 - protein, 52 aa, Oryza sativa
  Clone ID: PAT_MRT4530_17682C.1.pep
MHDEKPREKANVIPRHQSPTHLQLHCKNISLPIHYCFVRNDISSIDNSAQLC

SEQ ID NO: 113943 - protein, 232 aa, Oryza sativa
  Clone ID: PAT_MRT4530_17683C.1.pep
MAGRATATATAAGKDRSSFAVTCSLLSQFLKEKKGGGGGLQGLGLGLRPAPAAPPAAGAGGAFRPPPTTMNLLSGLDAPAVEVEPNTAETAADELPLIKAPADQQSDESASEAAGEKAQQLTIFYGGKVVVFENFPSTKVKDLLQIVSTGDGVDKNTGTAATQSLPRPAHNSLPDLPIARRNSLHRFLEKRKGRMNANAPYQANCTAAPSKQANGDKSWLGFGQEMTIKQEI

SEQ ID NO: 113944 - protein, 162 aa, Oryza sativa
  Clone ID: PAT_MRT4530_17684C.1.pep
GSCRSCPAAAVLDQSTTRRPPRCRRRPPATEAPPPGGGGGGPGPSAARRSGAPRSVTSTRSTAPPAPPTPQQPSSAAPPPPEPAGPPPATPPGFSPAHTAMNTGTSRRRCPCRRLRRRRSSSERGGVGWPAMMTKSRATANCIKHIYRLLFSTYCRTKDLYI

SEQ ID NO: 113945 - protein, 65 aa, Oryza sativa
  Clone ID: PAT_MRT4530_17685C.1.pep
MNVGFGEIWQRVKGGRKGDARRDAASMDTTAMRRRDAPVEIGKTWIPLAPRVIVPAAVLALRAQG

SEQ ID NO: 113946 - protein, 61 aa, Oryza sativa
  Clone ID: PAT_MRT4530_17686C.1.pep
MEMLTGAWGEAGSGGGLRRRRDGLVAEIAPAAAKLAAASARRGDGFSNGGVRPELGGEWRH

SEQ ID NO: 113947 - protein, 426 aa, Oryza sativa
  Clone ID: PAT_MRT4530_17687C.1.pep
MATAKPASPSPPPSTAVVPAANTAAAADKPAVEQLLEVAEDEVVIDFKPNAKCRADLRLRSLHPSLPVAFKVQTSSPLKFLVSPPRGAVQPLSSASLRVVLRPQQHAPASFPRSRGDRFLVLSSLSAAHLDSSASSSAATGGTTAIRLRVFFGGPYLLRLAAEAGDAAAVRLILRRQPHLLPLLEPEAAVPDGAEQWAPLHAVAARGDTGEVRRLGPDSMGARDREGRTALHVAAAAGEAEAAAALVDMGADAAATDARGRTPLDVAREKGYQEVVDVLERWELVMTAARRGDLQSLESLLSKRAGVRGRDQYGLTALHLAAIKGHCDVIALLAGSGCMDIECEDVEGHRPLHLAVEGGSAEAVELLLDMGAEVHAATRRGATPLQMAVTMGYEAIALLLRGRGADEAAAPALCIASSSSSSISCA

SEQ ID NO: 113948 - protein, 237 aa, Oryza sativa
  unsure (1)..(237): unsure at all Xaa locations
  Clone ID: PAT_MRT4530_17688C.1.pep
MFGCMVGDLPFTYLGIPMGISTPKVIDFSPLVDRVERRLSATSALLSYGDRLTLVNSVLSFLPTYYICTLSLPKYIILSIDRVRRHCLWRGSDINSSKKSLVLWDRVCQPKSKGGLGVIDLRLQNNALLIKNLHKFYNRHPIPWVTLRSSYYVDKVPHALYLKGSFWWRDVLQFVDIFRGLSQCTVGDGKTCLFWVDLWNNXIRQTSYPRAFSFAKNQKDSVHMTSLKDLPCQNRHI

SEQ ID NO: 113949 - protein, 141 aa, Oryza sativa
  unsure (1)..(141): unsure at all Xaa locations
  Clone ID: PAT_MRT4530_17689C.1.pep
MDVGRRRRPWHCSSAHGEKGLTEADSAERTADTAARGTANAAASTARPSAAASSRQRRLKGDGGRGGELGRGREEHEMAVEVGQWGAGXRGMLVRWRRGSGGAXEGGRGGCSMGVDGVRRLWKDLTSGPYLLVTPGEKGGG

SEQ ID NO: 113950 - protein, 643 aa, Oryza sativa
  Clone ID: PAT_MRT4530_1768C.1.pep
MKEPSDPPMSALSHTEGDSSGFTRNNDRNDDAVGGEDSTSSYQPCNSMKCKDGTQIMSLANEDVSNLASDCQEPPSESNHAISHGSNTDSKEEMSSGSGYRRQQSCFSSSTCSWRSSSEVESVSSTPDGSGDVVGNMSVRSKTFERRPDHIASYPSASPDIRRLYAAEVLSEKHIVDIPRQANSMDETTSSSSQWSFDNWGPSLPRGMQYGDEIPSLSSQNYGARIPSLSSRQSYGDEIPSLSRNCNYASRQSYGDEIPSLSSRHCNSFSSRQSYGDEIPSLSRHCNARSSRQNYGDEIPSLSNSDYQCYQDRIPLHHRQWCHDAEAHPQLNYGRGASHGNRYSRDSFVSSIATNQRFKMGTGKHTVTRSDHHRTIKNDNVCKHSDDTLEQVRGPRANKLENATRSKIQEDIRSPLVRRDQFNRPDFIVEYEQAKFFMIKSYSEDDIHKGIKYNVWASTPHGNNKLDAAFREAQILIKEKGKKCPVFLFFSVNSSGQFVGLAEILGPVDFKKTMDFWKLDRWNGFFPVTWHIIKDIPNRLFKHITLENNDNRIVTFSRDTQEIGLLQGLKMLKIFKDYDQETSLLDDFNFYEEKESARCAKKGINAESTHEARLLFFGTGARHSDDFKSMENLEASMENTILY

SEQ ID NO: 113951 - protein, 1090 aa, Oryza sativa
  Clone ID: PAT_MRT4530_17690C.1.pep
MFGLQASGAAASWVVGRMGTDAHLYDDPDDASIPTLLDSRFDADKLDALKRLLALIAQGVDVAHFFPQVVKNVASQSLEVKKLVYLYLLHYAEKRQNEALLSINIFQKDLSDINPLVRAWALRTMAGIRLHVVAPLVLVAVKKCARDPSAYVRKCAAYALCKLHDLLPDETTSLEDTVDVLFSDNSPGVVGATAVAFNSVCPNCLPLISKHFQRLCETLPDIEEWAQILLIDIILRYVIARHGLVKDSSIFASNLTLKSQGSGDSALIGNETCGTTSTITLFRHYIEEYSECLEGDIINCSSVTSSTNNDVALLLKCTSPLLWSRNSGVILAAASVHWIMAPVDQLNRVVGPILFTLRSSPDATYVMLGNILVFAKTAPQLFAPFYEDFFICTSDPYQTKALKLEILTTIATESSIPAIFEEFQDYIKEPDRRFVADTVAAIALCAQKLPSITTSCLGGLLALVFYESSISDSANFDGEAAVLVQAILSIKAIVRTDPASHEKVIVRLVHSLDKIKEPAARSLIIWIFGEYSSIGNIIPKITPAVLKYLAWSFAAEMLETKLQILNAAAKVIIHSPEEHLEEFKKIMAHVIKLATCDLSYDVRDRARFISRLLPYSTTYLNGNNSSCQSHNEDMFKELANHIFDGKMPSTFHPTNNYRIYLPGSLSQVILHAAPGYAPLPKPQSMELIHKTMEPTRGVGNSSESINSDAESGSSTYDGGSVYDSESEVDGSSDRNAADSNTKDNQEDPLVHVYDASVDQGQTARDVEDNFASLITTDLTELMSKSALETWLDEAPAEPVQVSTQASSARVSFTNRSFERKPKLHMLLDPSNSNGLSVLYAFSSEVSPVSRLLVCVDLLFENVSTNQLADITIKSEEASGSEDGLDQTLQGSASVPTIVLDKEIQLLAPEQTEKMVLQVHFHHHLLPLKLSVLCNGKRHPAKLHPDIAYFVRPLPMDLNAFLCKENQLRGMFEYARRCTFKDHLQKLEHNDDSEEHTDKNLLIAQSLASKILSNANFHLVSMDMPVTFSIEDASGLCWRFSSEILSTSNPCLITILAEGHISEPLDLTAKVNSEDTAFGLNLLNRVVAIIE

SEQ ID NO: 113952 - protein, 55 aa, Oryza sativa
  Clone ID: PAT_MRT4530_17691C.1.pep
HEELTPGGRSHAKTKLIEDHLTDDHRRRVQGGLQTAGKDMAWLDHNPTIWNTNTC

SEQ ID NO: 113953 - protein, 383 aa, Oryza sativa
  Clone ID: PAT_MRT4530_17692C.1.pep
MQLLGAPPPVLPSGSAAPTNTPATAAAEEEEEESLLEGHKAAREWAQVHGQHEGRTWAVGSGAAATLGQSNGRDAPARAEDGSFGLVLLLFVPHLLLHARLWLLPPTFASQPQQFSQVTSAAESRRVELDLDATTSFFGVYDGHGGAEVAMYCAKRFHTMLLEDVDYINNLPNAITSDYVPPSYEGSTACVVIIRGNQIIVGNVGDSRCVLSKNGQAISLSFDHKPHHEAERERIQRAGGHVFLQRILGMLATSRAIGDFAYKQNRNMPPSQQMVTCVPDIRVENITDDTEFLVIASDGVWDGMRNNNVVQFVRQELRPGEENLRETCEKLVGHCLHSNDNATAILVKFKPIEDPDEVASARDEHQHNPEGGDEKLDINNDND

SEQ ID NO: 113954 - protein, 897 aa, Oryza sativa
  Clone ID: PAT_MRT4530_17693C.1.pep
MGHSARKKKKKKGGGGRKAAKDHGGQLEGDQAALADELTALGSIFLEDFKVTSESPQTRFTICIRCFAGYPHKCPKLRVLPEKTLSREDANRLLSLLVDQANIYSREGRVMIFNLVEAAQEFLSEIAPANDSTSMLAHHAFIEYIVNYEELCCNDVSHFHSVYVLVSCICLAVLIKAPWLGSGKVQQTTDVDVKVKLDNGSYHGVAYMHNSFDLYSQLYDGGSWSMQGPDPATDSAGKIVGSQVKSNLKSKRKTIIEKSRVSSDEVNVAKGLLPDNAGQKNIMKHDVIRETVPSLHVVAEETENDSKTVSTSNRENTSGTPERSFSSVHQLEDSDLSDEDWNDEDSGSGSGFSNTPSFDMFDDASRNKKKDLILVHLLRLACASKDSLSASLPAISSELCNIGILSEWAKDLISKSPAVFGETFGHFFGPQMTSSECSLFWRADNSSSRPNSRYLNDFEELRSLGQGGFGRVALCKNKLDGRQYAVKKIRLKDRSPQVNEKILSLLQCEANVQTINIVHVAVDAMLLMVLREVATLSRLQHQHVVRYYQAWVETEYGQHHVLNAAGSCTAESSMYSYDNISLSDAGGGNKQESTYLYIQMEYCPRTLRQDFETYTSSFRVDDAWRLFRQIVEGLAHVHSQGIIHRDLTPNNIFFDVRNDIKIGDFGLAKFLKLEQLDHDQYLPSEGMGVSMDGTGQVGTYFYTAPEVEQKWPHINEKVDMYSLGVIFFELWYPFSTAMERHLVLSDLKQKGDSPLSWATQFPGQSNLLRRLLSPSPSDRPSAVELLQNDLPPRMEDEWLTDVLRMIQTPEDTYVYDRVISTIFDEERLIAKTQCQLEGSKKSTCKSDNSELLDSIIEVSKEVFKRHCAKRFQISPLHTLEGKFTENRCVWFLHLSAD

SEQ ID NO: 113955 - protein, 67 aa, Oryza sativa
  Clone ID: PAT_MRT4530_17694C.1.pep
GRVQPRLALPPPSTAKPSPSWMNHRRHLSVDISTSTRATVELTVNVQQSAALRSTVSLSSVPAFVSY

SEQ ID NO: 113956 - protein, 62 aa, Oryza sativa
  Clone ID: PAT_MRT4530_17695C.1.pep
FVNLILSTERLSFCTLTSVSDSSLMASVKSPSVDSNHDSIESTEGYLDRLIASRMNMIERSE

SEQ ID NO: 113957 - protein, 424 aa, Oryza sativa
  Clone ID: PAT_MRT4530_17696C.1.pep
MQLLGAPPPVLPSGSAAPTNTPATAAAEEEEEESLLEGHKAAREWAQVHGQHEGRTWAVGSGAAATLGQSNGRDAPARAEDGSFGLVLLLFVPHLLLHARLWLLSPTFASQPQQFSQVTSAAESRRVELDLDATTSFFGVYDGHGGAEVAMYCAKRFHTMLLEDVDYINNLPNAITSVCFRLDDDLQRSNEWRESLNPCANRNCLTNICANLHHFTEDYVPPSYEGSTACVVIIRGNQIIVGNVGDSRCVLSKNGQAISLSFDHKPHHEAERERIQRAGGHVFLQRILGMLATSRAIGDFAYKQNRNMPPSQQMVTCVPDIRVENITDDTEFLVIASDGVWDGMRNNNVVQFVRQELRPGEENLRETCEKLVGHCLHSNDNATAILVKFKPIEEDPDEVASARDEHQHNPEGGDEKLDINNDND

SEQ ID NO: 113958 - protein, 98 aa, Oryza sativa
  Clone ID: PAT_MRT4530_17697C.1.pep
MAATIVSVKARQIFDSRGNPTVEVDVCCSDGTFARAAVPSGASTGVYEALELRDGGSDYLGKGVSKAVDISMETISRSMEVWSWLRLSPRGIISFFWN

SEQ ID NO: 113959 - protein, 76 aa, Oryza sativa
  Clone ID: PAT_MRT4530_17698C.1.pep
KVFNGNDDLKANLALQLKDAGSQPIMANQLALPLEEVEKNLNAVQEKFHQKTTALSDHENDVNGAYVVLKEPVVGK

SEQ ID NO: 113960 - protein, 209 aa, Oryza sativa
  Clone ID: PAT_MRT4530_17699C.1.pep
MRRRLGVGEEEVRRPATSDQQGRRAVARRLLGQAAVGARRGGRRRRRHVCCFLCCRHGRRVVGDRAHSCMLAPRRREQKGQLGQGRLVEGRRYRCHLLEVKTRAEVRHSPPCWRRTAPPRRPRAAMQPMQAYDEACKEQHWGDVDAADVGFSAGAGFTGWNSIPPPPPPPPPTGCRSPSAGRCALVVNGISVRLRMNSVTIIYQKYFCA

SEQ ID NO: 113961 - protein, 151 aa, Oryza sativa
  unsure (1)..(151): unsure at all Xaa locations
  Clone ID: PAT_MRT4530_1769C.1.pep
MEGIIPFIFKAVAQYKEGGHVSLSDMISDKPSPASYVLLPGDSDGRHADDKTQPLRLQASTGSEEEVTTCTARASHLRCSTLRRRAXDAVNCYADQTAGASRSDNLRFVVLCLCSADSERCKEPSTLASLGFSAYSIYKRPLLFFLAVYAL

SEQ ID NO: 113962 - protein, 45 aa, Oryza sativa
  Clone ID: PAT_MRT4530_176C.1.pep
MVDGDNARVHQHRCDRRRATWRAAYGPVLIWQCQNVILWGFSVDM

SEQ ID NO: 113963 - protein, 115 aa, Oryza sativa
  Clone ID: PAT_MRT4530_17700C.1.pep
MAGNGPINKEDPFNWGAVAAEMAGSHLDEVKRMVSQFREPLVKIQGATLRVGQVAAAAQAKDAVGLVAELDEEASPRVWVSSEWIPNCIAHGGRHYGVTTGFGGTYYRRTKDGPS

SEQ ID NO: 113964 - protein, 62 aa, Oryza sativa
  Clone ID: PAT_MRT4530_17701C.1.pep
FCFFFFWVFFFFLKKGLTLLYWHCCIKIHIIANHISSTKMKHQLQERTQDDCPTSVLGYKTF

SEQ ID NO: 113965 - protein, 128 aa, Oryza sativa
  unsure (1)..(128): unsure at all Xaa locations
  Clone ID: PAT_MRT4530_17702C.1.pep
MAGNGPINKEDPLNWGAAAAEMAGSHLDEVKRMVAQFREPLVKIQGATLRVGQVAAVGQAKDAAGVSGQLDEEARPRGKAQSEWILNCLGHGGDMHGVPTRLRSTXDRRTQGGPPPRMACGEPRYRRI

SEQ ID NO: 113966 - protein, 56 aa, Oryza sativa
  Clone ID: PAT_MRT4530_17703C.1.pep
MLRPAAAAAGRAIRRAAYHSDGAPPPRKLRGPRFSPLNRHNHEVPQIYSLVRAPMN

SEQ ID NO: 113967 - protein, 41 aa, Oryza sativa
  Clone ID: PAT_MRT4530_17704C.1.pep
MVIFGELEILALSSNRATLPPLVSSLRHRGTVLASRADLAR

SEQ ID NO: 113968 - protein, 112 aa, Oryza sativa
  Clone ID: PAT_MRT4530_17705C.1.pep
KMHQQKKTISRGPRAEKKKCCPPPLCGRWQQPATDTVTATGLSASRTCRRGWAVRYVGRGRGSRGAQLRLAPKAGALHLERERAERVAEAREDCRASHQIPYHRLLHNPRKR

SEQ ID NO: 113969 - protein, 65 aa, Oryza sativa
  Clone ID: PAT_MRT4530_17706C.1.pep
PRLLGRAKSLAGERSPWCPWRRGGPFLFRPKGVHGICSGSCGFKEKVVGGNWDSTGSFKKFVILS

SEQ ID NO: 113970 - protein, 75 aa, Oryza sativa
  Clone ID: PAT_MRT4530_17707C.1.pep
MERHWQVRLGVGGGSDSTTMTTATRLLDPNDKSKDSAGIGGGATDCAELQLKHRGGVDGSHPTILSCLVVTDEQL

SEQ ID NO: 113971 - protein, 371 aa, Oryza sativa
  Clone ID: PAT_MRT4530_17708C.1.pep
MGSRRFAAVVVVLLLALALIPGPAAAAGRALQGEKARPSEAAPAPTVAAGGSHKESAKSSNGQNPVTKETHHQTPPPAKPPKDQTPPPPPAVSESKGQKGDAGNNSGHPVPPTDAHKTSPPPEGPGPTGGKEQEGGAGGEKKNPTEEIKKVLSCEDAAEKCSVPGEITACLQVFKDGSIRPFVVVQNEGQNDVKVDVVIDGKMLPLQLAKGFSRQVNITYSNPNGVEITVKSGKGQCSLHTKQTVFDWQQQFQQFAAYATRANPIYGASFLVFTVVLVGVVCACCKFARRRASGVPYQQLEMGDQAPNSSGVENTTSTVDGWEDGWDDDWDDEEAAAKPSDKKPSGSISANGLSLRPQTNSKDGWDVDWDD

SEQ ID NO: 113972 - protein, 139 aa, Oryza sativa
  Clone ID: PAT_MRT4530_17709C.1.pep
MAAAGIPVAHAGEAARLTGLVITAGSTELVGAAGSMIEAERRSLLCAGGIWLGMRAGEADGYRRREAAAASTPVPVACDPSAGFSRANRRRKADGTIPRPSVKRVAGDACWRRRGHDGACWRHRLGFVVVNFRRTAALA

SEQ ID NO: 113973 - protein, 123 aa, Oryza sativa
  Clone ID: PAT_MRT4530_1770C.1.pep
GQFLSHSAGNSMKCKDGTQIMSLANEDVSNLASDCQEPPSESNHAISHGSNTDSKEEMSSGSGYRKQQSCFSSSTCSWRSSSEVESVSSTPDGSGDVVGNMSVRSKTFERRPDHIASYPSASP

SEQ ID NO: 113974 - protein, 156 aa, Oryza sativa
  Clone ID: PAT_MRT4530_17710C.1.pep
MVAASIPAAHASEAARLTGLVVMAGSTELVGAAGSMTEAERRSLLCAGGIWLGMWAGKADGYQRREAAAASAPDPVVCASLRAAVVDGECGWSIEDPSAGFSRANRRRKADGTILRPSVKGVAGDACWRQQGHDGACWRHRLGFVIVNIRRTAALA

SEQ ID NO: 113975 - protein, 42 aa, Oryza sativa
  Clone ID: PAT_MRT4530_17711C.1.pep
MAASPYAKVREEYVVRRRDDVGDKQGRWRWPWGPEKPLSIAF

SEQ ID NO: 113976 - protein, 141 aa, Oryza sativa
  Clone ID: PAT_MRT4530_17712C.1.pep
MAVAGIPAAHAGEAARLTGLVGAAGSTIEAERCSLLCAGGIWLGMRAGEADGYRRREAAAASTPVPVACGSAGGVPRSIEDPSAGFSRANRRRKADGTILRPSVKGVAGDACWRRRAHDGACWRHRLGFVVVNFRRTAAQA

SEQ ID NO: 113977 - protein, 494 aa, Oryza sativa
  Clone ID: PAT_MRT4530_17713C.1.pep
MTRASTIDFGRKTHNDVLWSGPLRPANFIRNKFPTYKKSLNGIVIKLTDDQEMPSLKEAVAKETADLLHRSQRLSVRELAMKFEKGLNTATLLSNEVKWRQAALLERDILLKNLKSVLESLRSRVAGKHKDEIEESLSMVDVLTVQLSKREDELLQQKAEVAKIATSLKLASEDARRIVEEERSNARIEIDNARAAVQKVEQLVKEQEIDPQINGKQDEDELKEKAQEARRVKMLHCPSKAMDIENEIEVLREQLAEKSSNCVHLLKELHLHQSYEENDVSSYELEGLESLGSMLRIVSQSDGYVDLSRSTIQWFRVQPEGNKKEIISGAIKQAYAPEPHDVGRYLQAEINHCGEISVVKTAGPVDPAAGLVDYVETLLRNPETEYNVVVLQVNGIKQPTDSIHVLSIGKLRMRLAKGKTVIAKEFYSSTMQLCGMRGGGDAAPQAMYWQPRRDLSLVLGFETARERNSAIMLARRFAIDCNIILAGPGDKTHW

SEQ ID NO: 113978 - protein, 91 aa, Oryza sativa
  Clone ID: PAT_MRT4530_17714C.1.pep
MTGVVVLRTVGVDALEATGEGEVQITLNDRGRIGVEERSGSDTGAASAAAASLFQLPRRASPVSHQLRRLLSPATLLPASRAAYPQPNPRH

SEQ ID NO: 113979 - protein, 126 aa, Oryza sativa
  Clone ID: PAT_MRT4530_17715C.1.pep
MGEKSSGLQICSQLQHGLQDTPSVKCEVLVILASGDSRQPARNFVSVDNGRRMVCTDKHETVSKAQRVELEKLPYQIKKSDLRNHARRLQLAEKYSWDTYPESGWVHQTSLAATWKLAIARKVERS

SEQ ID NO: 113980 - protein, 141 aa, Oryza sativa
  unsure (1)..(141): unsure at all Xaa locations
  Clone ID: PAT_MRT4530_17716C.1.pep
SQKKNEAGPVRLQITTTAWTGSAASXRSRHRTRAGLVAGRCSPQLAPAWPXGHLDARARRPTAAAPPESHGDSPLPSGGIGPLPSGGGGGSGGFTSSALGQETEQRGVKFLTLRDGRRLKARPRVAARGAVGEEGGFHAPH

SEQ ID NO: 113981 - protein, 79 aa, Oryza sativa
  Clone ID: PAT_MRT4530_17717C.1.pep
FDRSIHWLYWHFEEVAIGCWLVESGSYDPKPVGKPFLYTRTLNRITLYLHFARRAYTYWGLPKFLVPLGHRFQVPPYWV

SEQ ID NO: 113982 - protein, 75 aa, Oryza sativa
  Clone ID: PAT_MRT4530_17718C.1.pep
MTIFRYCYCEKVVMLLHDDCYVTAKFLRDVNNQVISISTIGDGRPFFNTCKIRLIMFISRPIVHRSVLAGPHEQP

SEQ ID NO: 113983 - protein, 105 aa, Oryza sativa
  Clone ID: PAT_MRT4530_17719C.1.pep
MDIFCNSQDQINWYASIPKDKFLTCTGVKQISQASYFHINENEKGEPPLPLPAAAAWVHPLARLPRVSRSGGPYRCKDKLAAAGGSGGAGAGKTEGKHPCNVCGK

SEQ ID NO: 113984 - protein, 63 aa, Oryza sativa
  Clone ID: PAT_MRT4530_1771C.1.pep
MASSALASSKPATAAMALARNRCGVLVLHEQQATGAAVASCPLRAANSGVVSLVSMLLGSDRI

SEQ ID NO: 113985 - protein, 278 aa, Oryza sativa
  Clone ID: PAT_MRT4530_17720C.1.pep
MVSSARTTAAAAAEVTTMTALGVSPPPLRAYGSGLLGDDNTLAAAARGAAGLLLSTWDKTTLDWVKGVNSSGIESSGTMDRNELLVYGFTHVMNNTMTSGHTTPYADRYGEKRGIGLLSRGNLAVITDYGAATDYLFPHHREQLLRTHTTSFPKLKFQVHYGTTQPPTSSTPWYAAATFCDGSRMKSGLVQVRDEDDTVVLDKSISPYLACGGRLHQGETSLEGVSCHGCKRAPLISGKKVGLLSTPNPSRRLPPLEMPVLCLAGRNEALLDGGPPVF

SEQ ID NO: 113986 - protein, 280 aa, Oryza sativa
  unsure (1)..(280): unsure at all Xaa locations
  Clone ID: PAT_MRT4530_17721C.1.pep
FVVRHSAPHAASTRDLYXRHRDQDFARAVVDCNRIIVDASTTIQRLGARIGVPVEEHLTTYTRIVDSARSVLGLLTCRADDVAQADVAPQRPPRPTGPRPAAHVPRPTXPPPHGRFRAPFTXPPSTSTPPVVPPTSFAQFDTTXAAHFSQAAGSASQVATSASHYTXFWRYAGASSQAAGTSSRGPPLDHAGTSSEYGLASALLFDISDSNFQVSTEDVIGSSQLGGAPPVQTQDQPPSTPPPDTRATRAVPSDCITYSQDHVRAQARRTKRGRGAGQGQ

SEQ ID NO: 113987 - protein, 61 aa, Oryza sativa
  Clone ID: PAT_MRT4530_17722C.1.pep
KKKKTVRTMKRSFKGIYRNAKHMVGSEIHLSLRRVRASRSSASLCIPGFTPRRLARISDRT

SEQ ID NO: 113988 - protein, 73 aa, Oryza sativa
  Clone ID: PAT_MRT4530_17723C.1.pep
KMEIGPSGQKKGIYGPVRGSLKPQWGGYLPNHSGKDSLPGGNTWPYDLILTRKFQFLGTHFPPWTEKFFFGAN

SEQ ID NO: 113989 - protein, 954 aa, Oryza sativa
  Clone ID: PAT_MRT4530_17724C.1.pep
NLLLPVLLVANNIKYISFDILNWRWHVYGERQASASTKESSNDFADLQDFHTQGFLEVGAAALLVGDMEAKINDQQWKYSFIQDFPDIDLLQPSTSTASTFASSQSHLKAITASKRMKSGPNQVWMNIPANTFQPRARPLFQYRHYSEQQPLKLNPAEISEVIAEVCSETTSNSNQFSAPSRLTTQSRQPSADVAFSVLIKLVIDMYMMDSEAAAPLTLYMLEGMLSSQKSPARTKAFDLILNLGIHAHLLEPMIVENAPLIEKSETVNHSYMNNEYGSSMDEQRATESEQEQRVSPAIDQFESWLLKIMFEVLLLLVQMEERQEIVWASALSCLFYFVCDGGKIIRSRLGGLDIRVIKTLLEISVEHSWAKVVHSKLICMLTNMLYQVSDGAPNGAIDTHFLPDQIDRVGGVDYICLEYSRANSREEKRDLFFVLFDYVLHQINETFLAGGLSTYTYDDAQPLASLLACADAPEAFYISVKHGVEGVGDMLRKAISSALSQSTEYEQLNVLLDKVIRKLDGTVSTFSRIDTEFAYMIQVTKSYKCFSSIRDGHEDADVALRARLCWATLHSLLNSQISSYRHHGYIWLVELLLSEISEETDGSIWSKIQKLQDEIEVAGSQDLSSSEVSLPVCLLCGLLKSKHNFIRWGFLYVLDKFLMRCKLLLDDNDMQEHTVADHSKHRLDKAFAVIDIMNSALLLVVQNNETDHINILKMCDMLFSQLCLRLPSSNVMHMGGLQSLGQLFGCTTKNIESHLETLASHQNVGNKNFCRSETLQDISVNQTAQTTLLSETSMAALLLRGLAIAPMQLVARVPTSLFFWPLMQLEGAASDDIALGIAVGSTGRGNLPGATSDIRAALLLLLIGKCTADQEALKEVEGNEFFRGLLDDTDSRVAYYSAAFLLKRMMTEEPDTYQRMLQSLISKAQQCNNEKLLENPYLQMRGILQLSNDLGVQ

SEQ ID NO: 113990 - protein, 69 aa, Oryza sativa
  Clone ID: PAT_MRT4530_17725C.1.pep
MALISRASVLVMAIVAMLATLVNAQAPAPAPTSDGTSVDQGIAYVLMFVALALTYLIHPLDASSAYKLF

SEQ ID NO: 113991 - protein, 1064 aa, Oryza sativa
  Clone ID: PAT_MRT4530_17726C.1.pep
MAVQVQESKRVGRQLPPHRPPRSVSLAASISFSSARKPPEPLRRAVADCLSPPAPHTHTHAPPPAASSAPAEASRTLRDYIANPSTIDMATMSSSTMLLLKEIVDLISSATEKADGGEPADDTKYISFDILNWRWHVYGERQASASTKESSNDFADLQDFHTQGFLEVGAAALLVGDMEAKINDQQWKYSFIQDFPDIDLLQPSTSTASTFASSQSHLKAITASKRMKSGPNQVWMNIPANTFQPRARPLFQYRHYSEQQPLKLNPAEISEVIAEVCSETTSNSNQFSAPSRLTTQSRQPSADVAFSVLIKLVIDMYMMDSEAAAPLTLYMLEGMLSSQKSPARTKAFDLILNLGIHAHLLEPMIVENAPLIEKSETVNHSYMNNEYGSSMDEQRATESEQEQRVSPAIDQFESWLLKIMFEVLLLLVQMEERQEIVWASALSCLFYFVCDGGKIIRSRLGGLDIRVIKTLLEISVEHSWAKVVHSKLICMLTNMLYQVSDGAPNGAIDTHFLPDQIDRVGGVDYICLEYSRANSREEKRDLFFVLFDYVLHQINETFLAGGLSTYTYDDAQPLASLLACADAPEAFYISVKHGVEGVGDMLRKAISSALSQSTEYEQLNVLLDKVIRKLDGTVSTFSRIDTEFAYMIQVTKSYKCFSSIRDGHEDADVALRARLCWATLHSLLNSQISSYRHHGYIWLVELLLSEISEETDGSIWSKIQKLQDEIEVAGSQDLSSSEVSLPVCLLCGLLKSKHNFIRWGFLYVLDKFLMRCKLLLDDNDMQEHTVADHSKHRLDKAFAVIDIMNSALLLVVQNNETDHINILKMCDMLFSQLCLRLPSSNVMHMGGLQSLGQLFGCTTKNIESHLETLASHQNVGNKNFCRSETLQDISVNQTAQTTLLSETSMAALLLRGLAIAPMQLVARVPTSLFFWPLMQLEGAASDDIALGIAVGSTGRGNLPGATSDIRAALLLLLIGKCTADQEALKEVEGNEFFRGLLDDTDSRVAYYSAAFLLKRMMTEEPDTYQRMLQSLISKAQQCNNEKLLENPYLQMRGILQLSNDLGVQ

SEQ ID NO: 113992 - protein, 499 aa, Oryza sativa
  Clone ID: PAT_MRT4530_17727C.1.pep
MGWVRMRVRVRSPPVMQSKLLCLSLLYLLTTLPLALYVSFSDPASAASRCLVFLPFRSSAPSSAASAALFEYPREYGEHKHAIPATRALCSDPAVFSGRSLSVREGHYKTVLEEINKFCRNLSASPYAKPALRYQNGRRNSFAGNLSTVERRSFFNHTDSAVEIPCGFFKEFPVRESGDFFGQFAFFIEEKILVAHRLAMEKCNGVVVASAIFNDHDKIRQPKGLGSETLRTVCFFMFIDDATHRVLASHNILAGERGEAGTIGAWRVARLVAGAGGDHRLPYENPAMNCVIVKYLLHRLFPNARFSVWVDAKMQLTVDPLLLVHSFVAGKGADMAVSKHPFNLHTMEEAIATARWRKWGDVDSIREQMETYCRNGLQPWSPIKLPYPSDVPDTAIIIRRHGLASDLFSCLLFNELEAFNPRDQLAFAYVRDQMSPKVIMNMFDVEVFEQIAVEYRHNLKRGNGGAGGKQGITRMASSGDIAGSSCERYLLKMWGETTE

SEQ ID NO: 113993 - protein, 82 aa, Oryza sativa
  unsure (1)..(82): unsure at all Xaa locations
  Clone ID: PAT_MRT4530_17728C.1.pep
VLGGLYLKMKCGTIQQSPPSYIGVPQXFTAPSPYPXPHRPTVHQDRKWPFPPQKLAIEVRGSPTYIFXPLPFDNQCETIQHY

SEQ ID NO: 113994 - protein, 111 aa, Oryza sativa
  Clone ID: PAT_MRT4530_17729C.1.pep
DEIPLAPPPASRTSHVNKKTTAEEERAKLFEGSSNVEMPRMRTHQEILTKYKFGGDAAAAAAHAKDKLMQRQEKLERISQRTAELESGAENFASLAQELAKSMENKKWWKL

SEQ ID NO: 113995 - protein, 339 aa, Oryza sativa
  unsure (1)..(339): unsure at all Xaa locations
  Clone ID: PAT_MRT4530_1772C.1.pep
HASGRGAGAVVAAAMRPAKAVASPAKEAAGEVNGAASGGFARPDAFGRFGKFGGKYVPETLMHALTELEAAFHALAGDEDFQKELDGILKDYVGRETPLYFAERLTEHYKRADGTGPMIYLKREDLNHTGAHKINNAVAQVLLAKRLGKERIIAETGAGQHGVATATVCARFGLQCIIYMGAQDMERQALNVFRMKLLGAEVRAVHSGTATLKDATSEAIXRDXGVTNFEDNHYILGSVAGPHPYPMMVREFHKVIGKETRRQAMEKGGGKPDVLVACVGGGSNAMGLFHEFVDDQDIRMIGVEAAGYGVDTDKHAATLTKGEVGVLHGSLSYVLQDDD

SEQ ID NO: 113996 - protein, 87 aa, Oryza sativa
  unsure (1)..(87): unsure at all Xaa locations
  Clone ID: PAT_MRT4530_17730C.1.pep
ESKKERKEKKKENRVSSRLVFVSPSRAASRNPRGLDSDGPIPQVEREVEVEEVRXPKLRYLEXXQVXAXXXPIXLAGLYALAKDHAV

SEQ ID NO: 113997 - protein, 69 aa, Oryza sativa
  Clone ID: PAT_MRT4530_17731C.1.pep
MVLLATTTEMMVARATTVMTTMRSGGVHPPPMGSKGDGGGVTMFETGGGIELGTRRGGVDDRRSQPSTD

SEQ ID NO: 113998 - protein, 498 aa, Oryza sativa
  Clone ID: PAT_MRT4530_17732C.1.pep
MEMQDEHVIDVPSILAQELSTELTSLKPPSTELAGDGDPSPTPPIIIDEVGERTRNVDPHEYLPHHVYIGPYSRMRNADLAGDDDDKLRTLQEVLAAAAAYSTAPPLQLKDFVAELELLEARARSSYRHTFGVVPSKEFLRWLLLDACYILVRFGDVDDVVGRRPRPAAPAAVASANGAVQGGNRVVPSVERRRASAADRQYILDVVRDVFYLAANQVPFFVVERVRQMTFLDHGTPALDAIARFAGKLLEQKQYSVATPTMVGPPERRPEPANLLHLLHMHFTPTVLTSAAAVGGGGAPVGRWRTAMEYYFVGVKFKRRPLNRRSKGGALSILDVKVSGGGGGTLEVPQLNIDGETWRLLRNLIALEQSNPSGAGSHVTAYCVFMSQLASTPMDVELLSRRGVIVHGLGNNGEVAKRFADLCKGTVFDVDDADQNYLRPVCQVLDRRFQSRPRRWMAWLKQKYFANPWLAAGLAAAAVIFVCTVIQAVYSVLSYKKG

SEQ ID NO: 113999 - protein, 330 aa, Oryza sativa
  Clone ID: PAT_MRT4530_17733C.1.pep
MTMITPSYLGDTIEYSSLGGAPHGRQVSVPQHSSEHGVYTRATAGKRLIVGVGCITLGQSAYATKILEKAGLQDCNPSQTPMEVCLKLSKNSDSPLMDSTFYCILVGSLRYLVNTRPDLAYAIGYVSRFMETPREEHLSAVRRIQRYVAGTRNWGLTYLGGKEEKPSLLGYSDSDLAGDTDDRRSTSGQIFFTGGSPVTWQSSKQRVVVALSSCEAEYIAAAVAACQGVLLARLLTDVLEADAPAPKLMVDNQSTISLVKNPVHHDRTKHVDIKFHYLRECAEQKLIEVAFVGTADQLGDIFTKSLGRTRFHELCSKIGVSDLRQRSSKN

SEQ ID NO: 114000 - protein, 60 aa, Oryza sativa
  Clone ID: PAT_MRT4530_17734C.1.pep
ELQKKENLKYIRRAHYIASPHSGEKKRLSQASAPLISYFKDVRKTNLKMKENISSSLLLT

SEQ ID NO: 114001 - protein, 116 aa, Oryza sativa
  Clone ID: PAT_MRT4530_17735C.1.pep
PPFRGPFSPPPVHRGPLCSRWWVGGGVFLFFFAPPFAFLKERFAVPRWDHPLAWLGPGEINGWPVHTGLPLFRGVNPPLFGVFEGPPNQFSAPPGPAAFSYSPPWFFFGGWGFFGT

SEQ ID NO: 114002 - protein, 1337 aa, Oryza sativa
  unsure (1)..(1337): unsure at all Xaa locations
  Clone ID: PAT_MRT4530_17736C.1.pep
AQGLWSAVEPGDNDRVDRQALAAILRAVPPEMLSTLAIKETVQEAWQAIKIRRIGVRRVREANEQQLRREFADMCFKDGESVDDFSLRLCGPANNLHTLGDEITEAEVVKKLLHVVPENLQQIAISIETLLELTXMSLEEVTGRLRSVEQRKLRKGNGDHVDANGRLLYTEEKWLAKFRKSASLLDGGQSGSSSSGGNGGRQGXRTWEEENNGASKETQPKSNDAGRNPGNCTYCGKRGHWAKDCRSKPKPQQAHVAQEDDEGPTLLLARAVPVPPLPRATPATPPQSKPLEVVQAKVFASLDDAAERSQRRWILDTGATNHMTGSRSLFAELDTAITGTVKFGDGLVVSIEGRDTILFACKTGEHRALTGVYFIPRLTANIVSLRQIDEAGSKVLIYHEVLRIWDPQGRLLVRVDRGVTRLYTIDLDVDRPVCLAARSSEPAWRWHARYGHLNFQALRKLSQKSIVRGLPMLDQVNKVCDGCLVGKQXRASFPSCSKYRATTHLNLVHGDLCGPVEPATPAGNRYFLLLVDDMSRYMWLTLIRSKDEAASTIKHFQARAEVESGRKLHVLRTDRGGEFNSIEFGEYCVDRGVHRQLTAPYSPQXNGAVEHRNQTIIATARSMMKAKGMPGLFWGEAVSTAVFLLNRSPTKFLANKTPYRAWYGERPAVHFLRTFGCIGHVNNDKPGLKKLDDRSAPIVLLGYEQGSKAYRLYDPVGDRVHVSRDIVFDEDAAWSWDAASMGSPNXEPFTVEHAVSTTKEEVVTPASSPPRSQSPPTPVSPTPEQGMQATEAEVEHASPPSHDSILDTDADPEKREPRYRTLDNILGPASPSGMATRLLEQLELHAVSAEEPSSLAEAEAEVDPNWKGAMEDEMKSIEENNTWSLTDLPAGHRAIGLKWVYKLKRDEQGAVVCHKARLVAKGYVQRQGVDFDEVFTPVARLESVHLLLAVAAHQAWEVHHMDVKSAFLNSELQEMVFVXQPPGFINANDQGKVYKLHKVLYGLRQAPXAWNAKLDSSLLSLGFCCSSSEHGVYTRATAGKRLIVGVDLGTLKYYLGIXVTQRSGCITLGQSAYATKILEKAGLQDCNPSQTPMEVCLKLSKNSDSPLMDSTFYCILVGSLRYLVNTRPDLAYAIGYVSRFMETPREEHLSAVRRIQRYVAGTRNWGLTYLGGKEEKPSLLGYSDSDLAGDTDDRRSTSGQIFFTGGSPVTWQSSKQRVVVALSSCEAEYIAAAVAACQGVLLARLLTDVLEADAPAPKLMVDNQSTISLVKNPVHHDRTKHVDIKFHYLRECAEQKLIEVAFVGTADQLGDIFTKSLGRTRFHELCSKIGVSDLRQR

SEQ ID NO: 114003 - protein, 31 aa, Oryza sativa
  Clone ID: PAT_MRT4530_17737C.1.pep
CNRTNSGPRFVSGCIRKDSIKVFELPQNCGI

SEQ ID NO: 114004 - protein, 81 aa, Oryza sativa
  Clone ID: PAT_MRT4530_17738C.1.pep
KGFGSPRGTRTQRGKNRGKGTKFFLGPRASLGGNKGRKTPIGQANNFSQTLGPGAFKKLGGWPGKTIGPLKKTNGPLKVKG

SEQ ID NO: 114005 - protein, 552 aa, Oryza sativa
  unsure (1)..(552): unsure at all Xaa locations
  Clone ID: PAT_MRT4530_17739C.1.pep
MECSCKGELALAHQDCAVKWFSIKGNKICDVCKQEVQNLPVTLLRIPTQTANRRVTNGAHQRASQQYSYNRFWQDIPILVMVSMLAYFCFLEQLLNVPLCFFLACETSLNGVDSLTETVTKSYLWAYASFQFAIVILFAHIFYNVLKVNPVLAVLLSSFTGFGIAISANSMLVEYLRWRSRRNQQLAQTVDDGQRQEPGSNAVNENNGDRQQAQHRESGDNICKFSSSGRLVLQNYITKNVGFIGLGNMGAHMARNLVMAGYKVTVHDVNENTMKKFSDDGIPTKLSPLEVSKSSDVVITMLPSSAHMFFXVLDVYNGRNGLLANGGCLGPWLYIDSSTVDPQTSRKISMDISRCTLKEKKAYAEKPMMLDAPVSGGVPAAEAGKLTFMVGGSEEAYLAAKPLLLSMGKKTIYCGGAGNGSVAKICNNMAMAISMLGVFEAFALGQNLGIKASVLTDIFNCSSARCWSSDTYNPVPGVMMDVPSSRNYDGGFTSKLMTKDLDLAMASASGVGFNCPFGSQALEIYRKLCADGCELKDFSCAFRHNYAGKDEN

SEQ ID NO: 114006 - protein, 41 aa, Oryza sativa
  Clone ID: PAT_MRT4530_1773C.1.pep
VSSSDLFEPSVANTAGGVWRIPPFLNDHPLRGREADPLDKT

SEQ ID NO: 114007 - protein, 307 aa, Oryza sativa
  Clone ID: PAT_MRT4530_17740C.1.pep
SMESTEPLQDIMCEFRAGKMSLDGTRVIPDTRKGLVRIGRGEEGLVHFQWLDRGQNLVEVDQIVFPEEAVFEKVTQSSGRVYILKFRHDSRKFFFWMQEPSADDDSQICRQVNAYINRPLDGEAVSIEAEMSHEDTADDDISSRAGNLVDQSMTADLAGEVTSAAGPVRLEDLQRILSAIQPSDAVADPDAGLGLGDILKPDLVLPLMETLPIEQLASYLPEGPWTAGDILELLQSPPLRQQVEAFTHVLRTGQIDLAQFGVDPSKYKFTVASFLEALEDSVAKASGAGDKDSESQRGGGNDPMDES

SEQ ID NO: 114008 - protein, 202 aa, Oryza sativa
  Clone ID: PAT_MRT4530_17741C.1.pep
SPPLPRANPRADAAVSRRRLELIVLAAASASSTAAASRPPRDAAPRRRRTTPPPARHAATFAATRATPPPPRHTTAFAAAQHRRRMQRHAAAAVATPPRQAQYLNEEGNVERDAEGNQQGHVERDVEGNQEEEASGSQPSVGQKRARGQRGAAKKLEGRHIITEVEEDGRPSAPAEAAKNYVRHSGWVVRDNVPFPRVQRTK

SEQ ID NO: 114009 - protein, 182 aa, Oryza sativa
  unsure (1)..(182): unsure at all Xaa locations
  Clone ID: PAT_MRT4530_17742C.1.pep
TTIAAAAAKCPATSPSPSSPPPPQPRPRSPRPSPQAVRCRSLQPPAPAVAARELHVAGRDSTLPPVSMTPSRCRTTLASTTATRRRPPRRLHGRPRRPRGRATASTMPRPPRPLPRQPVATVDAATAAXVTAAVGSHNHRQPDLTRGVVASSSPPSCQDATACRWGTGFGHHGTGSGRRRRH

SEQ ID NO: 114010 - protein, 203 aa, Oryza sativa
  Clone ID: PAT_MRT4530_17743C.1.pep
MPPVTAVTATAAAAAERPATSPSLSSPPPPQPRPRSPRPSPQAIRCRGLQPPAPALAARELHVAGRDSTPPPVSMTPSRCRTTLASTTATRRWPPRRLHGRPRHPRGRATAFTTPRPPRPLSRQPAAAVDTATAAAAVTEAAPAASPARLPPTSRSRSPPPKTTAKPRRRDVRTPPPVAGGPDPATTAPDLDATAPDPVGADA

SEQ ID NO: 114011 - protein, 48 aa, Oryza sativa
  Clone ID: PAT_MRT4530_17744C.1.pep
MPGRASAASGDNRRSGENFCFGDKHDNADASIVHLLQQHRPGGARQRG

SEQ ID NO: 114012 - protein, 429 aa, Oryza sativa
  unsure (1)..(429): unsure at all Xaa locations
  Clone ID: PAT_MRT4530_17745C.1.pep
MWDPCTGVPRWPAFVRRRPRYTHRQLLTQRSPHPPPAAPLVPSQPPPPDAPLAPIRPPSIGCASRAKPASISAARASRAEPAFAAIGCTSTPSRSPIPPPNDAMPARCNRLPRPRLAVRSRHASNDRSHHHRSRCCQMPSHLAIAILTSSAAATXRSPRPSPQAVRCRSLQPPAPAVAARELHVAGRDSTLPPPHVAGLHDACTAGLAAHEAARPPPRCLDHHGRCLASQSPQSMPPQPPPVTAAVGSHNHRQPDLTRGVVASSCIAGVTTGSRRXPPPPHLSSGRASVLGTGGSSGSVSRXVATAPGRRRPKPPPNLAAELPGRHRLSLGDRIRPPRHRIRSAPTPCPELVPCRRPDRLGREXGKESPVAAVLAAARLCRRRRGWGGEEKGGDGAACSPPASPPGXGDRARFSSPYRRFQKRKDATQC

SEQ ID NO: 114013 - protein, 169 aa, Oryza sativa
  unsure (1)..(169): unsure at all Xaa locations
  Clone ID: PAT_MRT4530_17746C.1.pep
CMAGLATHEAARPPPRRLDHHGRCLASQPPQSMPPQPPPXVIAAVGSRNHRQPDLARGVVASSRIAGVTTGSRXPPPPHPSSGHASVLGTGGSSGSVSRQVAAAWSXPGRRRPNPPPNLAAELPGRRLPSLGDRIRPPPHRIWMPRHRIWSAPTPCPELVPCRRPDRLS

SEQ ID NO: 114014 - protein, 459 aa, Oryza sativa
  unsure (1)..(459): unsure at all Xaa locations
  Clone ID: PAT_MRT4530_17747C.1.pep
MWDPCTGVPRRPAFVCRRPRYTHRQLTPRSPPPPPAAPLAPSQPPPPDMPLAPIQPPSIGYASRAKPASISAARASRAEPASAAIGCASAPSQSPTSPPNDATPARCNRLPHPQLAVRSRHASGDRGHRHRSRCCRTPSHLAIAILTSSAAATSTVATAIAASHPLSRPAATSTRSRRPRAPCRRPRLHTATGLHXRPPAAAQRWPPRQPHVAGLHDACTAGLATHEAARPPSRRLDHHGRCLASQPPQSIPPQPPPXVTATVGSRNHRQPDLTRGVVASSRITSVTTSSXAPPPPHPSSGRASVLGTGGSSSSVSRQVAADQXAPGRRRPKPPPNLAAEMLGRRRPSLGDRIRPPRHRIXTPRHRIRSAPTPCPELVPCQRPDRLGRERGRESPAAAVLAAARLCRRRLGRRRGWGGEEKGGDGAACSPPASPPGQGDRASCSRGWTFSAVVVATNFC

SEQ ID NO: 114015 - protein, 125 aa, Oryza sativa
  Clone ID: PAT_MRT4530_17748C.1.pep
MGLFTLLPFSTLPNFDKFTKKVTTFSLMLNFSNYIRNHTKILATILKFWQCQNLVRLKMASKGLFTLIPFSTLPNFGKVTKKVATFSLLPNFGDYIRNPAKFLASMPKFSKVFFLHQSEQAQRLG

SEQ ID NO: 114016 - protein, 508 aa, Oryza sativa
  unsure (1)..(508): unsure at all Xaa locations
  Clone ID: PAT_MRT4530_17749C.1.pep
MQALAANQLVVRLKKCDFGLDRVNYLGHIISEDGVSTDPKKICAIKNRKAPRNVTEVQDIKRSYEEDVLAHKILSLIDTDGDPERNYKCXIWIVEIQGQDLXHSRIRATYHRIKQLFYWPSLKRQVEHYIRECPTCQVTKAEHVHIPGLLNPLEIPDMAWAHISMDFIEGLPKSQGKDVILVVVDRLTKYTHFLALSHPYTVEQVVQIFMDNIHKLHGMPIAIVTDRDRVFTSTFFQEIFKIHKVKLRFSTAHHPQTDGQTERVNQCLESYLRSMTFQEPQKWFSWLALAEWWYNTTYHTSIQMTPFQALYGYPPPQISEFSIPCNISEEARVTLEDKAMILQKLKGSMGEAQRRMKFYADKGRTERTLEVGDMVYLKLQPYRQVAMGIRGSLKLRSKFYGPFKVIEKMGSVAYKLQLPEGAGIHPVFHVSQLKKHLGPRAIPMPNLPAVGPDGQIKTEPAAILQRRMVPRHNEPVIQWLILWENLTPADATWEDASYIQAVFPNFQP

SEQ ID NO: 114017 - protein, 92 aa, Oryza sativa
  Clone ID: PAT_MRT4530_1774C.1.pep
MGKDLAVGGESWREYGSEAEAEAVGCRRRSHHIIECDDAEYWHHIKIERSTASGTYGKRGYMSEAASSKHVMENTGYEERELIPKHLAQKNK

SEQ ID NO: 114018 - protein, 669 aa, Oryza sativa
  Clone ID: PAT_MRT4530_17750C.1.pep
MREEATTPLTKSGWRRLRLPTAAMTAAAVVATSTAAAGWRGSGRGGRGVVEAVVQPLGWRGLPCRRRGGRRCGVAVGNTELAGGDSRCWWLQAATADGGRLVAMNVATVDVAVAEEVRMATASIFLGIILFLSMAAPAERRSEPDWSSGLPRKLLEFIAKKLPSGRDAASFRLVCSPWCAALPLETFYPMLMLPFDPDSPDGDAAVVTFYCAMDDDDEATIDLRLPEVRGKVACGMSHGWLALMDGAAAVTLLNPFTGAAVALPPADRNVAMASYKTVSMVDGAWILHYISGATKPIKLSNMRDVFFREIVLSASPRNSRGVDCMAMAVLASSTLVAFCRLGDARWTLVDSKLEYPVTCVVHCRDRFVAIGSLGEISIFSVDNTDGVAPLTASLLLLMPPPAHICQRSYMDINGELYLVGAILRVTTWTRYEIVVYKCNLLDENPLWSKVEDSEDIAFFVSKYFNTAKDQKRSMHSQSETEHNESPGLKLCNPRRMAVHSAEKESQRSSGILYGEQYATLSPNVKHAGEILCGFNPISGDEARIFALYYSRVYVSKNSEDIAFFVSKNFNTGFGVASTSNNGTAFTYLNLGRVLIKIKKAQSTIYYLEMVDINTNELELQAFHPSISGFRGSMLDSSESLELSIAGFSGGRMNDAENSKRSEEKNAFPV

SEQ ID NO: 114019 - protein, 192 aa, Oryza sativa
  unsure (1)..(192): unsure at all Xaa locations
  Clone ID: PAT_MRT4530_17751C.1.pep
MSEQQDSTSKSSSSSISSSTQESEEEVSITIGSLLAQAKNNSGHSLGRRLSQLGSIPHTPRVNGKIPNLDNATLDHERLSERLGNYGLAEFQIEGDGNCQFRALADQIFRNPDYHKHVRKLVMKQLKEFRKQYESYVPMEYKVYLKKMXRSGXXGGDHLTLQAAAXRFGAKICLLTSFRDTWLIEIVPRDVT

SEQ ID NO: 114020 - protein, 227 aa, Oryza sativa
  Clone ID: PAT_MRT4530_17752C.1.pep
MSEQQDSTSKSSSSSISSSTQESEEEVSITIGSLLAQAKNNSGHSLGRRLSQLGSIPHTPRVNGKIPNLDNATLDHERLSERLGNYGLAEFQIEGDGNCQFRALADQIFRNPDYHKHVRKLVMKQLKEFRKQYESYVPMEYKVYLKKMKRSGEWGDHLTLQAAADRFGAKICLLTSFRDTCLIEIVPRDVTPTRELWLSFWCEVHYNSLYATDDLLTRKTKKKHWLF

SEQ ID NO: 114021 - protein, 120 aa, Oryza sativa
  Clone ID: PAT_MRT4530_17753C.1.pep
MAQQHDHSTGGSGGDHWRARWRRDGDRGLARRRRPQADAQEARRRRPLAGAQEARRRRRSSAAAVTAGRRAGGEAATAGLCGGKECWPVRRRRDGDRGPAWRQRPLAGTKGGAAATAGQC

SEQ ID NO: 114022 - protein, 108 aa, Oryza sativa
  Clone ID: PAT_MRT4530_17754C.1.pep
MWPLKLDVGATATRKEIRSPTPWLFHRTSPYSWILPSQGRLLDPVLLWPRAPPPFPSTSPKQQQQHTTTVTMRERGGCDGGVEAKAAIGSGCSSEGEEVGASKQQVSD

SEQ ID NO: 114023 - protein, 82 aa, Oryza sativa
  Clone ID: PAT_MRT4530_17755C.1.pep
QRLRRIDVKRLTGEASGNPHTVVLRRSSYIASEGGGYICMHARISTLIGQEVHILIFWGYVSSCVGIIEGISTLETMILRRC

SEQ ID NO: 114024 - protein, 403 aa, Oryza sativa
  Clone ID: PAT_MRT4530_17756C.1.pep
MEQEAAVRDQVELTMRLFHPLLLEDEHGTTTNFAFSRRSFHAAFTLLASGGAGATRKQIVAFLGPAGADAHTALASKEASVGVHNPEVRSAMAVWVDASLRLNPAFADTAASVFKAAVRSAGNPAAARAEINEWFSSQTGGFVKDILSNSIDDDDDGSGGGGGAISASVFLANSLYFNAYWDHPFFPHLTEEGDFHVSPDHDVRVPFMAGSHQHAFMDVGCHPGFNVLRMMYRTGGAAGGDKMFAMYIYLPDDRDGLPELARKLASNPAAFLRRTIVPAQPVAVGELKIPKFEVSLKVEASRLLREFGLDLPFLPAADNSFSGMLLDPPQGTAVSSLLHQCFVNVNEEGTVAAAGTVGEIMGFAMPDDQIVDFVADHPFLFFIVEEVSGLVVFAGQVVNPLLH

SEQ ID NO: 114025 - protein, 36 aa, Oryza sativa
  Clone ID: PAT_MRT4530_17757C.1.pep
MRSGTPEQQPDKDFNLHVYFAGPDPWEGYCWLYGPK

SEQ ID NO: 114026 - protein, 1073 aa, Oryza sativa
  Clone ID: PAT_MRT4530_17758C.1.pep
MPADEETPLVEESTAAIISRAGAAAVARSACFLLPRAGATAAALPGCAPCAGPVLGDGHRVEFCGWPCSSALWRRWVERLRPRHEPLWREVGILDAVLATAAACPVRRDGWLVLQLAAFWCGATSSFAFPWGEATVTLEDAAVLGGLPLLGAPVTARLPGTLAGDDAALEAVRAALHRSKCKNSTYSTWLHHFLGRDGGDGDGEDTEAEAQSLLEHGAFLATRPGRWSSPSPRGQSVALAPAALASIYNDLTALKCHLASSTKWRHPFVAWAPLHVVQLWAWERFPELRPDKAATSAHATADGHGAPPPWAARWHNARTELQPAHIHAVLMSPMEFEWRPYGSSGFALQLDKVGIWIHGRDIARSRELLSFAHCLRPCELVGLRCVEHYLPHRVARQLGFDQDVPGNVPRASSNSSVAWATYKMEPQDVKFTLPRHEPGVTVEYAQWWEPYSSACAAAVANAAKMKQLDGVDCPRKRKAEGFVDGDSGKRRHLEIAEDPEDEIPLIDRQNSITMMVNGSSNHVEIVGIGKDSMASWARNGGNGSPLHKSTQQAWSDAEAVLETTVGEDEASDHVIAEDKKNSNTGDGESEVCCLVEDAASDDSNKAIGPAASVTRKSIPKDVMVISDDEFDEELSSKDDEMNTIYLSSDPMETTKCTLQKLDVKREVVITGNGEQGSPLLKEVRVHSKCYDIIEINDDESIEVTRKEDEAIAMHVNSDPMETTKCTLQELDAKREVVITGNSEQGSPVLKEVRVHSKCYDIIDINDDESIEVTRKEDEAIAMHVNSDPMETTKCTLQELDVKREVVITGDGEQGSPLLKEVRVQSKCYDIIEIDDESGEVTSKGEEAITMHLNSPMLDKIASTLREANEESKPGNTSDKRENSVLKDMPRNNCDSEDATVLNDITLRKELAEVTHVSSAQINIDTSEASTKEMRACITSGEADKRGKLNKKRLAALEGDEKENEDMSVSNQEIGSHMDCQEVNKKGNNESSSSILVDGNADHVKKTVSTKTPCKNADQEGFHQSSEVGMEEMVRGASEAQQAQKAQLEAAIDGLKEEIAMLERQVRDTNPRKA

SEQ ID NO: 114027 - protein, 95 aa, Oryza sativa
  Clone ID: PAT_MRT4530_17759C.1.pep
MAASAAKRRHPRRLLSAAIRVGVDGLGACSGGGQGVGDGVDAAAVLTARGAANRVGVAIDVKGGTCTVAAAAFLLISRLPSVPNPPLTRPVDNPR

SEQ ID NO: 114028 - protein, 55 aa, Oryza sativa
  Clone ID: PAT_MRT4530_1775C.1.pep
RPNIPIPSTPFTFIFPSSPPNPARFYFHLQFPLQTQILPLQHQLQPLLTIASYSP

SEQ ID NO: 114029 - protein, 252 aa, Oryza sativa
  Clone ID: PAT_MRT4530_17760C.1.pep
MALISVNLGIMNLFPILPLDGGQLVLIATEAIKVANGVIAAPFVVKDIRIDGVQTETGNAIIASLPVKVGQTATDGDVTNIVKQLFSQNRFENVSAAREGQTLVIKVAERPLINNLTIKGNNAIPKNALEQNLKANLIVAGEVYDKAKLEAFKQALVDHYHTMGRYQADIQTITTPNNNGSINVELNITEGEIAYVKKINFEGNNAFSYDELIKELEIKPNAPWWNIFESSKFQQQEYNKDIEILRDFYMDH

SEQ ID NO: 114030 - protein, 53 aa, Oryza sativa
  unsure (1)..(53): unsure at all Xaa locations
  Clone ID: PAT_MRT4530_17761C.1.pep
LPPPHPLPHEATPQHPRRRRRRGRRRRXXRPPPPPSRPPPSRSPPPPPQGPRP

SEQ ID NO: 114031 - protein, 307 aa, Oryza sativa
  unsure (1)..(307): unsure at all Xaa locations
  Clone ID: PAT_MRT4530_17762C.1.pep
RPDYQVLRSAFVQRHYPNRPDFDFHKYMVRALEHDFKEVVGISWYLWLFVIVFLLLNINGXWHTYFWLSFLPLILLLIVGTKLELISTRLAQEAADCPDEATGNPWTKPCKEHFWFSKPRIVLHLIHFILFQNSFEMGFFFWVLATYGFDSCIMENKIYALPRLAIGIIVQVLCSYSTLPLYAIVTHMGGDIKLQAFGETVHVSVHSWATDVRKKKAAPPPHSHLRIPFLMKRRHSTRGADDAADDAGGDVDHHHHHHGHHHHGHHHHEGSSAAAAAPDLEEIVATTSGGEDGHPPAPPPPPQGPRP

SEQ ID NO: 114032 - protein, 53 aa, Oryza sativa
  Clone ID: PAT_MRT4530_17763C.1.pep
AADFFFDSYTPPQQGSLMVNYWHKASSRSIYTQWTTSYGPLALKNKLVVTVLE

SEQ ID NO: 114033 - protein, 55 aa, Oryza sativa
  Clone ID: PAT_MRT4530_17764C.1.pep
QDVILAIETVRRSLCSEEFYAIYQCYEYIGVNYIIKCSHCFARLEGGFYWPTRMM

SEQ ID NO: 114034 - protein, 233 aa, Oryza sativa
  Clone ID: PAT_MRT4530_17765C.1.pep
MEHLSIQNLYAPRAEFCEAPFSTKLIRSSGYELHPNIIAIVREQPFSGRERENSYHHLCLDKESAMYLNISVGGSFAHKTRSEGGKLLDHILENTSFAHCETIIEIEDTHEESTSESEYATSISHDSNVESSPEPREPKVIELPKTDPPSQPLVELKSLPSGIHYAFLHGDMELPVIIREKLFDDETSKLTAVLKNLRSMLGYSLQGLKGISPTLCTHRTPLDPSCVPSREPQ

SEQ ID NO: 114035 - protein, 504 aa, Oryza sativa
  Clone ID: PAT_MRT4530_17766C.1.pep
MKYQQMSNNFAQNKFAFFTNCCILVHQVLKFNGQEALFSALQRVKEELMLLGFISFLLSVFQKFINHICIPESAAHLMLPCITRETSETTEDASKLCKRKGEVPMLSEEALHQLHIFIFVLGIVHVVFCVTTLLLGGAKMKKWEKWEKEIQQGRTKERPKRPGWMKFIVVRCAISFLKQFYDSVGKPDYQVLRSAFVQRHYPNRPDFDFHKYMVRALEHDFKEVVGISWYLWLFVIVFLLLNINGGYPLNFSFASNAGWHTYFWLSFLPLILLLIVGTKLELISTRLAQEAADCPDEATGNPWTKPCKEHFWFSKPRIVLHLIHFILFQNSFEMGFFFWVLATYGFDSCIMENKIYALPRLAIGIIVQVLCSYSTLPLYAIVTHMGGDIKLQAFGETVHVSVHSWATDVRKKKAAPPPHSHLRIPFLMKRRHSTRGADDAADDAGGDVDHHHHHHGHHHHGHHHHEGSSAAAAAPDLEEIVATTSGGEDGHPPAPPPPPQGPRP

SEQ ID NO: 114036 - protein, 93 aa, Oryza sativa
  unsure (1)..(93): unsure at all Xaa locations
  Clone ID: PAT_MRT4530_17767C.1.pep
MFFSFSPINMRISSYFLIVFLYGLYTLLLIXSLFLIPKFIYFLIVFLYELYTLLLIFLIFNSEFQLFPNCISICTLVSSSNIPYFLIPNFNYF

SEQ ID NO: 114037 - protein, 193 aa, Oryza sativa
  Clone ID: PAT_MRT4530_17768C.1.pep
FFFFFPTPAMQHISTQAFWAGRHHCSTTPNTYSPRSLQFSNSTLQHPQGTSGSSLGPSAHHHRSPQVLTNSPAWHSTHMHTFGPPPHKHCSSYSRQVLQHMPPPGATWRLHSALLATSSPYLYNSFPQVHMCIVPQLSLGHSTHHHLANFHVALPQHIIAVNHRLGRVITQHPSSQSALAHRPPHPPPMPPNG

SEQ ID NO: 114038 - protein, 112 aa, Oryza sativa
  Clone ID: PAT_MRT4530_17769C.1.pep
HACIRLMGRGQRKLNAIHLEVSRTTARAKAAVEAAGGTVRLVYYNNLGFRALLKPEWFAKKGRLLPKAARPPPKQRDKVDSIGRLPAPTKPLPFTPEELEFAAKREAARVIA

SEQ ID NO: 114039 - protein, 671 aa, Oryza sativa
  Clone ID: PAT_MRT4530_1776C.1.pep
MANKTVREFVALSADNVAIGPQINMGDVDFDPKSSLIMMAQASPFCSKPNEDANAYLQQFLEICNTYTMKGVSPYAVRLRLFPFSLLGEAKLWFYANRPTINTWDKCSTAFLSKFFLMGKTNALRGRISSFQHTRDESIPEAWEQLQEYVAACPHHGMDDWLILQNFYNGLTPMSRDHLDAAAGGAFFSKTRGIHTVKETEILVAKLDLFMKRLDDHEKRPQGTIKALDSHITCEDCGSMGHSGNDCPETREEVMYMGNNNNNEYRPQGGQGWNQPLPYYQGATLVPTNESGRIPGQPESSVENVKVITMRGRKSTRDPPYPNPAGTSSITKEAPYSNSADEKVQPEKTMPQEYRDTRLLPFPQRNKKPSVDEQFARFVEVIQKIHINVPLLDAMQVPTYARYLNDILNNKRPFPTTEVVKLTEHCSNVILHKFLEKKKDPGCPTITCSIGTQQFDQALCDLGASVSVMPKDVFDKLNFTVLAATPMRLQLADSSVRYPAGIAEDVPVKIRDFFFLVDFVVLDMDTEKETPLILGRPFLSTAEDNNDMGMGSIRFRINGKQEKFEFQPRTKQCSMVRINYGPNQQNIQMVEVEPPKTDSLVKFMRNFLEKETTFPRNRYWKTPVKSSTPAKKLEQLAQRKPSPSPKPKRVWKEKPKTPTPSPPETGGKSAN

SEQ ID NO: 114040 - protein, 105 aa, Oryza sativa
  Clone ID: PAT_MRT4530_17770C.1.pep
MMPLLPIRSGAASYAAAERGRLTRRRWRGAGVRGGEPREGRVAALFRRGLAEWSSLRRVFGVDAVESDSFPFRLRDVCAATCSGGRPHSHHRGFRQGGGHGQLHR

SEQ ID NO: 114041 - protein, 73 aa, Oryza sativa
  Clone ID: PAT_MRT4530_17771C.1.pep
MRGLANTTSDKAPQYSQEEYIDQLAPSQADNRTPQADNPEQACTVVPHYIGIFHGRYETNPNHMAYTPAAPKP

SEQ ID NO: 114042 - protein, 79 aa, Oryza sativa
  unsure (1)..(79): unsure at all Xaa locations
  Clone ID: PAT_MRT4530_17772C.1.pep
GANRXCLWIIWMLIXYMGYISMCAYYXVGXXGGWLFIWLWASMCXCLNXVVLPYXVIXLWVRWYNSXMELLPLMGSGGG

SEQ ID NO: 114043 - protein, 117 aa, Oryza sativa
  Clone ID: PAT_MRT4530_17773C.1.pep
MTVEKVDATVADFVSHFDKLFVAGDDAEGKVKLLLFLVDRDVSSNQTWSPDCNVLVPAIYDRVEATAKGKEKDVVLLRSVRMLHDHLEGPGAPRWRGYPVFKLTGVPTFISGRTVPR

SEQ ID NO: 114044 - protein, 214 aa, Oryza sativa
  Clone ID: PAT_MRT4530_17774C.1.pep
MTGMSGTQNQQHQQGNNNRVPDDSYSKVKFKIPSFLDYYDAEKYFDWEMTVEQKFSVYLVPEQHRIRQTTKKKLLGRDQQSQEQGEHKDCPSQRAYIAMEDGYISIFDVEDDEEEERKNGEKDLSIAICMLEECLIDQAPIISEDEKEGNDNGATTTQDKDKFNTLHDKVKPRTVSNQEGEDDEDTTSSDITMTTLCIDQPKRYLLGRKKRDRA

SEQ ID NO: 114045 - protein, 467 aa, Oryza sativa
  Clone ID: PAT_MRT4530_17775C.1.pep
MRRMRFFALSSSARWLTEEVERVLRDKFQGGICKSEPRRFFSIVERALAAAAMAATASTSGEWLKGALQELRERMGGALELDADLISGLVSFCELAPPPDAADYLANIIGVEAAQDLIQEYLQRRGYIDPLKGNENLQSSNLQPYVKPSAEAGPTQTKKQTRTQKDAAASSSGQSSKNQPETTEPRVASKRGSKKKAVKAISLAEAAKGSIVFKQGKPCSCQARQHNLVSNCLSCGKIVCEQEGEGPCSFCGALVLMEGSTYAGLSDVEIPLSEAEAEAEAYAKRLVDYDRNSAARTKVYDDQSDYFEMEGNSWLSSKEKSDLKKQHGEAQEAAEKDKGKVVVTFDLVGRKVILNKDGATVLESEHRILGPPEEKDQIHRIQANPTIREQPVFIETGPVKPKTDRARQSKRLTKNGLCLEVTGRLQHDDKDPQSFLGGKMKKGDHLAYSSFGQPREGDDFDCSQDFD

SEQ ID NO: 114046 - protein, 67 aa, Oryza sativa
  unsure (1)..(67): unsure at all Xaa locations
  Clone ID: PAT_MRT4530_17776C.1.pep
MSSSETPKTEWPELVCRTIKEAKEKIKADRPDLKIEVVPVGTIVTQEFDENRVRIWXDTVAKTPTIG

SEQ ID NO: 114047 - protein, 234 aa, Oryza sativa
  Clone ID: PAT_MRT4530_17777C.1.pep
MGKTNALRGRISSFQQTRDESIPEAWERLQEYVASCPHHGMDDWLILENFYNGLTPMSRDQLDAAAGGAFFSKTVRGAVDLIEKMVSNMGWSEERLQTCQRGMHTIKETEMLVANRDASGAGFFFGPQSRPTKKPANLRAGHPAWTLQNCLAHPAQPIGRHGIRAQTGRRETQPQRRSRDGRRETAAARRRRSGRYSRLPRRPSIQIQQPTPSSLLIQRNSESSAFHTSVLDSS

SEQ ID NO: 114048 - protein, 144 aa, Oryza sativa
  unsure (1)..(144): unsure at all Xaa locations
  Clone ID: PAT_MRT4530_17778C.1.pep
GGSSRRPGNSHFWQEILEVKESFYKFCNKIVGDGRNTLFWEDGWGXRPLNDRFPELYNVAVTKKVTIATLKQKGIDSVKFRRCLYCEKLRDWNKIKNRWVXLQLNENDRDKIWWNLTKEGRFTVKSFYSAMKMEQVNFPQKKKH

SEQ ID NO: 114049 - protein, 227 aa, Oryza sativa
  Clone ID: PAT_MRT4530_17779C.1.pep
MATGYYRGGGGARDHADEPDDFDEYDPTPYGGGYDLFITFGRPLPPSDETCYPCSAPSTSYDAPHYSADEPSPYAHHSKPQPAYGFRPQHEQQQQPSYASSGYRPQHEQQQSYGSSGYGSKPQPAYGFRPQAEEENTYGSGYGSGYGGGGRKQQEEESYGSGYGRKPQVEESYGSGYGTKPQQEESYGSGYGSGYGKKAQEESYGPYGSGSYPKEALPVGDPGIWVG

SEQ ID NO: 114050 - protein, 110 aa, Oryza sativa
  unsure (1)..(110): unsure at all Xaa locations
  Clone ID: PAT_MRT4530_1777C.1.pep
HQVPGASFLLLAPASPAPEQTPAKPHGDKDGGGGAYFFSLKEHAGAPAAXGATEGGCGGARXIHAAQAESGSVAVGGGEGDRRGGDDGYGEGPWATGTKMAVVMETADRL

SEQ ID NO: 114051 - protein, 302 aa, Oryza sativa
  Clone ID: PAT_MRT4530_17780C.1.pep
GDYDVTMDGIHENFLKLNYHDPMLQKTPPVAITISQLVAQVEKPNIEWPKSLQRCRTMLLEKKDKLKTWQNQMSPLISRHLSVESFVEDIASPFLHIISPSSLRPVALNLLSEREKDELVQLVDTMVSYSITYRNTKLEPQERISGSMVSPDVPSLSLDPAINDIINFKVEKQKIMKDSAGKLLNQANEGDKRNEVSVSEKKSALVSTKSTSKSNPTTLKMQLSSASSMSGKDPAPAKKHSNHGINFFDRFRKERPVDAKARNDAGQQVATTLRDSRPLIFKYNEGFTNAVKRPVKVRDLLL

SEQ ID NO: 114052 - protein, 343 aa, Oryza sativa
  unsure (1)..(343): unsure at all Xaa locations
  Clone ID: PAT_MRT4530_17781C.1.pep
MATGYYRGGGGARDHADEPDDFDEYDPTPYGGGYDLFITFGRPLPPSDETCYPCSAPSTSYDAPHYSADEPSPYAHHSKPQPAYGFRPQHEQQPSSPYASSMATAQHEQQQSDGSYAYGSKPQPAYGLRPHADEENPYGSGYGSRRPSASAPSTTPGRGRSRSPRATAPPASRGSRTRRRAXSKYGSGYGSKPQAESYGSGYGSRPQQGEEEYGGGGYGKKAQEESYGSAGYGGRKTEEESYGGGSGYGYGKKAQEESEGTYGSGGYPKPKPYSQEETQGSYGYGYGEKPAYESGGYNKPSYGGGDEYQGGYGRKKHDDNDSDDEKKQRYQKHHHHRRQEYDD

SEQ ID NO: 114053 - protein, 113 aa, Oryza sativa
  unsure (1)..(113): unsure at all Xaa locations
  Clone ID: PAT_MRT4530_17782C.1.pep
NGPCELGEREAGWGLARYADVSQDNGLVSIAEPEILLXGEHGIHRTFXGAHNVWAETLIYMVQNNAMDEVMMFKPSLXTPGVKGKDRVTHEQVLDYTMRLLYRRITTAVPGIM

SEQ ID NO: 114054 - protein, 61 aa, Oryza sativa
  Clone ID: PAT_MRT4530_17783C.1.pep
MGGVEAARLRDGGGGGGGGFRFSLPARLPDCPCPLVPGPLTVGHPGHIGPALPQAQLEPQL

SEQ ID NO: 114055 - protein, 78 aa, Oryza sativa
  Clone ID: PAT_MRT4530_17784C.1.pep
HSRVRVGYHKFRNIGGTWVIISVFFFSVTTAEYASELWIYHLLLTCQLIFRLRLVLTERADRGSEQLQGYQTAQIRAR

SEQ ID NO: 114056 - protein, 57 aa, Oryza sativa
  Clone ID: PAT_MRT4530_17785C.1.pep
ADVQGDTRTACGYLHKGGFAPVPSRQRAAPISCRGESGSRSIGHPGRPNSITPTLVW

SEQ ID NO: 114057 - protein, 128 aa, Oryza sativa
  unsure (1)..(128): unsure at all Xaa locations
  Clone ID: PAT_MRT4530_17786C.1.pep
RNKQKRKKHIYTYSDGLIRSSVASKRRSLAAYLMAGMAAISSTHLSESYMTVRDRQCQWKVHDSPIDSCSEVLDRXFTGRERVQPMFRRPSTLGLRMHGWQKMHDVSTKCTMTTISLMARSYEESMPM

SEQ ID NO: 114058 - protein, 114 aa, Oryza sativa
  Clone ID: PAT_MRT4530_17787C.1.pep
SPRNPRRRISSGTKRKFSTTWCRKIQPKGKGTRKRTGSPRRKPSSSKCSPFRFSQIQVKVGGPASICFFKLPLSKNKLMRRPHCINSPALFYVCVYCMTYGLPLDMMIMFPLLA

SEQ ID NO: 114059 - protein, 155 aa, Oryza sativa
  Clone ID: PAT_MRT4530_17788C.1.pep
MAAAEAEAAGPLRRALFVLAVLALLLVAAPAAEAWTGEIRGHVVCDVCGDAAIGPEDHVLEGAEVAVLCITRSGEVINYQAFTNSKGVYIVAETMPESDRWESCLARPISSFHQHCTKRGDTHSGVKFTYSKPSGNSHTVKTFLYKPANAPLYCS

SEQ ID NO: 114060 - protein, 223 aa, Oryza sativa
  unsure (1)..(223): unsure at all Xaa locations
  Clone ID: PAT_MRT4530_17789C.1.pep
WPCPRLRLHSGGSSAAEHGSGPPLAGSGAPTGGSRVGRWDPPPSRPAATTPRPAKERXGLARPRRCGDXAVTVSDAIIGTVSNGGRPCGAARQSGAGLGGDSSEIPQIRANSAGSGRRLVVAAVTAAAAGDGDSCDGHGVGAAPSCLLVDVLLVEADSFPXCWWRATVQRQFAEAVAGVGGSSDGGRDCGGGGDVGGGEGVRCEARMATARWLGIRQQRLQWW

SEQ ID NO: 114061 - protein, 529 aa, Oryza sativa
  unsure (1)..(529): unsure at all Xaa locations
  Clone ID: PAT_MRT4530_1778C.1.pep
MAIDQPIKKRGRPPGSKNTKNKMEQKMELVHQRLALLDSSSGSDRDDDIGPRAIIIDCDEDDTDDVMEVVPLKMLMPKEVENEQRTVPGIPQTCNTQNTSNGRTNTTEVPVKGQNKCASYLPKKSSVQAFCGSAMKRAQEIQTKLPAEHPSFVKHMLHSHVVSGFWLGLPAGFCNKYLPKHDTDIVLEDENGNNHNTNYLGGKQGLSAGWRGFAINHDIKVGDVVVFELVHIIRDKNISPTDRAPGLKSFYACKKRKISKEATDNATKPKEDPETTRVSSKVAHDDTQNLVHEAIDGIRFSDSEMSFDDVMSYSNFNIVVDGLVIDCKFPDHQRRTYYELCCAQKSFLHRHLLRQLSLTLVVGVIMETINIAEGIRACGAGTSSQEDFLIWKKTLQSFDLLGMNVAFLLKRVDDILGLPEQPRDPSECSKYNELKLERSRAGEKVKALESMMLTVKDVLKKIDAEMEEMESSVRNHDIALRKIATAPWXVSDDDDDDDALGNLRDVPYVSQYMILLGNKWHLNVCPPSN

SEQ ID NO: 114062 - protein, 140 aa, Oryza sativa
  Clone ID: PAT_MRT4530_17790C.1.pep
MMSLQIPARSGGLRRLLLLGGADGIRRPYSTGDRRRRVIREARQEEEDEAFLRTLNFSADPENNPPPPPPPPPRRPGGAPDDSSPHAAFPTDILRRAAGKQPLPPPQQPIGESLMEKLKLGDAAATSAAGNSGERPQPER

SEQ ID NO: 114063 - protein, 374 aa, Oryza sativa
  unsure (1)..(374): unsure at all Xaa locations
  Clone ID: PAT_MRT4530_17791C.1.pep
RGRSRQFVEPNEGLGMSSQLFGRRYRHVMCSMGYKQCNGDHTIFYRHKRCHTSILAVYVDDMIITRDDSIEIARLKKSKEFEVKDLCRLIYILGIEIARYTKGIVLSXKKYALDMLSDTCMLGCRPTSTLIEQNHKLCAESENPVNKEIYQKLVGRLIYLFHTRPDITYAVSVVSRYMHDPKSGHIEAVYRILRYLKGSPGKGLWFKKNKHLRVEGYCDADWASCPDYRRLTLGYCAFVGGNLVPWRSKKQPVMSYSTAEAEYIAMSVSVSELIWLKNLLIELKLLKNAPSPXMKFXCYNKSTINIANNLVXHNQTNHLEIDRFFIKEKLDKETLELCYVVSGEXVADCLTKALGVKECTSLCNKMCMIDIYRL

SEQ ID NO: 114064 - protein, 1096 aa, Oryza sativa
  Clone ID: PAT_MRT4530_17792C.1.pep
MVATGFSFLLTLLLLATAVPPAPTTRAQPATDHLALMAFKSQITRDPSSAMASWGGNQSLHVCQWRGVTCGIQGRCRGRVVALDLSNLDLSGTIDPSIGNLTYLRKLDLPVNHLTGTIPSELGRLLDLQHVNLSYNSLQGGIPASLSLCQQLENISLAFNHLSGGIPPAMGDLSMLRTVQLQYNMLDGAMPRMIGKLGSLEVLNLYNNSLAGSIPSEIGNLTSLVSLILSYNHLTGSVPSSLGNLQRIKNLQLRGNQLSGPVPTFLGNLSSLTILNLGTNRFQGEIVSLQGLSSLTALILQENNLHGGIPSWLGNLSSLVYLSLGGNRLTGGIPESLAKLEKLSGLVLAENNLTGYNQFEGAIPTWMCNSSMLSSFSIEMNMISGVVPPCVDGLNSLSVLTIQNNQLQANDSYGWGFLSSLTNSSQLEFLDFSSNKFRGTLPNAVANLSTNLKAFALSENMISGKIPEGIGNLVNLLYLFMSNNSFEGNIPSSLGTLWKLSHLDLGFNNLLGQIPPALGNLTSLNKLYLGQNSLSGPLPSDLKNCTLEKIDIQHNMLSGPIPREVFLISTLSDFMYFQSNMFSGSLPLEISNLKNIADIDFSNNQISGEIPPSIGDCQSLQYFKIQGNFLQGPIPASVSRLKGLQVLDLSHNNFSGDIPQFLASMNGLASLNLSFNHFEGPVPNDGIFLNINETAIEGNEGLCGGIPDLKLPLCSTHSTKKRSLKLIVAISISSGILLLILLLALFAFWQRNKTQAKSDLALINDSHLRVSYVELVNATNVFAPDNLIGVGSFGSVYKGRMTIQDQEVTVAVKVLNLQQRGASQSFIAECEALRCVRHRNLVKILTVCSSIDIQGHDFKALVYEFMPNGNLDQWLHQHLEENGEDKVLNIIKRLDIAIDVVSALDYLHQHRPLPIIHCDLKPSNILLDSEMVAHVGDFGLARVLHQDHSDMLEKSSGWATMRGTIGYAAPEYGLGNEVSILGDVYSYGILLLEMFTGKRPTGTEFREALSLHNYVKMALPDNVIDIADQHLLSENNDGEERNSDGKRTRDTRIACITSILQIGVSCSKESPADRMHIGDALKELQRTKDKFSVSLR

SEQ ID NO: 114065 - protein, 86 aa, Oryza sativa
  Clone ID: PAT_MRT4530_17793C.1.pep
FFFFFFFFFFFFFFFFFFFFFFFVHQKLEQTSNRNKKIHIEKNIYENHLHDTYKNWNLQLHWKMICTQKKLYRENCNSDICPASFC

SEQ ID NO: 114066 - protein, 146 aa, Oryza sativa
  unsure (1)..(146): unsure at all Xaa locations
  Clone ID: PAT_MRT4530_17794C.1.pep
PTLYFLPPAVLHPLRRRTTSGDGAEPQGRRRRASGAAAGSVVRRPAAAAGGGGGHGAARSRAEAGRRGTQRWRAAAPRGGRGPRRAEAAGGGAARRPAAAASRGGARRRAGRRAAPXTARRPAAASSGGGGWRRRAEAASGGGWRA

SEQ ID NO: 114067 - protein, 163 aa, Oryza sativa
  unsure (1)..(163): unsure at all Xaa locations
  Clone ID: PAT_MRT4530_17795C.1.pep
LRGPLLFILVQPTVGVSADRCRRRPPPAAAAVLLPPPPPDPXDPGGGRPPLPDLRGTAASPSTATVRPMPPSSLSRQTPPSPHTAFVALPSDATRAGLCRRHPKPPSSPSPRPPRAXPLPPTPLIAFAALPPAAARADLYRRRPLSPSPPFRRPPPLSQPREF

SEQ ID NO: 114068 - protein, 148 aa, Oryza sativa
  Clone ID: PAT_MRT4530_17796C.1.pep
MMPACGMGSSRRPRRWSGGSKLAVACLAAVAVTSLQLCCLSGCFIAACGGAGRDDDDVRRYSDHFGRLEGAGAHSGDLLEGGGHYHVGLGRRLLSGGPGSHPPRCTSKCGSCSPCSPVHVSVPPGVLVTTEYYPEAWRCKCRNRLYMP

SEQ ID NO: 114069 - protein, 1120 aa, Oryza sativa
  Clone ID: PAT_MRT4530_17797C.1.pep
MGPLLDLGRRKALDLDDVPTLDDNDSVQGILPNFEAKLISVSGSGKYTGVTTIKLVKALVLTTWKLILFTAVCALLRTVSSYVGPYLIEYFVDYLNRSPRTAKEGYILVLSFVVAQFIKGLSSRHLLFRSQQLGVRVRSALVAIIYQKGLSLSNQSRESISSGEIINAVSVDAVILAMLILYSTLGLAAFAALAATVLTMLANLPIGRIQQNYQEKMMDAKDARMRAMSEMLRNMRILKLQGWEMVFLSKIMELRKEEMHWLKKDVYTSVMLISVFFGAPAFIAMVTFGSCLLLGIPLETGKVLSALATFRQLQGPINSIPDTVSVIIQTKVSLDRICSFMHLEELSSDVVTKLLRGTTDVSIEVRNGQFSWNTSSEVPTLRNLNFRIRQGMRVAICGTVGSGKSSLLSCILGEIPRLSGDVQTCGRIAYVSQSPWIQSGTIEHNILFGTKLHRERYEKVLEACCLKKDLEILPLGDQTIIGERGINLSGGQKQRIQIARALYQDADIFLFDDPFSAVDAHTGLHLFKVMKDGQIIQVGNYAEILNSGEEFTKLVFSHKDDISTLESLEHSSGNPESSLIPGDSGSMLFRQDKQKDENEGAEGIVQNGQLVQEEEREKGRVGISVYWKYITMAYGGALVPLILLAQIIFQVLQIGSNFWMAWAAPISKDVNPPVNSLKMASSDQSTVDTRIFDLMGYVLFPAIELLGTIILMSRQYYIDGARELQRLTGVCRAPVMQHFAESVAGSNIIRCFGKEIQFINAVSHFMDNLSRPSLYNAASMEWLCFRLDILSSFIFAFALILLVTLPAALIDPKTAGLAVTYGLSLNMLQGWAIAVLCSLENRMISVERIFQYMFIPSEPPLTISKSRPNCQWPTNGEIELRNLHVRYATQLPFVLKGLTCTLPGGLKTGIVGRTGSGKSTLIQALFRIVEPSIGQVLIDGLDICTIGLHDLRTRLSIIPQDPVMFEGTLRNNIDPLEEYSDEQIWEALNSCHLGDEVRKNELKLDSAVTENGNNWSAGQRQLVCLGRVVLKKRKILVLDEATSSVDPITDNLIQKTLKQQFFECTVITIAHRIASVLDSEKVILLDNGKIAEDDSPAKLLEDNSSLFSKLVSEYTKGSEY

SEQ ID NO: 114070 - protein, 1186 aa, Oryza sativa
  Clone ID: PAT_MRT4530_17798C.1.pep
MGPLLDLGRRKALDLDDVPTLDDNDSVQGILPNFEAKLISVSGSGKYTGVTTIKLVKALVLTTWKLILFTAVCALLRTVSSYVGPYLIEYFVDYLNRSPRTAKEGYILVLSFVVAQFIKGLSSRHLLFRSQQLGVRVRSALVAIIYQKGLSLSNQSRESISSGEIINAVSVDAVILAMLILYSTLGLAAFAALAATVLTMLANLPIGRIQQNYQEKMMDAKDARMRAMSEMLRNMRILKLQGWEMVFLSKIMELRKEEMHWLKKDVYTSAMLISVFFGAPAFIAMVTFGTCLLLGIPLETGKVLSALATFRQLQGPINSIPDTVSVIIQTKVSLDRICSFMHLEELSSDVVTKLPRGTTDVSIEVRNGQFSWNTSSEVPTLRNLNFRIRQGMRVAICGTVGSGKSSLLSCILGEIPRLSGDVQTCGRIAYVSQSPWIQSGTIEHNILFGTKLHRERYEKVLEACCLKKDLEILPLGDQTIIGERGINLSGGQKQRIQIARALYQDADIFLFDDPFSAVDAHTGLHLFKECLLGLLASKTVVYVTHHVEFLPSADAIMVMKDGQIIQVGNYAEILNSGEEFTKLVFSHKDDISTLESLEHSSGNPESSLIPGDSGSMLFRQDKQKDENEGAEGIVQNGQLVQEEEREKGRVGISVYWKYITMAYGGALVPLILLAQIIFQVLQIGSNFWMAWAAPISKDVNPPVNSLKMASMSFFDSTPSGRILNRASSDQSTVDTSIFDLMGYVLFPVIELLGTIILMSRVAWPVFVIFVPIIAASLWYQQYYIDGARELQRLTGVCRAPLMQHFAESVAGSNIIRCFGKERQFINYVSHFMDNLSRPSLYNSASMEWLCFRLDILSSFIFAFALVLLVTLPAALIDPKTAGLAVTYGLSLNMLQGWAIAVLCSLENRMISVERIFQYMFIPSEQLLTISKSRPNCQWPTNGEIELRNLHVRYATQLPFVLKGLTCTLPGGLKTGIVGRTGSGKSTLIQALFRIVEPSIGQVLIDGLDICTIGLHDLRTRLSIIPQDPVMFEGTLRNNIDPLEEYSDEQIWEALNSCHLGDEVRKNELKLDSAVTENGNNWSAGQRQLVCLGRVVLKKRKILVLDEATSSVDPITDNLIQKTLKQQFFECTVITIAHRIASVLDSEKVILLDNGKIAEDDSPAKLLEDNSSLFSKLVSEYTKGSEY

SEQ ID NO: 114071 - protein, 97 aa, Oryza sativa
  unsure (1)..(97): unsure at all Xaa locations
  Clone ID: PAT_MRT4530_17799C.1.pep
LGCFSSCAGFGGFFSLLACASWVGWSPLCVRPAWWVRFVARVSFFVVVRRVLFCGGAGCLCGRWFRRFCVCMXFGWFLGQGFLKAPLSGGGGCGSKR

SEQ ID NO: 114072 - protein, 224 aa, Oryza sativa
  Clone ID: PAT_MRT4530_1779C.1.pep
MSRSSSSMATVLVVLMVVSAGGLSPPCAAAAKEEKPVVVLPPAAAPGEAPSADAAAFVRSCCDTALQADRDGSSFCYDHLLPYAAFFEGNQVKVAEVAATILSTNLWVYVDQLRKVQGGAGKGDPNLNACVDDFSVAAGENITREALQSLGRLAAAGNGKRSKEDLENAQKWIKGVEKPYNGGIGKASGCEIGYLFTYSDDLPAQKTLGYTFDTASSLINHIKL

SEQ ID NO: 114073 - protein, 78 aa, Oryza sativa
  unsure (1)..(78): unsure at all Xaa locations
  Clone ID: PAT_MRT4530_177C.1.pep
MXWXXXXYXGXSCHQQQSXCXSHGNVIHLPXXXEVSHLTRLKXXPXXXSRASXSXLVKKRHISTFXLLXXXXSNCFRG

SEQ ID NO: 114074 - protein, 146 aa, Oryza sativa
  unsure (1)..(146): unsure at all Xaa locations
  Clone ID: PAT_MRT4530_17800C.1.pep
MACCQVVEDEVFPDGTVLKKGTKVIYAMYTMGRMESIWGEDCREYKPERWLRDGRFMGESAYKFTAFNGGPRLCLXGKDFAYYQMKFAAASILRRYHARVVDGHPVAPKMALTMYMKHGLKVKLLRSIIQWFGHSSVLYPSFFCMA

SEQ ID NO: 114075 - protein, 1198 aa, Oryza sativa
  Clone ID: PAT_MRT4530_17801C.1.pep
MGRIGREDERRERNLTGVRVVVPGGGGGVEVVVPDGIVQETAVVDPGDGGVDVQVAAALMASIQAVATQIEVAVSEDEDGGGRAEARQRRGSVLYKDRIGTEPLDLARNLVPPGTGTERWTEFMDQPLLDRAASSSSKATSSRSAFTDAGFFSIITFSWMGPLLDLGRRKALDLDDVPTLDDNDSVQGILPNFEAKLVSVSGSGKYTDVTTINLVKALVLTTWKLILFTAVCALLRTVSSYVGPYLIEYFVDYLNRSPQSAKEGYILVLSFVVAQFIEGLSSRHLLFRSQQLGVRVRSALVAVIYQKGLSLSNQSRESSSSGEIINAVSLDAERVADFNWSIHELWLFPVQIILAMLILYSTLGLAAFAALAATVLTMLANLPIGRIQQNYQEKMMDAKDARMRAMSEMLRNMRILKLQGWEMVLSKIMELRKEEMHWLKKDVYTSVMLISVFFGAPAFVAMVTFGSCLLLGIPLETGKVLSALATFRQLQGPINSIPDTVSVIIQTKVSLDRICSFMHLEELSSDVVTKLLRGTTDVSIEVRNGQFSWNTPSEVPTLRNLNFRIRQGMRVAICGTVGSGKSSLLSCILGEIPRLSGDVQTCGRIAYVSQSPWIQSGTIEHNILFDTKLHRERYEKVLEACCLKKDMEILPLGDQTIIGERGINLSGGQKQRMQIARALYQDADIFLFDDPFSAVDAHTGLHLFKECLLGLLASKTVVYVTHHVEFLPSANAIMWKYAFQISKRMIIKEQKKGLFKMASSDQSTVDTRIFDLMGYVLFPAIELLGTIILMSRQYYIDGARELQRLTGVCRAPVMQHFAESVAGSNIIRCFGKEIQFINAVSHFMDNLSRPSLYNAASMEWLCFRLDILSSFIFAFALILLVTLPAALIDPKTAGLAVTYGLSLNMLQGWAIAVLCSLENRMISVERIFQYMAIPSEPPLTISKSRPNCRWPTNGEIELRNLHVRYATQLPFVLKGLTCTLPRGLRTGIVGRTGNGKSTLIQALFRIVDPCIGQVLIDGLDICTIGLHDLRTRLSIIPQDPVMFEGTLRNNIDPLEEYSDEQIWEALDSCHLGDEVRKSDLKLDSTVTENGSNWSAGQRQLVCLGRVVLKKRKILVLDEATSSVDPITDNLIQKTLKQQFSECTVITIAHRITSVLDSEKVILMDNGKIAEADSPAKLLEDNLSLFSKLVSEYTKGSEY

SEQ ID NO: 114076 - protein, 315 aa, Oryza sativa
  Clone ID: PAT_MRT4530_17802C.1.pep
MAATTTVRSTTAVAPEPTRMVGGQRATAVALELSRLGWEEVEDGSDDDGGVDNGGGSRALPLWIGGGLDSNSKVSESEMAAAAVRAAEELAEREMAGRDASHDAAHALRVRDLALSLAAELGLSSSPDRLLIVEIAALLHDIVDRDNAEDMSIVERFLEEVELEQGQREEIVAIIKGMGFKNEVSKKSVVEPTLEFAIVQDADRLDAIGAIGNMNKCSVFESFPKTPAGIARCFTYGGSKKNTLHDPKILPRDNLSKEKYMSKDEKQTSINHFHEKLFKLKDMMKTEAGKKRAEKRHKFMEDFVAEFYEEWSGRA

SEQ ID NO: 114077 - protein, 113 aa, Oryza sativa
  Clone ID: PAT_MRT4530_17803C.1.pep
MAPLPPPRPPHRSHRRVPAACCLFLLLLALVLLPSAAAKSSRRPITDNEIREKKKENCVLRCLSPECYDLIYGGDPLEEGELDYIRGHEYKYCMHKSSLGESLDGVKGSFSYS

SEQ ID NO: 114078 - protein, 79 aa, Oryza sativa
  Clone ID: PAT_MRT4530_17804C.1.pep
MALEALWEMGSSDCLGTCCHRWNAVDARYHAPLPGRKPTPGNHGEAPAAFRSVARKRTPSVDEVAKRSCVGTFHQARAR

SEQ ID NO: 114079 - protein, 258 aa, Oryza sativa
  unsure (1)..(258): unsure at all Xaa locations
  Clone ID: PAT_MRT4530_17805C.1.pep
MRIEEVSHVAGGVKTPRGSNAMHTPKQGIFATRRRHAQSSPPHQRHNHALFGSPSRCIGRSCTGVAVSVSSYVARRVRMQHPHFVAANSAYAPRSPAKQRRRVVVGRHLSSKAFFTSMHLSQREAEYRTGRRYVRPIATGPTTPQRRKDSKMTPSRGSRLQETPSSSVPKTGQGFHPELLTEGGGVPQQCPXPESIVTVGLKIGLSFRSEPPTAMVCRLIRNHQLNIGDTWLLPHPTDTRLHGTRNEQQCGKIFQKVA

SEQ ID NO: 114080 - protein, 545 aa, Oryza sativa
  unsure (1)..(545): unsure at all Xaa locations
  Clone ID: PAT_MRT4530_17806C.1.pep
MAAALIVPANPNPTPNPTSSLRPPSRAASSVLRFPRRDRARTHLTAAFGRGSPAAAAERGGKDYYATLNLRRDATLQEVKTAYRTLARKYHPDMNKDPGAEEKFKEISAAYEILSDEEKRSLYDRFGEAGLTGDYGGGDIGSNGIDPYELFNAFFGGPDKLFRDSMGAGRFHYGTKVTDNRGLDIRYDLLLSFEESIIGGKREVSIFRYETCGTCHGTGAKSSNDITECTQCRGQGRRATGDLYIFVHVNKKEGIHREGLDLFSDVTIDYTDAILGTTVKVETIEGFKDLYIPPGTQPGERLKFAQLGAPDIKNPTIRGDHNFVINVKIPKSIREEKIPLAIYQEFVQGRRWGYEICFNQRTICYSIMDSATRISSSCSVARRIPDDHSALIRDKQNSYNQVDSKAANPNDVKVCRAAQAAYRITCSGLGSRRDRMGSLSSLLPIQRGARAKCLSREEEAAAGXDLRRGPGKRTRSARGGCSHWRRAPTHGLWGWACKSSATEKENCVLRCLSPECYDLIYGGDPLEEGELDYIRGHEYKYCMHN

SEQ ID NO: 114081 - protein, 169 aa, Oryza sativa
  Clone ID: PAT_MRT4530_17807C.1.pep
MGKLKLFRSELVGVRNSILKSVSRVVRPHPWCAAFGISTGETDIMGTAKNPIGFRCNKCMKKDSSLHDQNQHMTNVPTDRSTCLKESSDNVHGATNSCLSHCSQTFQLMVALKLLISGGAAARKQSNAIHDWRSLHHHYIKEDKDDSEAHYLDWNPCNGARAYCARLQA

SEQ ID NO: 114082 - protein, 68 aa, Oryza sativa
  Clone ID: PAT_MRT4530_17808C.1.pep
LYTPLFPLQRASHLLFFGFFWGTCPIFGAGLGLGWLKTPDQGPFLEVSGFPPQDILVNCFRDLSYQGM

SEQ ID NO: 114083 - protein, 146 aa, Oryza sativa
  unsure (1)..(146): unsure at all Xaa locations
  Clone ID: PAT_MRT4530_17809C.1.pep
FFFFFFEXKILHMHFPLLFSYIKAEFSFXPGTIDLQHCAHSLHIPSSSRVKGTHQLQHQTHHSSAQPVRHAQQPCACHIXSLCTPQGSCIHPAATGASSQHASLKQQQPSLTPXSAXXVANTGHRHLPRQQSAHAFXTQPLMPALT

SEQ ID NO: 114084 - protein, 67 aa, Oryza sativa
  Clone ID: PAT_MRT4530_1780C.1.pep
MAGAGRRGRRAPPPRTTYGATREDATRPRALESFRASESQIGTPVECQSAASSAAAAATSIHVLVDC

SEQ ID NO: 114085 - protein, 904 aa, Oryza sativa
  Clone ID: PAT_MRT4530_17810C.1.pep
MKQYTLPIILFLTISISLLAISASGDHDQFIYTGFTGSNLTLDGAAKITATGLLGLTNDTFRIKGHASHPAPLCFRKSPNGTVQSFSVSFVFGILSSFGDIRGHGFAFFIAPSNDFSTAFPIQFLGLLNDINNGSSTNHLFAIELDTIRNDEFGDIDNNHVGIDINSLNSVRSSYVGFYNDNNGALTNVSLIGDKPMQVWVERKGELLLVYDYMANGSLDKYLHRQEGKPTLNWGQRFQIIKDIASGLLYLHEEWDKVVIHRDVKASNVLLDKQLNGRLGDFGLARLYDHGTDPQTTHVVGTIGYLAPELVHRGKATTLTDVFSFGIFILEVTCGQKPIKEDSQGRQLILVDWVLQNWHKGSLLDTMDIKIQALNLAITMSEDQFVYSGFSGRNLTLDGAATVTDDGVLELTNRTVHIKGHAFYPTPWQFRKTPNGTVQSFSINFVFGMIPVYSNEKCTDGMTFVISPTSDMSSAQDSQYLGLLNKTSDGKASNHIFAVELDSSQNTEFHDIDDNHVGIDINNLTSVQSRPAGFYSDNKSIFNNLSLCSYKPMQVWVDYNEDTTQIKVTMAPIEFFFLFISNLSALATGEDQFIYSGFNGANLTLDGVASVTPDGLLKLTNGTLRLQGHAFHPTPFSFKKKPNGTVNSFAVSYIFAIYCLRPVICGHGIAFVVSVSKNFSTAMASQYLGLINDHNNGDPTNHFFAIELDTNQNDEFNDVNNNHVGIDINSLTSLNSSSVGYYTDSNGFKNKNLLGIGGFGRVYKGLLPTSKLEIAVKRISHDSNQGMKEFVAEIVSIGHLQHRNLVQLHGYCRRKSELILVYDYMSNGSLDKHLYGQENNSTLTWAQRFQIIKDIASGLLYLHEEWEKNQGFDPETMTNQFLISNSTLSDLSEVRSHTWSPYDI

SEQ ID NO: 114086 - protein, 76 aa, Oryza sativa
  Clone ID: PAT_MRT4530_17811C.1.pep
MAAWQQHVSMSASSSLVTSVSNSRKGSPDRGGGLPEGVGDGDVGGGVHRGDGGAVVAGREIRAGRELAAAVEPERV

SEQ ID NO: 114087 - protein, 115 aa, Oryza sativa
  unsure (1)..(115): unsure at all Xaa locations
  Clone ID: PAT_MRT4530_17812C.1.pep
ECKRWTQRSSISRALPCPTCGPTRRRCWPLPRRPPARRPPQGPAVRRRATAPPTAARPPPGPPPRRXRPPTARWDDGEGRRGVRGEVREEEEEGMMGEGRRGVRGEEEEEEEDMG

SEQ ID NO: 114088 - protein, 263 aa, Oryza sativa
  Clone ID: PAT_MRT4530_17813C.1.pep
MEGLAGHGDLPTAAAGGGMLAVDLLGPAAGTVTEEGYFVFVQQLVVRITGGGAAAAAGISLPTSSSMQEEASAVVDVTIDGLASATTHGNAIVADDDAGDDGNSSIRPAFDVATGEHKVDRQALQETERRGELRAEAVRRLWAMRRIPPHPRSRPDAAHAIDRATSASRVAPVHRIVPRPNSVSRQVRPSAANPGIRQRHARWARDSTPVKPPSPSAVTPRDEERSRLDKRVAIATSAKLSRRMTSRRPSMHPLDKTMRTLSS

SEQ ID NO: 114089 - protein, 203 aa, Oryza sativa
  Clone ID: PAT_MRT4530_17814C.1.pep
MAMATQASAAKCHLLAAWAPAKPRSSTLSMPTSRAPTSLRAAAEDQPAAAATEEKKPAPAGFVPPQLDPNTPSPIFGGSTGGLLRKAQVEEFYVITWTSPKEQVFEMPTGGAAIMREGPNLLKLARKEQCLALGTRLRSKYKINYQFYRVFPNGEVQYLHPKDGVYPEKVNAGRQGVGQNFRSIGKNVSPIEVKFTGKNVFDI

SEQ ID NO: 114090 - protein, 309 aa, Oryza sativa
  Clone ID: PAT_MRT4530_17815C.1.pep
MEGLAGHGDLPTAAAGGGMLAVDLLGPAAGTVTEEGYFVFVQQLVVRITGGGAAAAAGISLPTSSSMQEEASAVVDVTIDGLASATTHGNAIVADDDAGDDGNCAVEALLHGVIIISLAGLATPRRRWIRRCCSSTAHNIMTPWFPFKQSSIRPAFDVATGEHKVDRQALQETERRGELRAEAVRRLWAMRRIPPHPRSRPDAAHAIDRATSASRVAPVHRIVPRPNSVSRQVRPSAANPGIRQRHARWARDSTPVKPPSPSAVTPRDEERSRLDKRVAIATSAKLSRRMTSRRPSMHPLDKTMRTLSS

SEQ ID NO: 114091 - protein, 44 aa, Oryza sativa
  Clone ID: PAT_MRT4530_17816C.1.pep
KGGPGPPAFLKGKGIPKALFNPLNRPLAQIRPGTRFSNLLLFLN

SEQ ID NO: 114092 - protein, 201 aa, Oryza sativa
  Clone ID: PAT_MRT4530_17817C.1.pep
PEDAQAGSEDDYVQRENGSSVAHASVDPANSLHGSNLSAPTVLQFGKTRKLSVERADPRNRQLLQKRQFFHSHRAQPMALEQVFSDRDSEDEVDDDIADFEDRRMLDDFVDVTKDEKLIMHMWNSFVRKQRVLADGHIPWACEAFSQFHGQELVQNPALLWCWRFFMVKLWNHSLLDARAMNACNTILEGYLNGSSDPKKN

SEQ ID NO: 114093 - protein, 991 aa, Oryza sativa
  unsure (1)..(991): unsure at all Xaa locations
  Clone ID: PAT_MRT4530_17818C.1.pep
MTQRDNQREQGKQDSFTRKGKGKRPRTPAAIPIHPIEVPPTAVPGGPREPGPHVIEVLRIKGRSNMKYSINFIIWDFKRLCEYQTGKRSNPCPRSLPPNAVMGLALTRDCRGSGLLKRCYALENCGQDWLLGRRGGGIPSANVVMDRPQDPFNSRGIAVPPAVKMRNMAGNNSPWIDPLPPPMNARNGLANASLFSTSLPVLPHEKINFLDSARGTPLMDDASAKLKELDDDPEGKDYKFDFDLRQIDDLLPNEDDLFAGITNEIEPAGQTNSMEELEEFDVFGSGGGMELDTDPVESITAGLGNTSIADGLRGNGVNQMMTCXSCQMLMKSQVDGQFTFRTMLRRHIMSSFHVKLWHYLYAQYGNIRTLYTATKHRGFVMISYFDIRAARGAMRGLQNKPLRRRKLDIHFSIPKENPSDKDLNQGTLVIFNLDPSVSNEEVRQIFGTYGESFXDNAYLKYTTFSRYHVLXGADAEDTFCCLNYCLIAGKXLXVQIPSPRVLRERKWVDLDDLHDSXDVEAISLPFSPPPRLVGCDGSISYDWXLSCMMAWDVKLWTTGTGISPKANTGPPNSHAVKIVPIGKDSNWSKYDKVFSNNNQPHGAAFQHSHSYQDHKSEHMSSSPGTLTGPEFLWGSPKPYSEHAQSPIWRPPAIGHAIPSNTRSQGQGLLYGGRQASLFGSQDQLHHHHVGSAPSGAPFESHFGFLPESPETSYMNQVRFGNIGNIGSGRNGTGLMLNMAARASVNPVSALSGNMSDNNSSSFRPILSPRLGQSFYGNPTYQGPGSFGLDNSIERGRNRRVDSSVFQADSKKQYQLDLEKIRKGDDTRTTLMIKNIPNKYTSKMLLAAIDEFHKGTYDFFYLPIDFKNKCNVGYAFINMISPVHIVSFYQAFNGKKWEKFNSEKVASLAYARIQGRTALISHFQNSSLMNEDKRCRPILFHSNGPDAGNQEPFPINGICIHMPLEDGAIATGDPFGNEEDNNQNERTAGEEL

SEQ ID NO: 114094 - protein, 792 aa, Oryza sativa
  Clone ID: PAT_MRT4530_17819C.1.pep
MADETLDLNEPPHENQGGGLNYVLLQKDSKNICRTKVCDIPVKVPSVWSIVRFVPTKVYQQCDFLKFSLLPEPEDDRQNIEWGKFMRFLWDNQRVAVVRFSSFALHIFPPQSHESHERPNFSHAVVMYEQKDPGDCKPMAGVSDALKRSYRSDFQSGSMNPKSYLREEICDSGPNPKEMNASRVTELHKSVPESSPCESVEDGPRILDPIVKKRTTTLAKNFVSTDPSYLRTLSQTHAGWVFGAIAELIDNSRDADASRLNISVKSLFSKKADKKIPVLSVIDDGHGMTCAEMMRMISFGHKRPDKQRQDQIGRFGIGFKTGAMKLGRDAIVLTQTSSSRSVAFLSQSFNENKDNLEIPVVTYRKEGQYMEVDSSVQSEATAEYNLNAIKEFSPFNEYFIGEKLGIFGEDGTGTQIYIWNLDRWGADYTLDWSSGKPSEDPVHHGRGDILIRSRRVRLRPGQTSNNVPLDYSLQSYLEVMFLNPRMKISVQGSSVKTRPLAKTLNKTSVISGEIMGRTIQLTLGRSNVEWDRMNCGIFLYWHGRLIESYKRVGGQKHNADMGRGVIGVADITDLIDDEDGNSWVLNSKQGFQDCEMYAKLEEWLGRKADEYWDTNFDTLELRKGRGSYKADHEWVQCYSCRKWRILNAGFDTKSLPDEWFCYMPPFNGKCEVAEQQMARGVIVIGEKRSEHDKRDRITQQEEVAKVNARETRSDDSQSQKFTQDEDVKDVKLISTVVNKKRKSSNGTRSMDKNNSEDKHDDAEGDSSQTQPGTPRPVLKRIRRGPARSCKQS

SEQ ID NO: 114095 - protein, 996 aa, Oryza sativa
  unsure (1)..(996): unsure at all Xaa locations
  Clone ID: PAT_MRT4530_1781C.1.pep
MSYYVDPRTSVLQYPLYPVYGYPPSTVAHQVGGLGTQGSTTMSSSFVDNSVNPGFNQGVSTSTMLAWTQVGEIVFPVYTTVLISTGPSMAGSENAVVITLDDSMSKDPPAEVENRTSTTSEPEKDPSAAKSCPSDENHEPTRTTSEATRSWCPIHKTRKHTLQACWVFLNVQAEIRACKERGIQRGTSTSACADAEAENQVATLAQHIRAINTILRETPYDPVLNDDLAQWSERLRELVANLSNVFEEAAARVPLEQPPTGGVNGELPEQRASPRQATPPPRGTSDLRDHLNGRRDVRRTRNNENRSRHHVSSRRRENEERGDPXNRDRDNCHNRHNHDDREQRMPGDTSRXRRHNDGDDGDRRRDNNSGRRXDSREPGRHPHNRTLEPXQQFVTNFQGTYKRHAIEDDLHALTQNPGESLRDYVRRFNECRNIIPEITDASVIRAFKTSVRDRYMTQERKNDKPKTGGEKKPAKDAPESSKKKSRKSGKRKAQTEVLAAEYADPPRHPDPQGNDTKKIWCPIHKLDRHSLEDCFVFKKLLAKQLALEKGKRVRVVEKAAEAATQDSDSAYPDSDLHVSHIFGGSTAYSSKREYKKVEREVCSTWQGAAPKMKWSEQKIEFSDEDHPKIAVIPGRYPIVVEPTIRNIKVARVLVDGGSSINLLFASTLDAMGIPRSELTPTDQPFHGITPESSSKPLGKITLPVTFGQANNFRTKQIIFDVAEFDTTYNAIIGRTALAKFMAASHYVYQVLKMPAVRHTGDPREVIEHKLMVRPDAKPVKQKLRRFAPDQKQAIREELDKLLKAGFIREVLHPEWLANPVMVWKANGKWRMCVDFTDLNKACPKDHFLLPRIDQLVDSTAGCELLSFLDAYSGYHRISMAKEDEEKTAFITPFGVFCYVKMPFGLITTGNTFQRTVQGALNDQLRNNVEAYADDIVVKTKTSDSLIDDLRXKRSTTSDDIASCSIQRRIKANPEKIKAIENMKSPTRLKEVQKLTG

SEQ ID NO: 114096 - protein, 191 aa, Oryza sativa
  Clone ID: PAT_MRT4530_17820C.1.pep
MSRWICGLRCFGVPGVASPISTPILLWRETHIHYPTYHDGHDQHDMFTGSNNLLVPRIVLRLCTHLRLMLRIAFHSKFDILTLQMIMYSLYLFVFSLHFSLSSIGDDEQPTTMEINYYYYKDYGLCTHLRLVLGIAFHIKFDILTLEMIMHFLYLFVFLLHFIQILISTYRYVQRRAGSLIHEKDEETKTV

SEQ ID NO: 114097 - protein, 50 aa, Oryza sativa
  Clone ID: PAT_MRT4530_17821C.1.pep
MFGFVGQGEERSAEGGIKKKLFDVWGIDFMGPFPKSYDCEYILVAVDDVS

SEQ ID NO: 114098 - protein, 221 aa, Oryza sativa
  Clone ID: PAT_MRT4530_17822C.1.pep
MRTHTRTGGRAHPAGSPVCDTHADAAQSVMLWEKLARDRAVPNGATRISPERNIKYRPRLRLICHRGAPTTGGRQRQQRLEAWPAGGDRPVRCPRHGEARRRGTAGGCVSQRGTNSGDGVGRGARRLGRRRQWLRLSRGVCHCDAAACATRGNMARPMMPCGGCPAGGTSAVVPTHPRRFRWRWSIVPTPSNLINKTGSSSSYHCKKIGKEKEETITPAAT

SEQ ID NO: 114099 - protein, 422 aa, Oryza sativa
  Clone ID: PAT_MRT4530_17823C.1.pep
DNTSCKNATVVHVDSANKYGILLEVVQVLTELQLIVKKAYISSDGGWFMDVFNVTDQNGQKIMDESVLDEIVKYIHKCLGADSCFLPSRRRSVGVEPSSDYTLIELTGTDRPGLLSEVSAVLTNLECNVVNAEVWTHNKRAAAVMQVMDRKTGLAISDTQRLARIKERLSYVFKGSNRSQDTKTTVTMGITHTERRLHQLMLEDRDYERYDKDRTNVNPTPVVSVVNWLDKDYSVVNIRCKDRPKLLFDTVCTLTDMQYVVFHGSVFVEGPEAYQEYYIRHIDGSPVNSEAERQRVIQCLEAAIERRVSEGLKLELSTGDRVGLLSDVTRIFRENGLTVTRAEVSTRGDKAVNTFYVRDAAGSSAVDLKTLEAIRQEIGQTVLQVKGHPDHRKSPPQESPSRFLFSSLFRPRSLYSLGLIRS

SEQ ID NO: 114100 - protein, 145 aa, Oryza sativa
  Clone ID: PAT_MRT4530_17824C.1.pep
MFIHRTKLLDAAAQLAVISDRRVFVYTCLMKPSSSSFVVDTISPLSQHRGVTPLLLAVRSRGLAHFFFHRDQPGSLLTPAKSAVMWLTPDVQQATHIAHLTQLRSVQSTTTEKLIGAGWEPALGAGFPNRHHGGDTDDFQSRCRF

SEQ ID NO: 114101 - protein, 39 aa, Oryza sativa
  Clone ID: PAT_MRT4530_17825C.1.pep
LGKEAACFGNEFWLSSWCHVRSGRGKMVVPSFTPWNPGL

SEQ ID NO: 114102 - protein, 199 aa, Oryza sativa
  Clone ID: PAT_MRT4530_17826C.1.pep
TSGSPGCRRHATATATAVSRRVPHPHPAPATAISTVLPAPKLASSLSYATQAAAAAAVPAARAPRTVGSLLRLNDLRDNPGARKQKTRKGRGIGSGKGKTAGRGHKGQKARGTARFGFEGGQTPLRRRLPRRGFKNRFSLTFQPCGLGKIAKLINAGKIDSSELITMKTLKDTGAIGKQIKDGIRLMGRGAEEIKWPIH

SEQ ID NO: 114103 - protein, 138 aa, Oryza sativa
  Clone ID: PAT_MRT4530_17827C.1.pep
MATVVSGGYKEELTGLRRATTWAVRPTGCDGPHFASTAENFRMVPSRRIPSRILRGADVAMPRRRDVKRENNAGCRLPPTVACGPAGRRPPPRCQPPARRRPPARHRRAWPRRPPAACPLPPATGWEGRRGRRGDDDV

SEQ ID NO: 114104 - protein, 116 aa, Oryza sativa
  Clone ID: PAT_MRT4530_17828C.1.pep
MELGNGSGRRTRKGGEGEGKLIGREDAAEIERRTEQRTRATVSLFLASSLAATRTDTATHLAELHDQIHFGCIISTITRTNAVAREDAHSRHRSSSAVCQLVLLLLDLRRYVRGAP

SEQ ID NO: 114105 - protein, 89 aa, Oryza sativa
  unsure (1)..(89): unsure at all Xaa locations
  Clone ID: PAT_MRT4530_17829C.1.pep
GIPMWAPVTLKNXAAGPTNRGPLMRTFMIARKKPLVARINPGPHECRVLRGILVQYPLIQIIIPRIKRNPPLYSYPVFIPFVDPWGLVS

SEQ ID NO: 114106 - protein, 523 aa, Oryza sativa
  Clone ID: PAT_MRT4530_1782C.1.pep
MADNEKGNKVRSQDIGTSSSRVNEAPDTSCVAVVQHLINQNKLLIEILQQHRMPILNPSQIQPQVQLEAVQALTPQVSAPPTSQKAPHAMPHVDPKEASIICFMCDEQGHYARNCPQQKRKAPMRTEDEVRKMIITSTEWPPPGMTKCQRRNSSRGAQQLTEHLLANGGRVSGSEDSDQVSSDDEDEKSPQGFNQNKIELKACSRCGEIGHVASSCATTCVHCEEDHPPDRSHVPAGMITLRKREFRYLKQEDLTVTEYLHEFHRLAHYAPEDVENDEDKQEKYLQGLKDEITVQLLLEEYEDFEKLVDKAIQLESEHNRMKNCKRRIVSIPVFPCGNQRQRTEPLQITGSSVAHQEFPPQEDGHNADNNISNTNDDDTTNNHASCPISDHSNQACNVNIIHQGVDDSINDGTQNDNPSNCDSEKDSNGDSNYGTTDANVSKDFQPPIPTPSQNDRPQTDSSAKKTLICYNCKGPGHYSRDCLQPRQSRSPHYRQFTRSRHPNRIVVTGANAVPVRPRVNQNP

SEQ ID NO: 114107 - protein, 77 aa, Oryza sativa
  Clone ID: PAT_MRT4530_17830C.1.pep
RSTCNNVVAQLVELRHDIRQQPAVQLLAGRGRCWSVGRNPASMASGARASPIMLDAVLQGRAVPRVAGAPAPPRHRL

SEQ ID NO: 114108 - protein, 84 aa, Oryza sativa
  Clone ID: PAT_MRT4530_17831C.1.pep
PLLCVFLVILRTGVFIPFPVCLFCIWSAPSLGVYRSGCSISSTIGFFLSSWLHIFFFWFFSFSPQDSCLFSWFLCLRVLSICSF

SEQ ID NO: 114109 - protein, 190 aa, Oryza sativa
  Clone ID: PAT_MRT4530_17832C.1.pep
MASAPTAAACFGLLVAMWAIGLVSYLDQFLGALMSSARALPPLDVAVEVVMAVAAIGSLNTAMASIYFRVYNGRAAAANRRMLDGACFAVWASASVLLHLIFFLQPGAMDGADQDLLPLAAAVVRALLPASAAVTFFASIILIYAYLRSGGAGAGTGTSVKLLTKVTNSAALVTIVLSLVVAAIVVFYSE

SEQ ID NO: 114110 - protein, 590 aa, Oryza sativa
  Clone ID: PAT_MRT4530_17833C.1.pep
MNADFGAPKDLAGGLQQRRSLYQPTLPPCLQGATVKVEYGDATTTIDPTCANVVAQAFPRTYGQPLVSFVAPPPDAVDKDRAPIRVGVVFSGRQSPGGHNVIWGLHDALKAYNPHSVLYGFVGGTEGLFANKTIEITDDVLASYKNQGGFDLLGRSIDQIRSTKQVNAAMTTCNNLNLDGLVIIGGVTSNSDAAQLAEALVQNNCKTKVVGVPVSLNGDLKNQFVETTVGFDTVCKVNSQLVSNVCLDAISAGKLILAEEVALSKLTLMEVINKICDGVQARAELGKFHGVLLIPEGLIESIPEMYALLQEINILHNNNVPVAEMPSQLSPWAAALFQFLPPFIRRELLLHQESDNSAQLSQIDTEQLLAHLVEAEMIKRTKEGRYKGRKFSSVCHFFGYQARGSVPSNFDCDYAYALGRISLHMIAAGLTGYMATVANLKDPVDKWRCAAAPLTAMMSVKRHLRGPGAIPIGKPAIHPSPIDLKGKAYELLREKASSFLLDDFYRTPGGIQYEGPGCNAKPITLTIENQDYMGDIEILKDCLSKVRTMVKPGCSREVLKAAISSMLSVTDVLTVMSHPLNAELPLYHFN

SEQ ID NO: 114111 - protein, 62 aa, Oryza sativa
  Clone ID: PAT_MRT4530_17834C.1.pep
ALIIFALFRPPPTNLPQLHCSTAIKTSAGVWVHCTGAPAGQSPHAATSPGSASTDITSRCAA

SEQ ID NO: 114112 - protein, 420 aa, Oryza sativa
  unsure (1)..(420): unsure at all Xaa locations
  Clone ID: PAT_MRT4530_17835C.1.pep
MNADFGAPKDLAGGLQQRRSLYQPTLPPCLQGATVKVEYGDATTTIDPTCANVVAQAFPRTYGQPLVSFVAPPPDAVDKDRAPIRVGXVFSGRQSPGGHNVIWGLHDALKAYNPHSVLYGFVGGTEGLFANKTIEITDDVLASYKNQGGXDLLGRSIDQIRSTKQVNAAMTTCNNLNLDGLVIIGGVTSNSDAAQLAEALVQNNCKTKVVGVPVSLNGDLKNQFVETTVGFDTVCKVNSQLVSNVCLDAISAGKYYYFVRLMGRKASHVAFECALQSHPNMLILAEEVALSKLTLMEVINKICDGVQARAELGKFHGVLLIPEGLIESIPEMYALLQEINILHNNNVPVAEMPSQLSPWAAALFQFLPPFIRRELLLHQESDNSAQLSQIDTEQLLAHLVEAEMIKRTKEGRYTGRKLSS

SEQ ID NO: 114113 - protein, 2462 aa, Oryza sativa
  Clone ID: PAT_MRT4530_17836C.1.pep
MDSTADVGGEDEHEIVQEDLYLDDDDEQFDVDLNEDNEMEEAEPKREQNLVKVGMEAWNQSFGATCKVRLIHILKNLHTAEIKIYSDASREFIELLDGDPEGEVLREYVQQSPRLVELAEAWRLHREKPGMAYILSLFATVLGHPGGKLRRHGLVKKSLDGVARMILEDKEKMGDVYLELNSGEFRRQNAALDLLAAIVRRGGGLASEIAKSFDFKMAVLPQLSGVRKKRGGRDGGNRKKGTDFGSTRRSFVGFAMSFLEVGNPRMLRWILQQRELYSGVLRGIGDDDTDTIVYILSTLRNNVLVDESLVPPGLRSVLFGSATLEQLSLISGNLDAGEAADIAHEVLIMVCTDPKNGLMPSSNLRGNQKRLLDLMKKLKATEVVHHKNLLLAIVSKSLSLCSAYMNEFPYSIEPRPSSSWFSAISLAADMISSVNCDGIFQNLLSTSHDLVSVDDEQVQVLLKCIVPNMCTRAVINRGLLHSDDLVKHGALRLVFESVNLLCDVIEVINDIVSNARVKSEHDNSTKVTVKIDGFPGLSCSTSADASIVHEVLHGDKMHVDRWITLREYIQDVVRGAIPDPQVLLKLLSSASQKHQNYSQSKQKKHAQLEPPRKKRRRGATDEDADIIIGGIDVELSRDEPEEQEMDLANDHTTILCEIWGLNKQDPKIKDAKVVGDVFHSKLLDVLRFYLRVMPSSFDGSFDFFKVMPPNPLDLSMDEQQSLLSLLVEYSGQSDGYWCPEKVPESMYKYLQPLIDIMLHSQVKSIRDKAYILVKAAVASSGAFDQNIAEIDAWLAFLPCYKAKGFEREGLGVEASNRLSHIVIPFLCDAISVVGNNLYKYQEHIRKLISKFNQFEGYSPSFSPLIVCVLQKCLRLLDSESASVKLHEKSTISLYVCNTVYLIMQSQVDVLLLPDLVGTILNERLGKFSSEEINSRICFAEWRPLMYLLHILRSISDQKSSSLFSTLEHSSEVYGNSLCSVTRTIEEMSNQQPTNLPDDVATSFLYSVICAPPDDVISSFPKLLHVLKTHFPSNLPFLSSVLFLQHDYLAKVASYCPDMFFSSLRQIKGNLDVDSVNIVEDKWGKHSTCSESAVISTFLNVTPFCALLPSVLSLAFSAPDEITKAHPLLQDELVHLLQAKISESPLSELTIFLRVVLFWSHHLLSSYTVKCSDILAQLCGVCFSLIDSIFERIRVLTADTANSKSSVAFYPVECLNGIVESVVQHPIIGLSLSCSLSNFQDLADGSVEYVKEDFASFSKEKLHLADSFVLNLLSNLYGLVLLAGSFGANYSNNDDQSLESLFGPPKLLLERILLLFKEKFELCMEKRNFGLFLPNFYMFRTLAKFVSPVRLLELANWMFSTFEGFSSSSPAYAPAAFCCLYTADIAFEMLYDYLQQIDQRSGPCRLWGLEIHNCDIATIQQVYNIILHFATKLNLEFADLCLLKMLIRIHHTEISAVRNTDYIALHMMLSTMVANTPIDILHHCMFPTSKVKAKAIQLLLGANPMHMRLFGKLLTDILKKDTSVMQVVGSDSNASWTHEDSFILLLPAALSYIEHHSGGNRQGSLNNEIAPEKESKRVNNAKLKFISILVRTLDKIFRNFPHRDGILLSSPEELNVVTCLEYAILKNIVELSSEVQSHLNQLKPIPFLNQLIRSSLLHRFSDPVVIKAIRCIIVVLSEGKFPADEILELILGHSHFVSTITCSGVSECPSACNPTGGLLQPAPSILKSVDSAFAKENKFQDCIPERKKVEIIRLLRVLYDIKSRQHNSSLLDESRELGFLLLSVYGATLSETDLEILHLMNEIESSECKAITDVDHLWGKAAVKFREELKLEFSASDTHKMENAEISDRRRSLFRENIPIDSKLCVMTVLQFCYRRSSRASIFSLEQLQQDNFGDIFKATSQSMDAVRIYDPVFILHFSIHTLLMGYIEPVEFSRLGLLAITLVSISSPDEDLRKLGYESLGTFKKSLEASQKSKETWQLQLLLTYLQNGISEQWQRIPSVIAIFAAEASLTLLDSSHTQFATISKFLMHSASVNLQLLYAGSNLADDAKIYKRGGVLELALSYGSSAVSDSETKLLTLQVLKKCVKLPVLAHHLTKDSGLLLWISSVISSHVEGLDSVKNSYSSTVIGSALEVVNDLTSSRLIAEWLQETALEQLSRISKYLYVLVEDMKLLKGNVPLLTSVLNVIASTMRLSMKRKIYQPHFSLSLHGIHKLCRTIGGISRSIEVKLAMQLGIDVILMNGPLPVLSEMDKSMTATVVSWATSNIFWLCDEQRSVLKMPHEEPLKNECLLSKMLRWLVASIILGKISCISHEKCGDLTRDANNFGSLESFLNYTYDEKVETVGSHSADEALAIIILYLQKHLKMNRDFLPSVVAALCLLLLDRSNKQGSNHVYSPRHYYQPWKDPAMHRNEAEHLEEEQACQSLLVMFSNSFSAGLSGFPVLSLGDVEKSGLFQWERHSILK

SEQ ID NO: 114114 - protein, 136 aa, Oryza sativa
  Clone ID: PAT_MRT4530_17837C.1.pep
MAITKVAPLLALSLLLFAVAAVHGCEPYCGHGGPVIPTPPVVVPTPPSYHRHGRCPIDALKLRVCTNVLNGLVGVKIGAGPDDCCPLLSGLADLDAAVCLCTAVKANVLGMKLNLAVDLSLILNKCGKICPSDFTC

SEQ ID NO: 114115 - protein, 2593 aa, Oryza sativa
  Clone ID: PAT_MRT4530_17838C.1.pep
MDSTADVGGEDEHEIVQEDLYLDDDDEQFDVDLNEDNEMEEAEPKREQNLVKVGMEAWNQSFGATCKVRLIHILKNLHTAEIKIYSDASREFIELLDGDPEGEVLREYVQQSPRLVELAEAWRLHREKPGMAYILSLFATVLGHPGGKLRRHGLVKKSLDGVARMILEDKEKMGDVYLELNSGEFRRQNAALDLLAAIVRRGGGLASEIAKSFDFKMAVLPQLSGVRKKRGGRDGGNRKKGTDFGSTRRSFVGFAMSFLEVGNPRMLRWILQQRELYSGVLRGIGDDDTDTIVYILSTLRNNVLVDESLVPPGLRSVLFGSATLEQLSLISGNLDAGEAADIAHEVLIMVCTDPKNGLMPSSNLRGNQKRLLDLMKKLKATEVVHHKNLLLAIVSKSLSLCSAYMNEFPYSIEPRPSSSWFSAISLAADMISSVNCDGIFQNLLSTSHDLVSVDDEQVQVLLKCIVPNMCTRAVINRGLLHSDDLVKHGALRLVFESVNLLCDVIEVINDIVSNARVKSEHDNSTKVTVKIDGFPGLSCSTSADASIVHEVLHGDKMHVDRWITLREYIQDVVRGAIPDPQVLLKLLSSASQKHQNYSQSKQKKHAQLEPPRKKRRRGATDEDADIIIGGIDVELSRDEPEEQEMDLANDHTTILCEIWGLNKQDPKIKDAKVVGDVFHSKLLDVLRFYLRVMPSSFDGSFDFFKVMPPNPLDLSMDEQQSLLSLLVEYSGQSDGYWCPEKVPESMYKYLQPLIDIMLHSQVKSIRDKAYILVKAAVASSGAFDQNIAEIDAWLAFLPCYKAKGFEREGLGVEASNRLSHIVIPFLCDAISVVGNNLYKYQEHIRKLISKFNQFEGYSPSFSPLIVCVLQKCLRLLDSESASVKLHEKSTISLYVCNTVYLIMQSQVDVLLLPDLVGTILNERLGKFSSEEINSRICFAEWRPLMYLLHILRSISDQKSSSLFSTLEHSSEVYGNSLCSVTRTIEEMSNQQPTNLPDDVATSFLYSVICAPPDDVISSFPKLLHVLKTHFPSNLPFLSSVLFLQHDYLAKVASYCPDMFFSSLRQIKGNLDVDSVNIVEDKWGKHSTCSESAVISTFLNVTPFCALLPSVLSLAFSAPDEITKAHPLLQDELVHLLQAKISESPLSELTIFLRVVLFWSHHLLSSYTVKCSDILAQLCGVCFSLIDSIFERIRVLTADTANSKSSVAFYPVECLNGIVESVVQHPIIGLSLSCSLSNFQDLADGSVEYVKEDFASFSKEKLHLADSFVLNLLSNLYGLVLLAGSFGANYSNNDDQSLESLFGPPKLLLERILLLFKEKFELCMEKRNFGLFLPNFYMFRTLAKFVSPVRLLELANWMFSTFEGFSSSSPAYAPAAFCCLYTADIAFEMLYDYLQQIDQRSGPCRLWGLEIHNCDIATIQQVYNIILHFATKLNLEFADLCLLKMLIRIHHTEISAVRNTDYIALHMMLSTMVANTPIDILHHCMFPTSKVKAKAIQLLLGANPMHMRLFGKLLTDILKKDTSVMQVVGSDSNASWTHEDSFILLLPAALSYIEHHSGGNRQCVDFLEPVPVFYREILLSDNGFPCWKSFVTRSIFEEDFSDFRHTSVEDIMNYFGDTLLGKSITMLCYYFYSKEIPRKQRLKIIASICPQSSELLDSDISFVTPVSCNGIMKLTNELFAKISLIRMLLSPPRGSLNNEIAPEKESKRVNNAKLSFISILVRTLDKIFRNFPHSDGILLSSPEEQNVVSCLEYAILKNIVELSSEVQSHLNQLKPIPFLNQLIRSSLLHRFSDPVVIKAIRCIIVVLSEGKFPADEILELILGHSHFVSTITCSGVSECPSACNPTGGLLQPAPSILKSGDSAFAKENKFQDCIPERKKVEIIRLLRVLYDIKSRQHNSSLLDESRELGFLLLSVYGATLSETDLEILHLMNEIESSECKAITDVDHLWGKAAVKFREELKLEFSASVSHNLENAEISDRRRSLFRENIPIDSKLCVMTVLQFCYRRSSRASIFSLEQLQQDNFGDIFKATSQSMDAVRIYDPVFILHFSIHTLLMGYIEPVEFSRLGLLAITLVSISSPDEDLRKLGYESLGTFKKSLEASQKSKETWQLQLLLTYLQNGISEQWQRIPSVIAIFAAEASLTLLDSSHTQFATISKFLMHSASVNLQLLYAGSNLADDAKIYKRGGVLELALSYGSSAVSDSETKLLTLQVLKKCVKLPVLAHHLTKDSGLLLWLSSVISSHVEGLDSVKNSYSSTVIGSALEVVNDLTSSRLIAEWLQETALEQLSRISKYLYVLVEDMKLLKGNVPLLTSVLNVIASTMRLSMKRKIYQPHFSLSLHGIHKLCRTIGGISRSIEVKLAMQLGIDVILMNGPLPVLSEMDKSMTATVVSWATSNIFWLCDEQRSVLKMPHEEPLKNECLLSKMLRWLVASIILGKISCISHEKCGDLTRDANNFGSLESFLNYTYDEKVETVGSHSADEALAIIILYLQKHLKMNRDFLPSVVAALCLLLLDRSNKQGSNHVYSPRHYYQPWKDPAMHRNEAEHLEEEQACQSLLVMFSNSFSAGLSGFPVLSLGDVEKSGLFQWERHSILK

SEQ ID NO: 114116 - protein, 123 aa, Oryza sativa
  Clone ID: PAT_MRT4530_17839C.1.pep
MASKSRLLAIFLAVNLVALHAGVARGQQSPPSSTRGNPCPTSALADLKVCADVLVLLKLKINVPASQQCCPLLGSLVNLDAAACLCAAIRLSVLGIPVNLPLDVPLVLNYCGRNASAAGANCS

SEQ ID NO: 114117 - protein, 692 aa, Oryza sativa
  Clone ID: PAT_MRT4530_1783C.1.pep
MPRYKPEYLFGVEGFVQELRTMSFVIGFGTAPFYAQIPHDRHEEKCRVKVTLNSNSEDIPSVMFEAGGRNYIHACQEVARIAIGELRDRYSDQLADTEYRYHPRQPQGSDRGSYLETEGIENDATTKHLVEMLWAMDESRAETVLAAQDREDRNRGKICKLEDKVDRLEKELAALKGEAPPQKARIRLTARKRALFVPRYQLAPKVRVVEKEVAPAQADPPVIIISSDEEEESKRNNSKIEWVATQDDEDEPSIDLRCLEELDTTNPVEASDWLHAIEKKLDLLQCTDQEKVSFASHQLHGPASEWWDHFRLNRTTAEPITWLEFTAAFRKTHIPSGVVSLKKKEFRSLTQGSRSVTEYLHEFNRLARYAPEDVRNDEERQEKFLGGLNDELSYPLMVGDYPDFQKLVDKAIRQEDKYNRMEQKKRRIAQFKTQQGNNQKPRLTLGPQSMPQGGSSSVVRPQRQFFNNNAGNNIRNQAPRPVAAPAQQQPAKREQGNKPVVCFNCGDPGHYADKCPKPRRVKVVPAQNNSAVPASKARVNHVAAAEAQDAPDVILAVAVAREDHRRARQVVAVLVRPFAVAGDHRSSFAVVDPKVPAASSSSPSPSVGLPPPFRSPVSSPCCPLRLGALRLRPGAAVRRRACAARAVSSAEPPPLSVTSPLTSSGSSAVNRRGLDRSRPSILDRLDLGRPFA

SEQ ID NO: 114118 - protein, 171 aa, Oryza sativa
  Clone ID: PAT_MRT4530_17840C.1.pep
MVKYSREANNPTKSSKAMGRDLRVHFKNTRETAFAIRKLPLGKAKRYLEDVIAHKQAIPFRRYCGGVGRTAQAKSRHSNGQGRWPAKSARFILDLLKNAESNAEVKGLDVDTLYVSHIQVNQAQKQRRRTYRAHGRINPYMSSPCHIELILSEKEEPVKKEPESQIAARKA

SEQ ID NO: 114119 - protein, 48 aa, Oryza sativa
  Clone ID: PAT_MRT4530_17841C.1.pep
HSHFIICSLYTTFRVFLVEMLRTIQNGLNSIQLETTFTSGIGSLALIN

SEQ ID NO: 114120 - protein, 128 aa, Oryza sativa
  unsure (1)..(128): unsure at all Xaa locations
  Clone ID: PAT_MRT4530_17842C.1.pep
VLAWXLPRRSLMPVCPLVVLYSGXARISGIXIWGIKLWIKKGNCDANARAAAXTRRRCAAQSLQRKRAASFRRFAPLPSXPXRXXLPLWWVVLVFLFLDRELAATGKXKDGXRWXXMGGRALGHRRRR

SEQ ID NO: 114121 - protein, 74 aa, Oryza sativa
  Clone ID: PAT_MRT4530_17843C.1.pep
MASRSTYLDTRMMAHKPKAPIANPLMVTTPSKRKTSIMPLISEDKHGKMVTVIDDKFGDVEERKGRKEKHRCYA

SEQ ID NO: 114122 - protein, 137 aa, Oryza sativa
  Clone ID: PAT_MRT4530_17844C.1.pep
MEKKVGDGNYTLFWEDVWYGQTPLRVQYPGLYGVSLQCGKTVRQVWDRGKWDLSFRRHLCGGSLLELQDLQNKLRAVDITSDCDRIIWPAGRKGEYNARSMYRLLSFGGVIDAEMQDVWQSGVKGRCSDAKMERVAK

SEQ ID NO: 114123 - protein, 371 aa, Oryza sativa
  Clone ID: PAT_MRT4530_17845C.1.pep
MAKETEFYDVLGVCPAASDDEIRKAYYIKARQVHPDKNPNDPQAAEKFQALGEAYQVLSDPLQRKAYDGYGKTSISKENMLDGTVVFTLLFGSELFEDYIGHLAMATMASSEMASDNDNPEKLQDRLKGVQREREEKLARFLKEFLSQYVRGDQEGFASRAESEAKRLSSTSSGLDILRTIGYVYSRQAAKELGKKAMYLGVPFLAEWVRNKGHLWRSQITAAKEDKKNNAGALQLLQLQEEACRQSGKDGLATERDVDLQMRMNKDLMMSSLWKLNIVDIEVTLLHVCEMVLHENNVKKEDLKARAMALKILGKIFQRDKEALPGPSKPTILDDDSSSDESSDDDVARTVPYRTPAVTQAITKLSSFYVA

SEQ ID NO: 114124 - protein, 97 aa, Oryza sativa
  Clone ID: PAT_MRT4530_17846C.1.pep
VRSRDDWHAIELSFQRDAFSRCLKNAAMIVILLYVKFFSLEAVLFNGGKNRKKNSEMYLVALQMSVLYLFGGGNVLSALVFMQFPKARTPLSYHVSF

SEQ ID NO: 114125 - protein, 65 aa, Oryza sativa
  Clone ID: PAT_MRT4530_17847C.1.pep
TKSEQNTVTIFSLQSSTHRILKSNKNCRGEHGDEPDATDVAVSRAALTLGDVGRWGTLAISGYPR

SEQ ID NO: 114126 - protein, 289 aa, Oryza sativa
  unsure (1)..(289): unsure at all Xaa locations
  Clone ID: PAT_MRT4530_17848C.1.pep
LFLKRKRDLLLQRXGLTVDWMHGGGSRDRTAEIXLSTTDGRDRXIHRGSRMDDDDDVTTGGDRTAHACRRTTARQRERKAPTGCGRHGELTGDQRKSGGNLRLDDGDSAPAVDSDGEGADENGDETATTTVTSXRATTTTGATAAHDWSDGGDGDAKAHGARALPATKSEGEGGDVGXKAVAKAHGGRRREGKXRVREERXDPNQAQIRHFPSDFNRXFQKRKDRGDREDHFPSIDFIGNGKDRRAPPVSGRTRARGRLTGPTGPRERESGLGRLSAQNQKGGFKSFSN

SEQ ID NO: 114127 - protein, 51 aa, Oryza sativa
  Clone ID: PAT_MRT4530_17849C.1.pep
YVWLSFICIYLQIHTHYLVISFLFFQLVNLCKTLATTYYFLITPCLYIRQN

SEQ ID NO: 114128 - protein, 98 aa, Oryza sativa
  unsure (1)..(98): unsure at all Xaa locations
  Clone ID: PAT_MRT4530_1784C.1.pep
MEIQYVLNSGRDPNRSPMGLGDGSYIFVRDVTGGGIASLWEYGEENARGGEGRAGAINYFLYIDAXYIARVPSPSXRFLALRSASCGNCFVWLVKGPC

SEQ ID NO: 114129 - protein, 297 aa, Oryza sativa
  Clone ID: PAT_MRT4530_17850C.1.pep
MPPSIFAGAEMVLSLSPLPAETRIGPPWKPTLLPPRRRLICPVQAAEAQTSTPRCAAIDANTAPLPHHANVALQPTTDGTARSRRCEAPCCLPPLEPYQTLLGPSTMGMTRRRTTPHRCAIPVLTTSTPLVLKDADLLPIDSGGYPKSSLSRTAPHRCAVPMLAISTPLVLDDADLLPTTAVVTPNPLARCYRRRLASSPRTLGRSSASARGDDAPPFHLPRRPPLPPLLVCEAVPSVVDGGAVPASMGDHGQLANALLGKSTLSNALQGKEASKEGETLILAVLDIWRKRVKTSRG

SEQ ID NO: 114130 - protein, 1119 aa, Oryza sativa
  unsure (1)..(1119): unsure at all Xaa locations
  Clone ID: PAT_MRT4530_17851C.1.pep
VLLAGAALTCQRPGCVISANLSGEVRLGRGVRVIAGRVSLAAANVTIADTVVVNTTALAGDPPERTSGVPTGTHGDGGGHGGRGASCYVKDGQTQEDSWGGDAYAWSDLEHPFSYGSKGGSTSVEKDYGGSGGGIVWLYADDLIMNGTVLADGGDSSEKGGGGSGGSIYIKSKTMIYFVFIPVFHXLLMSHGCGEGGRVRAVQMRSSGCLDNAGAAGTLYEAVPKSLAVSNNNLSTQTDTLLLEPPXHPLWTNVFVKNHAKVALPLRWSRVQAQGQISLLSRATLTFGLTHYPYSEFELLAEELLMSDSTIKVFGALRMSVKMLLMWNSRMLIDGGRESGVATSLLEGSNLIVLKESSVIHSIGNLGIHGQGILNLSGDGDTIQAQRLILSLFYNIVSLLQCCNNHFKNLSYGCRGGIGRGRMLSSGLSGGGGHGGKGGDAFYSGSHAGGGTAYGSADLPCELGSGSGNVSTSSSTAGGGIIVMGSLEQSLPLLSLAGSIEANGGSFAGAVTHAANEGPGGGSGGTILLFVRALSLEEGSVLSSAGGVGSNGSGGGGGGRIHFHWSDIPTGDDYIPFATVNGSILARGGTVDGQGFPGENGTVTGKDCPKGLYGTFCKACPLGTYKNITGSLKSLCSPCPTNELPHRAVYISIRGGVLKPRAHTNVLETNRAEESHCHVHRMYFMGPNTFSEPWHLPHTPPEQISEIVYEDAFNKFVDEINALAAYQWWEGSIYSILCILSYPLAWSWQQWRRRRKLQRLREFVRSEYDHSCLRSCRSRALYEGLKVAATPDLMLGYLDFFLGGDEKRPDLPPRLHQRLPMSLIFGGDGSYMAPFSLHSDSVVTSLISQGVPSSIWHRLVAGLNAQLRLARRGNLKATFLPVLKWLETHANPALNTYRVRVDLAWFQATALGYYQFGLVIHSVGPFSSGLQGGSRMKFDYHAQFQNTDVDSQLDHSRNNDAVMLKRITGRVLDIDNLRTLKDKRDLFYPLSLILHNTKPVGHQVTSILHSYPDIIATPSLVMMDLHNLELTKLYSYSMIDVLLVLFVLPLGILAPFPAGINALFSHGPRRSAGLARVYALWNITSLVNVIVAFACGLVHYKSSAKRHPSMQPWNLGGCC

SEQ ID NO: 114131 - protein, 109 aa, Oryza sativa
  Clone ID: PAT_MRT4530_17852C.1.pep
MLPSEVEFESLRFLNFKEERYGEDRIDGLNRLEEAHEAGPFIISEVTRPGSYRLKREDATVLSTIHCVPKDSFPPLVVMVFWGLPLPASREVDQPWMYTLPVLRDLPNT

SEQ ID NO: 114132 - protein, 367 aa, Oryza sativa
  Clone ID: PAT_MRT4530_17853C.1.pep
MALDGPAERRDDAQAAMGNGNGVAPPPLRPAVRPSGAPACADRRLRFNPNMEHKPQDYSDVRGEYAPAVYSALERHLPPSVLDANREIKLQLMREVLGHYWPHGERNKVQRHREYRQRILNHYKPLHKELYKMRPSSFFLPTFLEAIFAMLQPNFCEMLLQEVENFEKWVHTMKFKIMRPNTMNKYGAVLDDFGLEVMLNQFMEQFIAPMSTVLYPEVGGGTLDTHHAFVVEYGKDRDVELGFHVDDSEVTLNVCLGKQFSGGELYFRGIRCENHVNSETQHEEMFDYSHVPGRAVLHRGRHRHGARPTSSGLRINLLLWCRREMKKYQKDFSGWCGECKREKKERQIHAVKATKLAFLRGAGGATI

SEQ ID NO: 114133 - protein, 1393 aa, Oryza sativa
  unsure (1)..(1393): unsure at all Xaa locations
  Clone ID: PAT_MRT4530_17854C.1.pep
MATHIPLARLRLRLRLPHLALALLAVASGNPSLGGFDRGDAEAEAYSILTFHDYTPPPPPSLPPPPPAPSATCAGDLRGVGDLDTRCVVPASVRLRGPGVYISGNGTLVLVDGVALTCERPGCVVSANLSGGIFFGREARVVAGWVSLSATNITLSSDAVIDTTALAGDPPDKTSGVPTGSYGDGGGHGGRGASCYVKEGQAQEDSWGGDMYAWAELKTPNSYGSKGGSTSVEKDYGGGGGGVVWLFAKDIMMNGTILANGGDGGTKGGGGSGGSIYLKAKTMQGGGTISACGGDGLAGGGGGRVSVDVFSRHDDSQFFVHGGRSSGCLDNAGAAGTLYEEVPKSITVSNNNLSTQTDTVFLEPPYDPLWTNVFIKNHAKVSLPLRWSRIQAQGQISLLSRATLTFGLTHYPYSEFELLAEELLMSDSTIKVFGALRMSVKMLLMWNSRMLIDGGRESGVATSLLEGSNLIVLKESSVIHSIGNLGIHGQGILNLSGDGDTIQAQRLILSLFYNIVICRVEDIVVSGLVQGTVINFNRARNVTVRSSGTISATGLGCRGGIGRGRMLSSGLSGGGGHGGKGGDAFYSGSHAGGGTAYGSADLPCELGSGSGNVSTSSSTAGGGIIVMGSLEQSLPLLSLAGSIEANGGSFAGAVTHAANEGPGGGSGGTILLFVRALSLEEGSVLSSAGGVGSNGSGGGGGGRIHFHWSDIPTGDDYIPFATVNGSILARGGTVDGQGFPGENGTVTGKDCPKGLYGTFCKACPLGTYKNITGSLKSLCSPCPTNELPHRAVYISIRGGVTETPCPYKCVSDRYRMPHCFTALEELIYTFGGPWLFGLFLSGLLFLLALVLSIARMKFVGTDELPGPAPTQHSSQIDHSFPFLESLNEVLETNRAEESHCHVHRMYFMGPNTFSEPWHLPHTPPEQISEIVYEDAFNKFVDEINALAAYQWWEGSIYSILCILSYPLAWSWQQWRRRRKLQRLREFVRSEYDHSCLRSCRSRALYEGLKVAATPDLMLGYLDFFLGGDEKRPDLPPRLHQRLPMSLIFGGDGSYMAPFSLHSDSVVTSLISQGVPSSIWHRLVAGLNAQLRLARRGNLKATFLPVLKWLETHANPALNTYRVRVDLAWFQATALGYYQFGLVIHSVGPFSSGLQGGSRMKFDYHAQFQNTDVDSQLDHSRNNDAVMLKRITGRVLDIDNLRTLKDKRDLFYPLSLILHNTKPVGHQDLVGLVISILLLADFSLVLLTFLQLYSYSMIDVLLVLFVLPLGILAPFPAGINALFSHGPRRSAGLARVYALWNITSLVNVIVAFACGLVHYKSSAKRHPSMQPWNLGGCXLDDTSWWLFPTGLVLCKCIQARLVDWHVSILEIQDRAVYSNDPTIXLAVMAFVSLN

SEQ ID NO: 114134 - protein, 213 aa, Oryza sativa
  Clone ID: PAT_MRT4530_17855C.1.pep
MALDGPAERRDEAQAAMGNGNGVAPPPLRPAGGASGAPACADRRLRLNPNMEHKPQDYSDVRGEYAPAVYSALERHLPPSVLDANREIKLQLMREVLGHYWPHGERNKVQRHREYRQRILNHYKPLHKELYKMRPSSFFLPTFLEAIRTNTEESFRSIMTEPVPGVYSFAMLQPNFCEMLLQEVENFEKWVHTMKFKIMRPNTWNKYGAVLDD

SEQ ID NO: 114135 - protein, 48 aa, Oryza sativa
  Clone ID: PAT_MRT4530_17856C.1.pep
VFREMKKISERPFRAWCGECKREKKERQIHAVKATKLAFLRGAEGATI

SEQ ID NO: 114136 - protein, 219 aa, Oryza sativa
  Clone ID: PAT_MRT4530_17857C.1.pep
MSSKVLLISGVLVGLLSLSSCRSLGELSEQKTYSSTTQYGGSPTPSYGSDGGYKPTPTPTPAYGSTPTPSYGTTPTPSYGTTPTPSYGTTPSTPSTPDVPEVPTKHDFCGSCDYWKNHPDVIISAIGSLGDIGKTLGTACSLITGKKLENLHDALSNTGTDGTGALLREGAAAYLNSIVNKKFPFTTQQVKDCIVVAMTSDGAASSQAEIFKKANDYHY

SEQ ID NO: 114137 - protein, 103 aa, Oryza sativa
  unsure (1)..(103): unsure at all Xaa locations
  Clone ID: PAT_MRT4530_17858C.1.pep
LILNYFHALRRMSGDVAVHVYYGNAPIQICYNGVDLTVYTFFXFSLNAPEQLVINDVLGXLYNMLGVDPVLKNFIIKVVXSVRGECGWQXRASTGSWRKFMTR

SEQ ID NO: 114138 - protein, 527 aa, Oryza sativa
  Clone ID: PAT_MRT4530_17859C.1.pep
MAGGKKLRPLARGMGMPVLGHPRRRARPATVAPEATRASPRRRAGSGQRELKTWVSDRLAVQLVGGDEEGAGVAAGAGAAVAVRGGGGRDGGGVRRACRPRGRPRPRHAVCGGRRRGVRSTKRKEMGELLALDVASPRSLAVAATKARKVEAEFPATPMTEHLVDMEKQVWASFYSAGFWRSPSQREDRRSPWWWLGSAIVELAGEGERHGRDAAGEGERRRRDSAGEGERRRWDSAGKGERRYRDSASVGERRQAYVRRTMAIRKQLVQVQPKKIEMWQWQPPPLHPGVVTMAKHKLQLEDLSQTCRRDHYCVRCVHAFCSHCCDDHHFVPLGSHIVIPIAGVDAATGKPVIPAHYPRRPDLPITDFVIGLINANDFAEEHPRDAYCMYCFMAFSTALCHHHHTCAADCVLRIVRSHDGRHCVRCTGDEPWFPYMESVLGDPVAVEEEEGDDGEVVAVLLLLPVLRRSSPTACVHCGGEVPKHMRRSVLCSPACDAAHQLEVAQRRERRDAVLAARRLAKLNIHAV

SEQ ID NO: 114139 - protein, 250 aa, Oryza sativa
  Clone ID: PAT_MRT4530_1785C.1.pep
SNGQVERANGIVLQGIKTRVYDRLMSNDKKWVEELPSVLWAVRTTPTTSNKETPFFLVYQQALRRYHEKRIQARTLSIGDYVLRRVQSQAGRNKLSPKWEGPYTITQVLRPGAFKIADGDGHELANSWNIDQVKGPRALSSEKNSPMTRLGARERHGDYQEGQHQSIDWKTISASGAIDFARPSISVGVLRERENPSRRNSRLPALLDILDINISTKDNKVLEIKMPNKAKAMTAHTRAVGTNKSFTRHD

SEQ ID NO: 114140 - protein, 65 aa, Oryza sativa
  Clone ID: PAT_MRT4530_17860C.1.pep
SYTNMCLVFFLGKDKCNVTKLKTWVSILRENEFSKSNTLTNKPEPTNNQTEKQQNPSIRKNYSTY

SEQ ID NO: 114141 - protein, 70 aa, Oryza sativa
  Clone ID: PAT_MRT4530_17861C.1.pep
MRWDEEGSGRRRRRKKGQSPGPTIPGRSDRLYAAGQTAGLPPVRPCPSGRSDRCYQAGQTAHIAPVRPRI

SEQ ID NO: 114142 - protein, 112 aa, Oryza sativa
  unsure (1)..(112): unsure at all Xaa locations
  Clone ID: PAT_MRT4530_17862C.1.pep
PTRPGSGAKSYVDWAAKMAVATXAGVPWFMCKQDDAPDPVINTCNGFYCDDFTPNSKNKPSMWTEXWSGWFTVFGGXLPQRPVEVXAFRVGRFIQKGGSXSXXNVHXGNTFT

SEQ ID NO: 114143 - protein, 56 aa, Oryza sativa
  unsure (1)..(56): unsure at all Xaa locations
  Clone ID: PAT_MRT4530_17863C.1.pep
QLPTSASFVKLXDMGSETWALFLEKFQELLPEAFRSRKCGAAGQRARQRLGTSCQF

SEQ ID NO: 114144 - protein, 59 aa, Oryza sativa
  Clone ID: PAT_MRT4530_17864C.1.pep
PKIFGKGVKTPLDGKKIIKIFLAPKEGNNPEAKLAPFSFVYKRLFGKNFVFYYPMPEIG

SEQ ID NO: 114145 - protein, 118 aa, Oryza sativa
  Clone ID: PAT_MRT4530_17865C.1.pep
VMLMVKTLVYGMSRGERSLFCTPSDVFNLYITEVWKAKVLSSQKDSFTKDEIISVYTKVSRRKLHCCPFCCCILLLLVLYTAIWFRESILLYTFFQTMHDLFMYTSNQYSLVNCYLWR

SEQ ID NO: 114146 - protein, 87 aa, Oryza sativa
  Clone ID: PAT_MRT4530_17866C.1.pep
GGRGIVDGVEERLGLGGEKLAATREVMRQYGNTRSSTIFLAMEEMKRRSEERGMATAGEGLEWGMLIAFGPGLTLETMLLRAVPRNS

SEQ ID NO: 114147 - protein, 127 aa, Oryza sativa
  Clone ID: PAT_MRT4530_17867C.1.pep
SMYLPGSLLFLFVGRCFRFPFLSRRGSEFIPAFLGMYSCTSLSPRPLNIKRERACTVTARPFSSIQSRMKSQSSSIIRRHPCRAVPFPLVPPTDARLPSSACRAFGFSSLMYFGSIRERAGGPPRPT

SEQ ID NO: 114148 - protein, 553 aa, Oryza sativa
  Clone ID: PAT_MRT4530_17868C.1.pep
MYRELKHLLNKSKRFLPDADSSVELASTFCTFFSEKIRDLRRCIDDLNVDELDNPNGMAISAPSFVEFQLVTSEEVQRLIKRSPNKTCPLDPLPTWLLKRHLPVLLPKLTHIINASLASGDFPSSLGVASVTPVLKKPGLDKERMKNYRPISNIRFVAKLMERVVSSQLANYLEDNSLGDPKQSAYRKNHSTETALVSLQNDILCALDDRKCVILLSLDMSSAFDTLDHTILLTRLRDEYGVSGTALHWFRSYLSNRLSHVRIRGVKSLDTRLEFGVPQGSVMGPLLFTLYSKPVSDILYSHGIGYHVYADDIQVYIQCDPSSQDSVDHAACRLRDAMRDVYRWMTSNKLKLNQDKTELVVFASKVHQRLLQNFTLTLHDGTVIKPSKKLRILGVVFDNLMLPDVHVSNVVRTVKYHIRNLCRIRKYLDESTTHAAVRALVLSRLDYCNSLLSGTTAKNIHRLQLLHNQSARLIFKQPKSTHTTPLLNSLHWLPIQQRVLFKTSTLVFKSLHYLSPSYLTDLVHVRHSSYNLRSNTRTVLDTPRCRTNAGFDK

SEQ ID NO: 114149 - protein, 77 aa, Oryza sativa
  Clone ID: PAT_MRT4530_17869C.1.pep
MAMHILGSLVTLAPLDVLFDNTGGRGSSFGGNATLTSLPHYLEDFTGSRKPLSTLKGFGMASLACSTPHSRATHRLC

SEQ ID NO: 114150 - protein, 57 aa, Oryza sativa
  Clone ID: PAT_MRT4530_1786C.1.pep
TGGGGASLSSINEGETRVAVLASLAKRGGSDAIVNIYGAVVRLLAELLLGTEWSREC

SEQ ID NO: 114151 - protein, 89 aa, Oryza sativa
  Clone ID: PAT_MRT4530_17870C.1.pep
MAGRRRPRSGGHGVGHGGGGGGGGRDLPSARSGRPGPGARAHRRGQGRRVASAEPPTRATAARPEPHIAPEHIVTATQGRGTASEDDWD

SEQ ID NO: 114152 - protein, 378 aa, Oryza sativa
  Clone ID: PAT_MRT4530_17871C.1.pep
MEAAGDDAAAAVRMRAAVKRLSFGTAEERAEAAGEVGRLARSDEGRKRLLPELGVVPPLVSMLADARGGGAGARMAAAGALLELARGAHRNKVHIVQAGLLKKLPLLMDDKDMSRSQELALLLLSISSLANTDFPLASSELLRFRVAVLSADDAPADTKLPCLGALHNLSAKLEHVRDVASSGAVRALLALSLDRKTSEAALSVLGDLAATAAGREEMEEDEAAPRALVEAMTWHDAPRCQEHAAYLAMVLAHGSRLQRRRMRRFGVVQALLEVSLLGSPLAQRRAAKILQWFKEEGQDRIRAHSGPRMEGASSASCDDGGEGAKDRRNAVDRIVKQSLDRNMKSILRRATASVDLTSVKLLVGSSSSKSLPCETLHP

SEQ ID NO: 114153 - protein, 84 aa, Oryza sativa
  Clone ID: PAT_MRT4530_17872C.1.pep
DVKQSPINVDSRLSTNSIMSLVFRRECLAEPFICTTNAMYGFFPVDVEQLATVNFFKLATTNFFSCSAARSNVEVPDESIYLTY

SEQ ID NO: 114154 - protein, 122 aa, Oryza sativa
  Clone ID: PAT_MRT4530_17873C.1.pep
SFYTEIKEVNQTNMSLVFRRECLAEPFICTTNAMYGFFPVDVEQLATVNFFKLATTNFFSCSAARSNVEVPDESFNSDIHMNAEHKSCTQQNHHKSLQSIRLLKMIVQIRHIMFWCFHATIT

SEQ ID NO: 114155 - protein, 72 aa, Oryza sativa
  Clone ID: PAT_MRT4530_17874C.1.pep
ACWCWWSFPEDPLSSIPPQVPHTMEECSTAWVLKLTIYSRPKVSPSDSRLAPEFCQECYMIRRPFRRRKGRV

SEQ ID NO: 114156 - protein, 559 aa, Oryza sativa
  Clone ID: PAT_MRT4530_17875C.1.pep
MGSSDFSWTLPDHPKLPKGKPVAVVVLDGWGEADADQYNCIHVAETPTMDSLKKGAPEKWKLVKAHGTAVGLPSDDDMGNSEVGHNALGAGRIFAQGAKLVDTALASGKIFEGEGFKYIKESFDQGTLHLIGLLSDGGVHSRLDQLQLLLNGASANGAKKIRVHILTDGRDVLDGTSVGFVETLENDLSQLRAKGIDACIASGGGRMYVTMDRYENDWDVVKRGWDAQVLGEAPHKFQNAVEAVKTLRSETKANDQYLPPFVIVDDSDKAVGPIVDGDAVVTFNFRADRMVMIAKALEYEDFDKFDRVRVPKIRYAGMLQYDGELKLPSHYLVSPPEIERTSGEYLVKNGIRTFACSETVKFGHVTFFWNGNRSGYFDETKEEYVEIPSDSGITFNVKPKMKALEIAEKARDAILSGKFDQVRVNLPNGDMVGHTGDIEATVVACKAADEAVKMILDAIEQVGGIYLVTADHGNAEDMVKRNKSGQPQLDKKGEIQILTSHTLQPVPVAIGGPGLHSGVRFRNDVQTPGLANVAATVMNLHGFEAPADYEPTLIEVVDK

SEQ ID NO: 114157 - protein, 73 aa, Oryza sativa
  Clone ID: PAT_MRT4530_17876C.1.pep
KNHGSCPFTFNPAPLGPPSMGNENGQTQAKRKGKKIANHEGPFGKNMPKQRNERPTNALTTGLKGGKKGRAAA

SEQ ID NO: 114158 - protein, 95 aa, Oryza sativa
  Clone ID: PAT_MRT4530_17877C.1.pep
FFFFFFFFFFFFFGVCFFFWGGGGNSHQKTGRPLGPYLENSQKILELNLKQKKQFLKFAKNNGEKIWAPSKGGTYFFYNTHFRAQTQTRNWNPKR

SEQ ID NO: 114159 - protein, 82 aa, Oryza sativa
  Clone ID: PAT_MRT4530_17878C.1.pep
FSFIHTNSQRLFQILLHDTTTHACCCTTFIYPTLYIIIALVPHSPREPAMTQSANHCHGVLQYPQGRLTTMGGQICRATWAW

SEQ ID NO: 114160 - protein, 1310 aa, Oryza sativa
  Clone ID: PAT_MRT4530_17879C.1.pep
MPSLQLLQLTEHGRNLLSSRRRTLAVVSGALLAGGTLAYAHSARRQKRQEEYSHSDASTQTTGNQSICQNGVDGKLVKTRKKKNGLKSLQFLAAILLKKIGPNGINHLLGLMITAVLRTAVGHRLAKVQGYLFRVAFLRRVPTFTRLIIENLLLCFLQSTIYQTSKYLTGSLGLHFKKILTDLVHADYFENMVYYKLSHVDHRISNPEQRIASDIPKFCSELSGLVQDDLTAVADGLIYIWRLCSYASPKYVLWILAYVLGAGGAIRKFSPAFGKLKSMEQQLEGEYRQVHSRLRTHAESVAFYGGENREASHIMQRFQALVKHLNVVLHENWWFGMIQDFLLKYLGATVGVILIVEPFFAGNLKPESSTLGRAEMLSNLRYHTSVIISLFQSLGTLSISSRRLNILSGYADRIRELLDVSRELSGVRDQSMNKNSSVGNYISEANHIEFSGVKVVTPSGNVLVDDLTLRVESGSNLLITGPNGSGKSSLFRVLGGLWPLMSGHIVKPGVGSNLNKEIFYVPQRPYTAVGTLRDQLIYPLTADQETEPLSYGGMVDLLKNVDLEYLLERYPLDKEVNWGDELSLGEQQRLGMARLFYHRPKFAILDECTSAVTTDMEERFCKRVQAMGTSCITISHRPALVAFHDIVLSLDGEGGWTVQENRNGSFISAEPEFDALNSSETDRKSDALAVQRAFIANTKGNALMGPKDHSYSTQLIATSPNMEIEHTERSNLVPQLQCSPRPLPLRAAAMSKILVPKLFDKQGGQLLAVALLVFSRTWISDRIASLNGWLLSSCTGDRSDGTSVKYVLEQDKAAFLRLIGISVLQSAANSIVSPSLRNLTSKIALGWRIRMTNHLLQYYLKRNAFYKVFNMSGIDIDADQRITHDVEKLTNDLAGLVTGMVKPLVDILWFTWRMKLLSGRRGVAILYAYMLLGLGFLRAVSPDFGHLARQEQELEGTFRFMHSRLRTHAESIAFFGGGSREKAMVEAKFTTMLNHSRTLLRKRWLYGIFDDFVTKQLPHNVTWGLSLLYALEHKGDRALTSTQGELAHALRFLASVVSQSFIAFGDILELHKKFLELSGGINRVFELEELLQTSQSNAAMPSNPIIAASEEIISFHDVDIVTPSQKLLATQLSCDVSQGKSLLVTGPNGSGKSSIFRVLRGTLRDQIIYPLSHEEAELKVLSLYKSGDKAITSGSLDDHLKTILENVRLVYLLEREGWDATPNWEDILSLGEQQRLGMARLFFHCPKFGILDECTNATSVDVEEHLYKIATSMGITVITSSQRPALIPFHSLELKLIDGEGKWELCTINQ

SEQ ID NO: 114161 - protein, 189 aa, Oryza sativa
  unsure (1)..(189): unsure at all Xaa locations
  Clone ID: PAT_MRT4530_1787C.1.pep
GGRVSDSEGSDQVSSDYEDESPPHLGEEEMESKACPRCGEIGHIASXVSHSALIVKKTIHQGSVPPARSHVFYAKKRKCRVREDICCFNCQGMGHFGDKCPRPRNIAASTSVHATPCNQKLAPQRIVIHASRSSPIDRGATAPTPASALPQVVNAQFQPQPSVDKTEASIGIVPLDVPAQQPXRNQVQD

SEQ ID NO: 114162 - protein, 392 aa, Oryza sativa
  Clone ID: PAT_MRT4530_17880C.1.pep
MAGDALRAADLPGRGRGLLAARSIREGEVILTEQPLLLYPASLASLPSFCSACFRSLSAAASPCPSCRAAGFCSPSCAAASHPRLLCTALSGGGGNGNLASAAEPHQEPLLFLLSAYSLPEPSLRVLLSLSSAATPPPSDQDPGSLHAMVAALVPPQMLPPGFSPDLTAALLSKDRTNSFSIMEPYRPEVPQPLRKARAYAVYPRASLLNHDCLPNACHFDYADRPGPGNTDIVVRALHDITEGREVCLSYFAANWQYKDRQQRLLEDYGFRCECERCQVESKWKQDDDSDGGDGDDTMEEEEEDGNGGEGGDDGMEQEEGDGGSDSDDDFPHSYFFVRYLCNHGECYGMLAPLPPLPNGEPSHVFECNVCGNLKNEDEIDAPDGGDSSMAD

SEQ ID NO: 114163 - protein, 94 aa, Oryza sativa
  Clone ID: PAT_MRT4530_17881C.1.pep
LRESRTPRFLRTRPPPAIALPRIPRPPPGMLFLSHLLHPTPLFPLTRRPHTTHCPAPQYYYLSALESLILEIEMNLNIEYKYVQTHLITYSYSL

SEQ ID NO: 114164 - protein, 112 aa, Oryza sativa
  unsure (1)..(112): unsure at all Xaa locations
  Clone ID: PAT_MRT4530_17882C.1.pep
RRCTTGASSVMGSTGELXAAVKGRSLHIQAPRRVELRVRAAATAVAFEAAEVDYSSNISVIPTEACNLIRGEAYNVQMYPEAKLSSSDAAAATYATAEEVHRDYLWYDEPTT

SEQ ID NO: 114165 - protein, 131 aa, Oryza sativa
  unsure (1)..(131): unsure at all Xaa locations
  Clone ID: PAT_MRT4530_17883C.1.pep
DHRILVNLDAVRSACYTLLLYDTTILVSECTKPPXPTSLPGLLRQRRVRQRLLXDLAAGGLDPATGERDAMGGDEREREVALLVLLVATGDREAIDGGGERERERGEEKEKWRGGGEKREILCGRERLGVG

SEQ ID NO: 114166 - protein, 92 aa, Oryza sativa
  Clone ID: PAT_MRT4530_17884C.1.pep
MCGSFAPRSSSLLLLLITLLLVVVSRPQYSLDASALSDHLAVGDAPPPPPQHGAGRRLLSTQNQVTPPPPAPVSSPPIGPAPTLLPPPPPAK

SEQ ID NO: 114167 - protein, 156 aa, Oryza sativa
  unsure (1)..(156): unsure at all Xaa locations
  Clone ID: PAT_MRT4530_17885C.1.pep
AVGDEAHDRLLEIMRRIEAEEIRLDAAXMVVMSTKQEIEEQWGLYDGFDLKVECKLCIRHIWSKVRSAVGXLHLLINPNKAKKPLPPIWSKVLSFFTNPHKPMILALSRQDPKKNITTLLKAYGENRHLRELKFIYEMGNSRKILEEIKYFLLLIS

SEQ ID NO: 114168 - protein, 85 aa, Oryza sativa
  unsure (1)..(85): unsure at all Xaa locations
  Clone ID: PAT_MRT4530_17886C.1.pep
MAGNGPINKEDPLNWGAAAAEMAGSHLDEVKRMVARGREPLVKIQGATLRVGQVAGVAQAKDAACVSVKLDXEARARVKASREWI

SEQ ID NO: 114169 - protein, 274 aa, Oryza sativa
  Clone ID: PAT_MRT4530_17887C.1.pep
MAAATSTMSLLPPITQQQRWHAADSLVVLASRCHNSRRRRRCRYVVPRARLFGPAIFEASKLKVLFLGVDEEKHQHPGKLPRTYTLTHSDVTARLTLAVSHTINRAQLQGWYNKLQRDEVVAEWKKVQGHMSLHVHCHISGGHVLLDLIAGLRYYIFRKELPVVLKAFVHGDGNLFSRHPELEEATVWVYFHSNLPRFNRVECWGPLRDAGAPPEEDDAVAAAAAEEAAAEQMPAAGEWPRRCPGQCDCCFPPYSLIPWPHQHDVAAADGQPQQ

SEQ ID NO: 114170 - protein, 99 aa, Oryza sativa
  Clone ID: PAT_MRT4530_17888C.1.pep
PRGPTLALKKNLPPKPPGGGETTMIVNPLKTGPKRPRAHKPRTGKKNPKKKPKGGGGNKTTGREKTGNPPKGKKGGPIPKIKEGGPKKGGPNPQTGGPP

SEQ ID NO: 114171 - protein, 62 aa, Oryza sativa
  Clone ID: PAT_MRT4530_17889C.1.pep
LQLLKRSQNKSLFKKQGTLLPCNTKSVLLKIEKFWSYKMGQKVRGGGGGGPRLLFHFVGKPP

SEQ ID NO: 114172 - protein, 207 aa, Oryza sativa
  Clone ID: PAT_MRT4530_1788C.1.pep
MPGAGSPLLPPPASSPPSPTAGNSPLLLLPLAFAEIPEARFNGCVTEWPASSRWRRWRLGVFGELPATSLNGGVDGDELGADLAASTPPHRCGQEAHSGVDSVGSDGVGGARFLPQIHREIGRRPPSPSTGAGSPTHDRRVEEEDDDELCRRQGAPPMEHRRGRRDVERRRPPQASPTAATQRGLHAPMVEASPTRAMAPAVETSME

SEQ ID NO: 114173 - protein, 64 aa, Oryza sativa
  Clone ID: PAT_MRT4530_17890C.1.pep
WGIFGTHKWNTPADTAWCQNRNKEPRGLIMVADENQLTTYNSQRFSHHFPETKMCVPSRTFTSN

SEQ ID NO: 114174 - protein, 88 aa, Oryza sativa
  unsure (1)..(88): unsure at all Xaa locations
  Clone ID: PAT_MRT4530_17891C.1.pep
ARHGGGNTYATTNSEGDGRRRTPKGGXFGSTAATIFRRRAAATDGXDGLLPGCDVRVDGDDGAPVGFGYGEGVDGVELDLAEPREATA

SEQ ID NO: 114175 - protein, 84 aa, Oryza sativa
  unsure (1)..(84): unsure at all Xaa locations
  Clone ID: PAT_MRT4530_17892C.1.pep
RRRRRRPPTATSETTAGDGXRRRHPATADLATAQRQLTTVTALVPTAAASGNDDXQLQQWHLDDDGSGERKGERNAVGVGPTIG

SEQ ID NO: 114176 - protein, 48 aa, Oryza sativa
  Clone ID: PAT_MRT4530_17893C.1.pep
YRDHIHLGRRPDISLLSKLVATLLFWFYDLSCLRPTMGDIHTTIVVFP

SEQ ID NO: 114177 - protein, 93 aa, Oryza sativa
  unsure (1)..(93): unsure at all Xaa locations
  Clone ID: PAT_MRT4530_17894C.1.pep
VSPGSTSNCMSPKQASALHCSLLCTKLRAKTLHFNEVLVNFRMASFFPSPLSGXFVWPFRIYDAIFIVRCFVILFILNFNPNIAWSPCTTADF

SEQ ID NO: 114178 - protein, 103 aa, Oryza sativa
  Clone ID: PAT_MRT4530_17895C.1.pep
FYIAGTEYCSLVLFCVEAADIKTKNICIAPRAAVNSIIGTTYGDKWLGAYAACYCSSKIASKMDVIGACYIKVDMGSVWNRLGSEVTDVEFDPDIASSTDCEI

SEQ ID NO: 114179 - protein, 41 aa, Oryza sativa
  Clone ID: PAT_MRT4530_17896C.1.pep
NSSSSLFQHNTQVEQLEFAWPKTPNSTYFQSLTLIYMVRTI

SEQ ID NO: 114180 - protein, 63 aa, Oryza sativa
  Clone ID: PAT_MRT4530_17897C.1.pep
MVEQASEAISGLAPYCLQRKRADFGVWLGLKVTLDKWVDVGVVIPVGLVGSQATTKLATDVPL

SEQ ID NO: 114181 - protein, 423 aa, Oryza sativa
  Clone ID: PAT_MRT4530_17898C.1.pep
MAEIWLKQIERNKKKRGERGATWQSKEGLGLAHGSPDGRTRMRQRIQEGRKSFLFFLAHQFGRAPALGLALAGGEGLGGWCGRPRQVSGDLRRLWTVARGLRCCEAVVLPGRGDGSRASAIGTDSAVMVGREGCCLGVGEVVRNSKECAKVERRNGDDRDELAPRTRSMRRRRRSARWGQAAGVGRRWRAAATCSTPPSSPAELHLRRAAASVVAAGRRHHRCVRRSKVKLGRSLPAVAGHRSPVAAVDRSRRRHPLRRRPSSFVVWFEGGRRHFVDGYPVIGMTGGVEEVASHDDVQSFVPKHGTVAYPSILPNLGFGLRQAEAEQAERRRQMRNNLAVEKNESEREMAKERMERARMENVGAVVATGRPPCAAGRVAARCWTARGQSDAILVMPSPGASRQRQDRESLGKARASPPARWVR

SEQ ID NO: 114182 - protein, 284 aa, Oryza sativa
  Clone ID: PAT_MRT4530_17899C.1.pep
MAGRAATWGRGVGARRGAEKAAARTVSAAVAVVGRAAGGRGRPDSKKKGKLLGVTMAGREGCCLGVGEVVRNSKECAEVERRDGDDRDELAPRTRSMRRRRRSARRGQAPGVGRRWRKTRPKGSKKKGNGRVLTVRQPGSDTPVFDRRPTVFVRVQRGFKGECRSGGGNRTTSLCSRARGSEVLDRAGTKRRNSRDAVAQELGVTAAARQGELGEGKGKPAGEMGAKFFSFPCGFLFRVIAPLDLVQLDGLGSSLSFCLFQYFDRLLGVSQVLAHFSGVYRGEA

SEQ ID NO: 114183 - protein, 1602 aa, Oryza sativa
  unsure (1)..(1602): unsure at all Xaa locations
  Clone ID: PAT_MRT4530_1789C.1.pep
MLVWTQVGEIVFPVYTTTLISTGPPMTGDENAVATNQGDSMSKNPPVETENGISTTSKLKKDSDTAKPCPSDMNHEPTKMTSEATRSWCPIHKTKKHTLQDCWVFLNVRAEIRACKERGIQRTSPTRDVYCPIHKTKNHDLSSCKVFLGAMKAQSPKSYIPIRDNGKEQGATPTSDRFVGVIDIDPHEPSVLLLLEDYGASTTSAPREVLAIDDVGTDRYTTQELATRRITTTRRLFEIVERCAHADDALRRKNDRPKTGGEKKPTTDTSESSKKKNRKNGKRKAQAEVLAAEYANPPKRPDPQSNDTKKSWCPIHKTDRHSLEDCLVFKKSLEKHMAFEKGKRVCVVKTNKETTPHEPDSAYPDSDLHVSHIFGGSTTYSSKREYKKVEREVCSTWQGAAPKMKWSEQKIEFSEEDHPKTAVIPGRYPIAVEPTIRNIKVARVLIDGGSSINLLFASTLDAMGIPQNELTPTDQPFHGITPQSSSRPLGKITLPVTFGQANNFRTEQITFDVAEFDTAYNAIIGRTALAKFMAASHYAYQMLKMPGPKGTITIQGNTKLVVQCDKRSLDMVEQTPSPPATTEPPKKVTKTNKTPKPDGAIKIVPLSSANPDKTLSDMPGVPREVIEHKLMVRPDAKPVKQRLRRFAPDRKQAIREELDKLLKAGFIREVLHLEWLANPVMVRKANGKWRMCVDFTDLNKACPKDHFPLPRIDQLVDSTAGCELLSFLDAYSGYHQISMAKEDEEKIAFITPFGVFCYVKMPFGLITAGNTFQRTVQGALSNQLGNNVEAYVDDIVVKIKTGDSLIDDLRETFDNLRRYRLMLNPEKCTFGVPSGKLLGFLVSGRGIEANPEKIKAIENMKSPTRLKEVQKLTGCMAALSRFIARMGERGQLFFALLKKQDKFVWTQEAEKAFIALKRYLSNSPVLVAPQTNEELFLYIVATPHSVSTVIVVEREKVQRPVYYVSEALHDAKTRYPQIQKLLYAVIMTSRKLRHYFQAHRVTVVSSFPLGEVVRNKDVVGRIAKWVVELSQFDVHFVPRTAIKSQVLIDFVADWTMPDNKSDNQGDNATWTMAFDGALNSQGAGAGFILTSPSGDQFKHAIHLNFRATNNTAEYEGLLAGIRATATLGAKRLIVKGDSELVTNQVHKDYKCSNSELSKYLAEVRKLEKNFDGIEVRHVYRKDNVEPDDLARRASRREPLEPGTFLDMLTKPSVKEVSGEVSPNTPDISSEVTEAERAVADIETTNDWRIPLIKFISSEELPEDDTEAEKITRKAKIYCMVGNDLYKKAPNGRCEACQFHSXTHKATRASAPDYPSDLAILVLGARYTWAIPTRTGRLXFLFVAIDKFTKWIEAVPTREIKADNAIKFIKGIFCRYGLPHCIITDNSSQFISADFQDYYIRLGVKICFASVSHPQSNGQVERANGIVLQGMKTHVYDRLMSHDKRWVEELPSVLWAVRTTPTTSNKETPFFLVYGSEAMLPGELQHQSTRVQKYSDENQEEQRDIDVNLLEEHRERVAVRAASYQQTLRRYHEKRIRARILSIGDYVFRRVQSQAGRNKLTPKWEGPYTITQVLRPGAFKIADGDGRELANSWNIDQLRKFYV

SEQ ID NO: 114184 - protein, 79 aa, Oryza sativa
  Clone ID: PAT_MRT4530_178C.1.pep
MAVVNLKVVEEITERELRGGMGDGSTCICLANLPRSAGKKLFLLQLSSVFPKDSCKLARKTDATRRWTAGDQIEKTQFY

SEQ ID NO: 114185 - protein, 51 aa, Oryza sativa
  Clone ID: PAT_MRT4530_17900C.1.pep
KREREMASPSSIFSLSSTFFITFVVFLQLHHLFFISKKVNAITQLMTIDFF

SEQ ID NO: 114186 - protein, 801 aa, Oryza sativa
  Clone ID: PAT_MRT4530_17901C.1.pep
MRSYLSPLSRVDLRVRSFLNCVIAVSCEGAPPVQMGERYPHMFLILLLFHGAHAALKDPVQKWQTLGGQRPLVIARGGFSGLFPDSSQFSYQFAMSSSLHDVVLYCDLQLSSDGLGFCKTGLTLENSTLIAEAFPKRAKTYKVNGEEIHGWFALDFTADELYQNVTLIQDIFSRPSTFDGAMGMFTLEDLVGLKPPHLWVNVEYALFLQEHKLSAEDYILGLPKDFSVAYISSPEIGFLKNVGAKLKKSNTKLIFRFLREDVAEHTTKKTYGEILKDLKSVKAFASGILVPKEYIWPLGKDQYLRLPTSLVKDAHALGLEVFASGFANDVSMSYNYSFDPSAEYLQYIGNANFSVDGVITDFPPTASGAVACLANTKGNPLPPPGGDGGRPLIITHNGASGVYPGSTDLAYQQAVKDGADIIDCAVRMSKDGVAFCQPSADLSTSTTASTSFMTKISTVSEIQNKSGIFSFDLTWSEIQTLKPDLLGPYTQAGLKRNPAAKNAGKFVTLPEFLDLAKATNVSGIMVEMEHASFLAKRGLGLVDAVSGALANASYDKEGGHLPELMVVSDDTSVLAAFKKFPAFRRVLMVDETISDASAPSVEEIKQFATAVTVGRGSIAQVNGFFLTRFTDVADRMHAANLTVYVGVLRNEFMNLGFDYWADPIIEIATYAFHVMADGLITEYPATAATYFRSPCSDLSLNLSYAILPADAGALVHLAAPGALPPALPPAPVLEPGDVLDPPLPPVAIASPPEEAATAAKPTDSSSSAAAARSSAGAGGCRVLAAAVASLFLILLPSHGFH

SEQ ID NO: 114187 - protein, 234 aa, Oryza sativa
  Clone ID: PAT_MRT4530_17902C.1.pep
MGRISSNIICAWHHLVEVEDGDPRLHLQASTSAAVSGSVPVGLAAKNPKLMHEGAQDLNLAFPHHHGHALQSPEFTAFPSLKSSTMCNPGGNLAAANGADGAARDAGGICSCGVPSWRVPHAATATVASATSSDCARFLPGHAWRVQAAAPGCLARAALGCKRARWGRLLFPFEDLKLVASATASDANSSGDHQYDHGKNQGGGGGVIGGHETPGFWNSSMLGNGSSNGGGDSW

SEQ ID NO: 114188 - protein, 95 aa, Oryza sativa
  Clone ID: PAT_MRT4530_17903C.1.pep
NGSMRMVSLVADGSAGDEIMTNRDKKRRRKEHSVELKEGDQVNISRKAVKIKGNKKRKNESDKFNPDLSTDALTGEDKVGGDGKMIREKRRRYID

SEQ ID NO: 114189 - protein, 45 aa, Oryza sativa
  Clone ID: PAT_MRT4530_17904C.1.pep
VSCLKKYWWCGAVLSCKSCSKLEVGFRSETSSITDRENCIAFCSH

SEQ ID NO: 114190 - protein, 904 aa, Oryza sativa
  unsure (1)..(904): unsure at all Xaa locations
  Clone ID: PAT_MRT4530_17905C.1.pep
MAAQSRKKRKAYMSERSRVLRQRLAHSSSSIYDKDASSSHTTIPTNGHSRSVFSPLNLGPPSHTCCYCGALFWYEERIDRRRHTTRPLYNKCCKGGSVILPSYKPPPEPLHSLLTAVDRAKSAHFCENIRYYNSMFAFTSMGVNVIDSINDGRGPYTFKRSGQLCHRIGSLLPKRDKRPEYAQLYIFDTQNELMNRLRVGTYKNRAFQPNEEIVAALMQMFDAHNPIVKLFRVARDRLSRAGAPDDHYFIRLFGSPDKHGDIFNAPVASEVVGLVVGDLGTSDIGRDLMVEDKAGNLRKVKEDHCKFMAMQYPILFPYGEDGYHQNIAYRQCRRSAGIKRKRVTEALALIPGQHSSNSXDIVDRVFHMKLHLFIDDITKNEFFGPITAAQLPDPSVDPIGFDAVSAFMIHGPCGEGHPSCACMVNGECSKNYPKEYCEKTTILQNGHVRYARPKNRISTKKNGVAVDNAFVLLHNVDLCVKYQAHINVERVSRDGMEKYLFKYLPKFEIHHTNPSVERLPVHLPLGNSVVYNEDDSLEQVLQNPWNQITKLTAWFEANKTYPEAVCYTYAEFPEHFTWHADGKYWDYRRGTGNVGRLANVARSYSEIRTIEGQQYPTFQAACQAPGLLGDDREWLSAIVDAAHWALPYQLHPLALFEEHFSRMGEDYMHRIGHSMTYHSTPFTQHVRSFVLAEIDKLLRNSGYSLPHFNLPEPILTSACAVGNRLLTDEQAYDIDRISVEAAEQLNQLNLNQKHVYDVVLQSVNNCIGHTFFVHGYGGTGKTFLWNALLNAVRAQGKIALAVASSSIAALLLPGYLLLPPESRNISSLVSFVYNESSISDMVAYFCERAILAPTNDIAAEINSHMISQLPTEQMSYYSSDIIDDSTANRATLEAFYPVEFLNTI

SEQ ID NO: 114191 - protein, 499 aa, Oryza sativa
  Clone ID: PAT_MRT4530_17906C.1.pep
VHTAQLPDPSVDPIGFDAVSAFMIHGPCGEGHPSCACMVNGECSKNYPKEYCEKTTILQNGHVRYARPKNRISTKKNGVAVDNAFVLLHNVDLCVKYQAHINVERVSRDGMEKYLFKYFTKGFDCSKVGLQRKRASGESSTCTKGVNEIQDYLECRCIAPNDAAWRLLQFEIHHTNPSVERLPVHLPLGNSVVYNEDDSLEQVLQNPWNQITKLTAWFEANKTYPEAVCYTYAEFPEHFTWHADGKYWDYRRGTVKVARSYSEIRTIEGQQYPTFQAACQAPGLLGDDREWLSAIVDAAHWALPYQLHPLALFEEHFSRMGEDYMHRIGHSMTYHSTPFTQHVRSFVLAEIDKLLRNSGYSLPHFNLPEPILTSACAVGNRLLTDEQAYDIDRISVEAAEQLNQLNLNQKHVYDVVLQSVNNCIGHTFFVHGYGGTGKTFLWNALLNAVRAQGKIALAVASSSIAALLLPGGRTPHSRFKIPLDIQEHSLYAIKKKKLI

SEQ ID NO: 114192 - protein, 175 aa, Oryza sativa
  unsure (1)..(175): unsure at all Xaa locations
  Clone ID: PAT_MRT4530_17907C.1.pep
KQKTPPPRVKGPKTQKKKNPGLKGKPNPGPPPKKGAQNXAKPGRDPPKGGPPPPPKKNPGLENPPNPGPXGGRKKGPKPKGKGGPRPKPLGRGPLTLGNPPPGGGAQISAPTPPGRGPPGQTKSFPGWGTRPPTGFWPPGNXAQNPRPPKETPPGGPLASPRPAPGGGAPPPSRG

SEQ ID NO: 114193 - protein, 253 aa, Oryza sativa
  Clone ID: PAT_MRT4530_17908C.1.pep
MAHHPSALDLAAAAAWKGRRPAAAKSREGEEERWWQAEPGDDDDEGERGHWEGVSSSGTGEGGGIKLAALGFVVLLSIGLASAARVERYSSSEGSGTGNGEGGGYVNGGGVGSGSGAGSGSSGGNYGAHASGGGGGEGGGYSQYGGSGSGSGSGSGSGSSEYTQNGGYGYAGSSSAGGSGAGAGAGQAGGYWPSSSHGSGSGMGSGSSSAATYWKGPYASAYGNGNGGGNGQGQYGGSGVGAGSGSGFGDASP

SEQ ID NO: 114194 - protein, 1104 aa, Oryza sativa
  Clone ID: PAT_MRT4530_17909C.1.pep
MAVMETVEKIISTGINIHGATNLEDDLSCLRASLPNARLVINRGEWGRFKNKDLAVLLTQLKDTTYDTEDLLRKFDDQVLRQKMEDTDRSRAGKFFSSSLYRAKNLICGSKTRIKDAQDKLDKAVDDLERALKPLGLKMEKVQHMPETSSVIGVPQVFGRDKERDLVIEKLASKAKQLKRESIRARPRLAQAKFVSNVSVLPIVSIGGVGKTTLAQFIYNDPRVEAHFGKRIWVCISDLFNKKRITKEIIESITRKEYKSSNSLDALQVELRKQLRRRKFLLVLDDMWPNAKDEWETFFAPLRYGFEGSMILVTTRSPDVANLVASNNCNPFRIEGLDRDIFWEFFKKCAFGKQCPESYPQLHDIGRSIASRLCGSPLAAKTIGRLLNMELTVQHWKTVQNKELWELPNRDNDILPALQLSYLHLPQELKSCFAFCSMFPKGYSFERDEIVGMWVAQGFVAPEGSMRLEDIGIRYLDDLRGRFLLQTDTNCLDQSRYVMHDLIHDMAQSISVDKCFLMQDLSYQNQRRMPHAVRYMSVEVDSESLSQTRDIQYLNKLHSLKFGTILMFEITWFNQLSNILFLSLKGCMLVRLPESIGELHSLRYLDISRSHVQELPEKLWCLYCLQVLDASSSSLEVISPDVTKLINLRRLALPMGCSPKLSEISGLGNMSLLRNLIHFTVGIGNGRKISELKGMNQLSGTLTISSIYNVKSKEEAVEARLIDKQYLQALVLLWRDQPVPRVMNDDNGVAEGSPPWSSPSTRRRLSGSSAKPDGHKDGGGATLPSRGCPAAGDTGGFSAVADHRRWRPDGRRSGSAHTGCGSAFPGAKSSLPAVRSGLGDPNDGGPRGDGGKRRRTVVERWQAAGGWRDGRERPAGSWATAATATLLGPTRYGGVAQETHGDDGNSRQLAGGAVPAGWPAGRRHGPGEGGDRGCSRRWLRGRETHGDGGDSGQPAGGVVASWLAGGGGGSAHRGAAEVAAVRGGAAEVAVRHDKALLAWRRWPAQREERPVEVQPVAVRGDWPVGGTGAVMPMRWRKFRWRWSNGASVVDRQAVDGGRKPSPALAGSATMAFKRHSPPEGVVGPSQPLKCGCQVKARSRFSLRP

SEQ ID NO: 114195 - protein, 1594 aa, Oryza sativa
  unsure (1)..(1594): unsure at all Xaa locations
  Clone ID: PAT_MRT4530_1790C.1.pep
MPGRRTWCSRFTMPISASPSMAGNENVVGTTQNNSLSKDPPAGAEIGTSTTSEPEKDPCKPAGFFSTSTDISSCKVFLSAMKTPPPKVQQSRIPIRDKDKEQEATPISDRFVWVIDINPHEPSVLHLLEDYGSSTTSTPREVLAIDDVGTSARSNAEAENQVTTPAQHIRAVNAILRETPYDPVLNNDLARWTERLQESVTNLSNAFEEAAAAAHPEQPPTGDANDRHPRRMYDRRQPTAPSTRCRAFDRSLRDIRWPERFRPGAIEKYDGSTDPEEFLQVYSTVLYAAGADDNALANYLPSALKGSAHSWLMHLPPYSISSWADLWQQFVANFQGTYKRHAIEDDLHALTQNPGESLRDYVRRFNECRNTIPEITDASVIRAFKSGVRDLYTTQELATRRIMTTRRLFEIVDQCAHADDALRHKNDKPKTGEEKKPAKDTPESSKKKNRKSGKRKAQAESLEKHMALEKGKRVRVVEKDAVAATQESDSAYPDSDLHVSHIFGGSTAYSSKREYKKVEREVCSTWQGAAPKMKWSEQKIEFSEEDHPKTAVIPGRYPIVVEPTICNIKVARVLIDGGSLINLLFASALDAMGIPRSELTPTDQPFLGITPQSSSKPLGKITLPVTFGQAYNFRTEQITFDVAKFDTTYNAIIGRTALAKFMAASHYAYQVLKMPGPKGTITIQGNAKLAVQCDKRSLDMVEHTPSPPATTEPPKKVSKTNKTPKLDGAIKTVPLSSANPDKTVKIGASLNEKLELALITFLRDNADMFAWQPSDMPGVPREVIEHKLMMQPNAKPVKQKLRRFAPDRKQAIREELDKLLKDGFIREVLHPEWLANPVMVRKANGKWRMCVDFTDLNKECPKDHFPLPRIDQLVDSTVGCELLSFLDAYSGYHQISMAKEDEEKKAFITPFEGALSDQLGNNVEAYVDDIVVKTKTSDSLIDDLRETFDNLRRYRLMLNPEKCTFGVLSGKLLGFLVSGRGIEANTEKIKAIENMKSPTRLKEVQKLTGCMAALSRFVVRMGERGQPFFALLKKQDKFVWTQEAEEAFIAFKRYLSNPPVLVAPQPNEELFLYIAATPYSVSIVIVVEREKVQRPVYYVSEALHDAKTRYPQIQKLLYAIIMTSRKLRHYFQAHRVIVVSSFPLGEVVRNKDVVGHIAKWVVELSQFDVHFVPRTAIKSQVLADFVADWTMPNNKSDNRIDNETWTMAFDGALNSQGAGAGLILTSPCGDQFKHAIHLNFRATNNIAEYEGLLAGIRAAATLRVKRLIVREPLEPGTFLDVLAKPSVKEVSGEGNPVAPDISSEATEAECVVADIETTDVWRTPLIKFINSEELPEDDAKAEKITREAKIYCMIGNDLYKKAPNGGXRHTRAIPTRTERLQVXFVAIDKFTKWIKATPTGEIKADNAIKFIKGIFCRYGLPHCIITDNGSQFISADFQDYCIGLGVKICFASVSHPQSNGQVERANGIETPFFLVYGSEAMLPSELRHQSTQVQKYSDEDQEEQRNDDVNLLEEHRERVAVRAASYQQALRRYHEKRIRARILSIGDFVLRRVQSQAGRNKLSPKWEGPYTITQVLRPDAFKIADGDGRELANS

SEQ ID NO: 114196 - protein, 137 aa, Oryza sativa
  unsure (1)..(137): unsure at all Xaa locations
  Clone ID: PAT_MRT4530_17910C.1.pep
PHSLHHGVVVTDKAYLLSYDLWNIPIRYTFTYTGCFCIXAWKPFQIIRNISTSQVISKVLLGSFLGDQDDRQYKRDPLGEVXGSNSIANTPTKVXEARVRGANSPGDHVESLDYDLVFVPTYPNPLLIRSTSITRRQ

SEQ ID NO: 114197 - protein, 570 aa, Oryza sativa
  Clone ID: PAT_MRT4530_17911C.1.pep
MATKNGGFVALLLLLSFLLSSPLPARCDAPLPVNVWPKPTSMSWAEPHMAVRVSSSFHVVAPSGNAHLLSAARRYAALLLAERYRPLVTPAVNVTAGGAGAGAAGRGAELGYLTLAVSDLHAPLQHGVDESYALEILPAGAAATVTAATAWGAMRGLETFSQLAWWCGRERAVLVAAGVRVEDRPLYPHRGLMLDTGRTYFPVADILRTIDAMAANKMNVFHWHITDSQSFPLELPSEPALAEKGSYGDGMRYTVDDVKLIVDFAMNRGVRVVPEIDTPGHTASWAGAYPELVSCAGEFWLPDASDWPSRLAAEPGAGQLNPLEPKTYQVMSNVINDVTSLFPDGFYHAGADEPPLEKFVGAAHPLIVSRNRTAVYWEDVLLDQAVNVTASAIPPETTILQTWNNGGNNTRLIVRAGYRAIVSSASFYYLDCGHGDFAGNDSAYDDPRSDYGTSGGSWCGPYKTWQRVYDYDVAGGLTAEEARLVVGGEVAMWTEQVDAAVLDGRVWPRASAMAEALWSGNRDATGRKRYAEATDRLTDWRHRMVGRGVRAEPIQPLWCRNRPGMCNLVR

SEQ ID NO: 114198 - protein, 99 aa, Oryza sativa
  unsure (1)..(99): unsure at all Xaa locations
  Clone ID: PAT_MRT4530_17912C.1.pep
KVFRKHQESNRYFLFXLWRHQKRKTRKGIXMRTRTCVLKAYQPTWAYECYAQLCKELPEGFGGMGIAIXLSTSRGIMDRSEKLRLNTNWGEKCLWCIYG

SEQ ID NO: 114199 - protein, 122 aa, Oryza sativa
  Clone ID: PAT_MRT4530_17913C.1.pep
RARNHFYSPTLFIPPPQKNGPREVFLPGSGKQSTPPRGGGKGFKQNPNQPPELKQTGGSRQTPKKKPGGKAKFFFGPQLLGGTTTGGGFFFTLVYSLRGPKSPRRPLTPEKIPGAPPPPPPF

SEQ ID NO: 114200 - protein, 83 aa, Oryza sativa
  unsure (1)..(83): unsure at all Xaa locations
  Clone ID: PAT_MRT4530_17914C.1.pep
LVRAGPSXVDDWSSRXXSMXKXXFSHXRIGVSLXCHPRTWLRYNAXFKRPHLAXLPFHPISVICKCYPLKKKKKKKKKKKKKK

SEQ ID NO: 114201 - protein, 123 aa, Oryza sativa
  unsure (1)..(123): unsure at all Xaa locations
  Clone ID: PAT_MRT4530_17915C.1.pep
PSDAGEADQPGQEAPATPTAQAEAHRAGGEGEEKTPSDGGPEPGGXEPXGNENDPHPXDXARRAGTEHNKKANPPPEAEKXGSAKQQAAAGTRNHPTTEAKEGDAKKPHEAKAREKPRTDPKE

SEQ ID NO: 114202 - protein, 124 aa, Oryza sativa
  Clone ID: PAT_MRT4530_17916C.1.pep
MATPGHRQHALTARLAAAPRPACAVELLSPRRARSFRRVREAEPARLVRAVAASPAWPLVNVVGGEHVAAMMTAVGARPEEYLEELGKVAKLAAGFNLVDLFPESRLVRAAQAAHGKIHSIMDA

SEQ ID NO: 114203 - protein, 382 aa, Oryza sativa
  Clone ID: PAT_MRT4530_17917C.1.pep
MNSKKSKCTCTLTDDLVVDILSRLPLKSVCCFKCVCKSWASLFSDQYFCTKLPRRPAGLLYQDSNNSSIQIAKLPSGNSEIGTSLSFMPHHENLKLVDCSNGLILFTHGSKSDSPDSSHFIVCNPATQEWIALPDTCPRVNGSDYIAMLAFNPSSSCHFFVFNFQKRRSPHSGVFVITEVEIFSSEDFTWIADDAFETEIMMISMPHVLLHGVLYLRTVEHSVFAIETPHMYKPWIHRWTFELPGDSCPMNNYIWGCLGESSGILHYMQPNYDGCWLNVWRLESRHQQWSMTHSLSMIDAFGRGTLVHGDPFSVDWSADYGMLSFDLEREIVFLHDRVSSKVLSYSIRTGKLCEMGDLPRNSLYYVPYWRKFPVVEEDQYWL

SEQ ID NO: 114204 - protein, 39 aa, Oryza sativa
  Clone ID: PAT_MRT4530_17918C.1.pep
CLMFALPRSQRCINLPICPVWDVMPTNPPQLYVTSCAST

SEQ ID NO: 114205 - protein, 211 aa, Oryza sativa
  Clone ID: PAT_MRT4530_17919C.1.pep
MAEEGKGRRAAGDGGGERRDNKDGAVTGDGGRDAATGMARGTAAGGGDRGRELKKCDGGGYSSRSVVAAAAPPTLPRRLPPSPLCGLLRPLRSAHCHARPPSVPPLTCLPTTALPSAALAPLRSRACPSTPPFHLPLAARRCRHHDPTPDAEGQGLLISVLVEVYPHPRHLGGRRGGWGRELEHDAEQEAEGGARPGQRSETEVGLIDGGR

SEQ ID NO: 114206 - protein, 1720 aa, Oryza sativa
  unsure (1)..(1720): unsure at all Xaa locations
  Clone ID: PAT_MRT4530_1791C.1.pep
MDLDLLPRDTSKAVVAAAATPNVGHTAVSAAVLGAAPAVVALGAAPAVVGLGAGSSRKSNANALRRPPPLKRTTSKPKSHLAAVGAPSAPTTLNTSSFAGGLRLLKSMGFTSKSTAGSANRSQQDSQSLPPHDESVNDSQPIQGDDDEDEAEEEDVDFGTKRKLTSIVWKDFKKVKICGKVKAQCLHCHKRLGGKSSNGTRHLHDHLKICTLKKIKMAGQNKTLAQSSLRFNSQEGGKISVEKYTFDPQIARRELAAMIVLHEYPLSIVDHIGFQRKDIMDYYMEENKKALAYMAGTKSRVAITTDLWTSDNQKRGYMAVTAHFIDDSWTLRSIIMRFIYVPAPHTTEVICEQLYEALVEWNLDEKISTLTLDNCTTNDKDGIEVIKYSIAKIRESVAFWTATPKRVEKFDEIAKHVKVKMDHKLGLDCKTRWSSTYKMLSIALPYAHAFDRAKHVEKLFDCAPSKDECAFAVEVVNRLKLFNDITEVFSGTNYVTANVQLLKICGAKEQIRQWAVSGLRVRYTLYPSIYVTYRYGMFTRIRTFSAYVKEIHHGVHRWKESYSVRTGSSLCRVRSSLSESNWETDPRTSVPQYPLYPVYGYSPSTVACQVGGLGAQGSTTMTSTFVDNSVNTNLNQGVATSTTLVWTQVGEIVFPVYTTVPISAGPPMAGNENAVATTQGDSMSKDPPAEAEIGTSTTSEPEKDPSAAKPCLSDRNHEPTRITSEVTRSWCPIHKTRKHTLQACWVFLNVHAEIRACKERGIQRTSPTRDVYCPIHKTKNHNLSSCKVFLSAMKTPPSKVQQSRIPIRDEHKEQGATLISDRFVGVIDIDPHEPSVLHLLEDYGSSTTSTPREVLAIDDVGTSARTNAEAENQATTLAQHIRAVNAILRETPYDPILNDDLARWTERLRESVTNLSNAFKEAAAAVHPEQPPTGDANGEDPEHRELPHRATPSPRGTGDLRDHLNGRREARRTSDNENRSQHRISSRRHDNEDRGGRSSEDRGHDNRHNRCDHDDHERRVLGDTGRGRRHNDDDDGDRRRDNNGXRQQGSREPGRRPRNRTPEPSDPSSSSSSSSSSSSDRHPRRALVAAVRSQLPRXYKRHAIEDDLHALTQNPGESLRDYVRRFNECRNTIPEITDASVIRAFKSSVRDRYTTQELATRRVTTTRRLFEIVDRCAHADDALRRKNDKPKTGGEKKPAKDAPESSKKKIRKSRKRKAQSEVLATEYADPPKRPDPQGSDTKKAWCPIHKSDRHSLEDCLVFKKSLAKHMTSEKGKRVHVVEKDAEAPTQESDSAYPDSDLHVSHIFGGSTAYSSKREYKKVEREVCSTWQGAAPKMKWSEQKIEFSEEDHPKIAVIPGQYLIVVEPTIHNIKVARVLIDGGSSINLLFASALDAMGIPRNELTPTDQPFHGITPQSSSKPLGKITLPVTFGQANYFRTEQITFDVAEFDTAYNAIIGRTSLAKFMAASHYAYQVLKMPGPKGTITIQGNAKLAVQCDKWSLDMVEHTPSLPATAEPPKKPSDMPGVPREVIEHKLMVRPDAKPIKQKLRRFAPYRKQAIREELDKLLKAGFIREACPKDHFPLPRIDQLVDSTAGCELLSFLDAYSGYHQISMAKEDEDKTAFITPFGVFCYVKMPFGLITTGNTFQRTVQGALSDQLGNNVEAYVDDIVVKTKTSDSLIDDLRETFDNLRRYRLMLNPEKCTFGVPSGKCHTLKIQNL

SEQ ID NO: 114207 - protein, 113 aa, Oryza sativa
  unsure (1)..(113): unsure at all Xaa locations
  Clone ID: PAT_MRT4530_17920C.1.pep
MYSLPRXRAVEKHHCVGHGAPXGAVDELLRHDWCRQDGAVYDSXRRCYWLNHMAGCIYSELVLNDVWHHMDEELPDXRKWDLXLAEDILPAFYDLDMPNGLCGDCYWFVRSDY

SEQ ID NO: 114208 - protein, 92 aa, Oryza sativa
  unsure (1)..(92): unsure at all Xaa locations
  Clone ID: PAT_MRT4530_17921C.1.pep
TNQKLHKYSQAEFSCSVIYLQESVVQVLQSKPGNLTVLLREKLATCDFXKDATEHYITLNGNFWSRXYXLHGXFWAEIQSVKXELFSSVQPF

SEQ ID NO: 114209 - protein, 173 aa, Oryza sativa
  Clone ID: PAT_MRT4530_17922C.1.pep
PTRPPTRTEMMEAHVGDFGLAKLIDISNSRTMSAIAGSYGYIAPEYAFTMKVTEKCDIYSFGVVLLELVTGQSPIQPLEQGGDLVNLVRRMTNSSTTNSEIFDSRLNLNSRRVLEEISLVLKIALFCTSESPLDRPSMREVISMLMDARASAYDSFSSPASEAPIEDDSSLKH

SEQ ID NO: 114210 - protein, 122 aa, Oryza sativa
  unsure (1)..(122): unsure at all Xaa locations
  Clone ID: PAT_MRT4530_17923C.1.pep
GVQKCSSVSSILATVFDVQISRLNLPGAGSSTIATANARRTIFGACIRATAAERNEELGYLETTLLFSHLCQKIRWGSSRSSRATSQQMPRRQTLGLPPKGSKXTTXEGTXPGVAPPKAGTX

SEQ ID NO: 114211 - protein, 78 aa, Oryza sativa
  Clone ID: PAT_MRT4530_17924C.1.pep
MLDFALHVDRWIKWKLYTTSKRCCSWHGESGNVEEVEETASPWIECEGGKGKAQIQQQGGCWPKVEGGVDRQREDERG

SEQ ID NO: 114212 - protein, 181 aa, Oryza sativa
  Clone ID: PAT_MRT4530_17925C.1.pep
MGSVGLAAAFVLRPPPPGADERAASPDRRRCSTRLGVALGRAPQPAEVEPLRRSPPHARAVSPDRSRNIAADSLTRSPDAESGREGDKNELGWVTVVKPLADHMCMPSRLRKPPQSGAKLHAAMRVPRHLASPLTTICEHGDASGVAASTLHETALVTHVLVPPVISYGLVQPKLRPCSQR

SEQ ID NO: 114213 - protein, 578 aa, Oryza sativa
  Clone ID: PAT_MRT4530_17926C.1.pep
MGAGALGVVAMVAAAVVVAMAGANSEGDALSALRRSLRDPGGVLQSWDPTLVNPCTWFHVTCDRDNRVTRLDVSSNDLCGTIPTSGPFEHIPLSKIPATRTLSAREQPTASRSHISSRRGGGALFALLGGSGRLLGCGGGGAFPFNLRGCARRPERGRGAPRRPPFVALLEEDSLVRHCGITTNVSSAPRRPVRILWGISTNVSLAPRRLFVALLKGTRILQCDISANTLRAPLAPSRDTLIDAYKSKLDDGKISEQEPPNCFLTETDYIDAKILRIDSEIEYMKKMLSEVCAFDYRPAIMPILKAYIRDKLRKASSCGVFDQDDRYAEYNKNLDSVNQFQMDQQAGRNQNFVDEGNSSRTKVEKARCFVSDHQASIIEQTGTCTISEEPSAQIDISCTYCGEIVEENSTIVEKEEEIVEENSTSVEKEEWEVVMEAMKRLVASLPPEMVQLPGTMSEDPASKIAFHIIRELSFRQAIKSVNGQRMDTKAVDTGPGALGIAKPASDEKVNAASDKKGNSGRPKRRMLKSLIWALLSSFASHLSMLLLSRYLFGALRRACAWELQNYKALVNMKRRKDE

SEQ ID NO: 114214 - protein, 105 aa, Oryza sativa
  Clone ID: PAT_MRT4530_17927C.1.pep
VLPCQNDYYCLLSFARWVTVVKPLADHMCMPSRLRKPPQSGAKLHAAMRVPRHLASPLTTICEHGDASGVAASTLHETALVTHVLVPPVISYGLVQPKLRPCSQR

SEQ ID NO: 114215 - protein, 359 aa, Oryza sativa
  Clone ID: PAT_MRT4530_17928C.1.pep
MAKPKTSPLHRVIGAARWDAERPLGRLLILAHAAFLDAGFVPAAAAADDNSIRLPRKVGRTASSLPLRYAAPQLLHWPDDAAAVQLRLCAHGRHLVLYVSMARCSMFREWLDTYWVCLDALAAAALLGGALDDTARALRRDARLAALWGALADRLCRRVLVDVCARNGVTLEPTFMSLPDDVKAAILARLPDGDDLARAECTCAGLRRLVADRDRDAALWKPRYEKLPFLLQLIGGGDDDDGEPTTEVSWKKKYVAARLWPFGELFASMRETRRLPIYAPLLDLDFDSFTRFWVFDDKPSPLPEEITVPRHRRRRRRWRAMPRDAGHGLAARGHGGDKKPRHGAGAVHSPSSRFRWKHR

SEQ ID NO: 114216 - protein, 57 aa, Oryza sativa
  Clone ID: PAT_MRT4530_17929C.1.pep
HVPPPPKKKKKKLSLPFLKKKKKKKKKKNKKKKKKKKNKKNKKKKKKKKKKKKKKTP

SEQ ID NO: 114217 - protein, 707 aa, Oryza sativa
  Clone ID: PAT_MRT4530_1792C.1.pep
MKKKKKKLVPGQSLLQGMRLRANTSNTNWTESKLYMTVLSDGLYGYVESTPPQLYYEQTTNKRGKYPTRVTFMNGSLSIFIRTTQAGKPEAIIALPEAKSTQYIRLESDGHLRLYEWFDAGSNWTMVSDVIQKFPDDCAFPTVCGDYGICTSGQCICPLQANSSSSYFHPVDERKANLGCAPVTPISCQEMQYHQFLSLTDVSYFDEGQIIANAKNRDDCKEACLKNCSCRAVMFRYYGQNDSDGECQSVTEVFSLQSIQPEIVHYNSSAYLKVQLTPSSAAPTQNSSSAPTQTSSFALTQNKSNKMKAILGSTLAASITLVLVAIIVVYVRRRRKYQETDEELDFDILPGMPLRLSLEKLRECTEDFSKKIGEGGFGSVFEGKLSEERVAVKRLESARQGKKEFLAEVETIGSIEHINLVRMIGFCAEKSNRLLVYEYMPGGSLDKWIYYRHNNAPLDWSTRCRIILDIAKGLCYLHEECRRKIVHLDIKPQNILLDENFNAKLADFGLSKLIDRDHSKVMTVMRGTPGYLAPEWLTSQITEKVDVYSFGVVLMEIISGRKNIDISQPEEAVQLINLLREKAQNNQLIDMIDKHSSDMVSYQEEVIQMMKLAMWCLQNDSGRRPSMSTVVKVLEGVMRVENCLDYSFFNANSVISVQGNPSTYSAPPHASILSGGRYGLWISRPATAPRTERDGFGDTLGFCQGGD

SEQ ID NO: 114218 - protein, 118 aa, Oryza sativa
  Clone ID: PAT_MRT4530_17930C.1.pep
GATGDRFGRAKASTRLRESVASVGLGGATPSEAGDERALRSTGGDGGEHTASSGNGAAEADGGGGQAVGHHGVRAREATGGAAIWAARLGHAARQRGRAAQTAQARHGRRPRGRGNWA

SEQ ID NO: 114219 - protein, 71 aa, Oryza sativa
  Clone ID: PAT_MRT4530_17931C.1.pep
SSPCVPSHICLRPPLAPSFVPAPSVLCPPILPIKTPTPFFSTIFLSPKSLTIPSFSPHHHKQNPSKPPIKP

SEQ ID NO: 114220 - protein, 59 aa, Oryza sativa
  unsure (1)..(59): unsure at all Xaa locations
  Clone ID: PAT_MRT4530_17932C.1.pep
RCKDINFGKKGVMYINAKIFQITTYFNLVKFRNINGDKFEYKKVKQXMRKGVKDIVWFW

SEQ ID NO: 114221 - protein, 46 aa, Oryza sativa
  Clone ID: PAT_MRT4530_17933C.1.pep
RTHLTYILLLLLVMIIVSTIIRSQMIPHSVYMVYQTVALSMCDVYC

SEQ ID NO: 114222 - protein, 116 aa, Oryza sativa
  Clone ID: PAT_MRT4530_17934C.1.pep
MQQASTTHEELLLEGTGRNSNAYPATLVQSSMGEFLLQLDTSSMAPAVPGCAPWPLPTPAPTPPPLPPPPPTPRAVVRSSSSHRRRCPVVLLASSPPSVTILTLSVSAHLPRVTGT

SEQ ID NO: 114223 - protein, 368 aa, Oryza sativa
  unsure (1)..(368): unsure at all Xaa locations
  Clone ID: PAT_MRT4530_17935C.1.pep
MEVELPWGARRWPWCGCHVCRAYLAGSWRREFANLGDWYADLLRRSPTGTVHVHVLGCTVTANPANVEYMLKTRFDNFPKGRPFAALLGDLLGDGIFNVDGDAWRHQRKMASLELGSVAVRSYAYKIVAQEVEARLMPVLANAADSGPRFLNVGSERELKKAIKLIDGLAAAMIRERRKLGVANSHDLLSRFMASSGDDARGAADDKFLRDIVVSFLLAGRDTVSSALTTLFMILSKNPDVAAAMRAEAGGGAGRAPGGSCWGGEEMDKNEEDDANSNAFRPERWLTRAGGAFVGESVLKYPVFQAGLRVCLGKELAITEMKAVSVAVVRAFDVEVVGXEWPRCGGGAAAAPRFVPGLTASISGGLPV

SEQ ID NO: 114224 - protein, 520 aa, Oryza sativa
  Clone ID: PAT_MRT4530_17936C.1.pep
MDATTTVSMEMELPWGARCAGLAFFAFSVCLAALGVVLLVARRWPWCSCHVCRAYLTGSWAREFTNLGDWYAHLLRRSPTGTVHVHVLGCTVTANPANVEHMLRTRFDNFPKGRPFAALLGDLLGDGIFNVDGHAWRHQRKMASLELGSVAVRSYAYKIIAQEVEARLMPVLADAADRGAVLDLQDVFRRFAFDNICKISFGLDPGCLDREMPVSELADAFDAASRLSAMRGAAASPLLWRAKRFLNVGSERELRKAIKVVDELAAAMIRERQKLGVGSSHDLLSRFMASTGVDDAAADDKFLRDIVVSFLLAGRDTVSTALTTLFMLLSKNPEVAAAMRAEAEAGDGGETGAAITYEHLKGLHYTHAVLHENMRLFPPVQFDSKFCAAADVLPDGTYVGGDARVMYHPYAMGRMPHIWGADYAAFRPARWLTGPGASFVPANPYKYPVFQAGQRVCLGKELAVTEMKAASVAVVRAFDVEVVGENGRSGGAAAAPRFVPGLTASISGGLQVRVRRRVHT

SEQ ID NO: 114225 - protein, 84 aa, Oryza sativa
  Clone ID: PAT_MRT4530_17937C.1.pep
MARPRCEGCGLTFGGPMRRRRELYRAETEPHRRRKLLPRWRGNLVARESYYRVREGTSLPPLLVVLFAAPSSSLRSAMGMSRRR

SEQ ID NO: 114226 - protein, 63 aa, Oryza sativa
  Clone ID: PAT_MRT4530_17938C.1.pep
TCSIHLYLFSLSDTWLVGQVKEHVGSTTSLNPRQTNLMTSWLEATLELHDDIFEYKDVPSTKN

SEQ ID NO: 114227 - protein, 205 aa, Oryza sativa
  Clone ID: PAT_MRT4530_17939C.1.pep
MVSVRTRIRSETIRPFLPDIRIIINRKIQIKTLKKARRRPPHAVASRRRVPAVAVARRTPDPLVAVRRTPSPRAAEPPPSSSPHDVGSRGSRAANPGSGRPEAGVAVRRTHTTSPRAGRRRDPAAPTAARPVTLVAASRKSSPRAAEQPPSPSALRGTAPDVAVAIRRTRPSPRRRRRRRRPPHAGPAPVVASRGSREPGRKGGG

SEQ ID NO: 114228 - protein, 765 aa, Oryza sativa
  unsure (1)..(765): unsure at all Xaa locations
  Clone ID: PAT_MRT4530_1793C.1.pep
MPRFKPEYLFGVEGFVQELHTMSFAIGFGTAPLYAQIPHDRDEEKCRVKVTMNSNSEDIPSVMFEAGGGNYIHACQEVARMAIGELRDRYSDQLADTEYRYHPRQPQGSDRGSYLETVGIENDATTRHLVEMLXAMDETRAETVLAAQDREDQNRGKICKLEDKVDHLEKELAALKGEAPPQKARVRLTARKRALFVPRYQLAPKVRVVEKEVTPALADPPVVNVSNDDKEESKRTHSKIEWGATQDDGDEPNEPSIXLRCPEDLDNGNGPNIINNNNNGENPTLAQVLAQQAQLMNMMMQQLQNQQNQGNNHAPPQNKLAEFLRVRPPTFSSTTNPVEAGDWLDAIEKKLDLLQCTDQEKVSFASHQLHGPASEWWDHFRLNRTIAEPITWLDFTAAFRKMHIPSGVVSLKKKEFRSLIQGSRTVTEYLHEINRQARYAPEDVRTDEERQERFLEGLNDELSYPLMTGDYHDFQKLVDKAIHQEDKYNRMEQKKCRIAHFKAQQGNSQRPHLTLGPQSMSQGGSSSVVRPQRQFFNNNTGNNIRNQAPRLVAALTQQQPAKREQGSKPGVCFNCGEPGHYSDKRPKPRRVKVVPAQSNSTAPASKARVNHVAAAEAQGAPDVILGTFLVNSVPATVLFDSGATHSFLSMSFAGNHGMEVEDLRRPLMVSTPSNQALSLQHSPSVRIEIQGVPFLANLILLEAKDLDVILGMDWLARYKGVIDCANRKVILTSNDGRVVTVHALSSESLRSSLNQMTLEEIPIVQ

SEQ ID NO: 114229 - protein, 28 aa, Oryza sativa
  Clone ID: PAT_MRT4530_17940C.1.pep
LTIKIHALYDVQMCTTMYNWQLERYQQI

SEQ ID NO: 114230 - protein, 83 aa, Oryza sativa
  unsure (1)..(83): unsure at all Xaa locations
  Clone ID: PAT_MRT4530_17941C.1.pep
RXQRLSTCGSYQRTXWEPNNPERGYTTLVPTXRGHTVGDVTWWTTYYSXHGRHCLNSWTGDQYILLFSPSHXVSPVTHQKCHR

SEQ ID NO: 114231 - protein, 55 aa, Oryza sativa
  Clone ID: PAT_MRT4530_17942C.1.pep
QIMQPQLAVKESKSPGWLNVTYPTTNFERKIIHLKGREINYITHRAGGIFFSQTM

SEQ ID NO: 114232 - protein, 465 aa, Oryza sativa
  Clone ID: PAT_MRT4530_17943C.1.pep
MAAAAAGGGDGRWCVVTGGRGFAARHLVAMLLRSGEWLVRVADLPPAIALDRDEEEGILGAALREGRAAYASADLRNKAQVAAAFEGADVVFHMAAPDSSINNFHLHYSVNVEGWICHSCDTDMWDQDTHVSETWCGTKNVIDACIRCKVKRLIYTSSPSVVFDGIHGIFDADESMPYPDKFNDSYSETKADAEKLVMKANGRDGLLTCCIRPSSIFGPGDKLLVPSLVTAARAGKSKYIIGDGSNYYDFTYVENVAYGHVCAEKTLSSEDGAKRAAGKTYFITNMEAIKFWEFMSLILEGLGYERMSLRMDSEGYILYIYEFINYHCTNALELCGRPSIKIPVSVMMPVAHMVEWTYKTFARYGMKIPQLTPSRIRLLSCNRTFSCSRAKDQLGYEPIVSLKVVFSLLVVSILSSMSSQSAFKIGFKAYEKWEDTIDDLVGNACSVVTHFVQGQKSSRQKHADN

SEQ ID NO: 114233 - protein, 436 aa, Oryza sativa
  Clone ID: PAT_MRT4530_17944C.1.pep
MDPKAAAKAKRSHTVRGRRAHQTPAAAAAHRQKRAEAAAAAASASGPRGRNLPSNWDRYDGEDDADESAAPSEWTGEVAPRSKGADFGFLLEQARAQPREAQRLSSQDSPFDFMQASTSMLEAKGEEILSWCEDDNFILEDDLAPDFEVPFLSMDLHALATHLSKLKLSERLFLEKDLLPEDLVCLQCSLSMLWLIFAAGRWFIKVFDLLVFILAVASEVNQIQIQRGTDVDSDAKGSLIHDHDSIRCDDQMKADCQLKCFEEDKSTSSPKTSSHSVHLDTGEDNNNSEGAKFEVVAAEEELDMLLNTLGGTHLSGSNLDESFGNKSTLQDVKVNQPDKKVTPSTSSKSSNEGFAEPGSTSKNDHNIDIRYANQIDISTSIDDLVDDLLTDTSLCLNGQKQTTSAKGKDNISSVSVPPNSGPSNASDDFDSWFDSL

SEQ ID NO: 114234 - protein, 207 aa, Oryza sativa
  Clone ID: PAT_MRT4530_17945C.1.pep
MASRVVSIQMVMFNVGVCSNWVLEMEDIKGARRPESHPPCVDDAQMKTPTRNVMHIHGAQVSDEMVPKFGMEFESYDMAYAFYNKYAEHAGFDVRKSRSRKAANVREENADDISKLLKFFNECKKDNPKFYWDIKTDEEGVVSPPPVRPSSSPGHRRLSSSASVAMLAGTGGEGGRDGVGSARVSGCPAARFTAAQEGTAHCPLGVG

SEQ ID NO: 114235 - protein, 547 aa, Oryza sativa
  unsure (1)..(547): unsure at all Xaa locations
  Clone ID: PAT_MRT4530_17946C.1.pep
RWRALAVRHRGGMLLRSGAWLVRVADLPPAIALDRDEEEGILGAALREGRAAYAPTRLRNKAQAAAAFEGADVVFHMAAPDSSINNFHLHYSVNVEGTKNVIDACIRCKVKRLIYTSSPSVVFDGIHGIFDADESMPYPDKFNDSYSETKADAEKLVMKANGRDGLLTCCIRPSSIFGPGDKLLVPSLVTAARAGKSKYIIGDGSNYYDFTYVENVAYGHVCAEKTLSSEDGAKRAAGKTYFITNMEAIKFWEFMSLILERLGIKXYERPSIKIPGRVMMPVAGMVKWTYKTFARYGMKIPQLTPSRIRLLSCNRTFSCSRAKDQLGYEPIVSLKDGLKRTIESYPHLQAQNQRSISKASIFLGNGNLAKTVLWEDMKQTMTVLLLLAVIYYHLFTCGYTFITAMAKLFSLTTLFLFIHGILPANVFGHKVEKLEPSNFHITQVEAHHIAHSVSSTWNSLVGVLKSLCRGNDWPLFFKVVFSLLVVSILSSMSSQSAFKIGISMAFLGFKAYEKWEDTIDDLVGNACSVVTHFVQGQKSSRQKHADN

SEQ ID NO: 114236 - protein, 56 aa, Oryza sativa
  Clone ID: PAT_MRT4530_17947C.1.pep
CSHFQSGPRTVRYSDCDDTGHSTSMVGDINAYTLNNGTRLCKQGRVTCYTLELRAA

SEQ ID NO: 114237 - protein, 147 aa, Oryza sativa
  unsure (1)..(147): unsure at all Xaa locations
  Clone ID: PAT_MRT4530_17948C.1.pep
WWKKNCDKYFLMFHTPYTTWKDYSTMYFTGQAKMWLQSVENKVESMNWDEFCDFVCLRFGKXMQYQALIRRLTHVKQTGSVQDYIENFKTLMHQMLAHNLNIDPEIFTTTFVXGWVKXEIRRVVLIQRPADLDTAGSLALRDRNEMT

SEQ ID NO: 114238 - protein, 92 aa, Oryza sativa
  Clone ID: PAT_MRT4530_17949C.1.pep
SVPSATASRATIHKAESLPVSLESATPTKRTRERREGGKNRDERRARRQEPGAAERDAVGPGGAGRRRLRLPLLPRRLQALTRPRPGGHGRQ

SEQ ID NO: 114239 - protein, 801 aa, Oryza sativa
  Clone ID: PAT_MRT4530_1794C.1.pep
MDGHPSPRSHHQPPPPERDGSFNYDIESMDGGGGAWRGRYESSEVLLRYDDEAGGGPRQPLLRKRTMNTTSQIAIVGANVCPIESLDYEIVENDLFKQDWRSRKKKQIFQYIVLKWALVLLIGMLTGIVGFFNNLAVENIAGLKLLLTSDLMLKQKCRYFTAFLAYGGCNLVLATTAAAICAYIAPAAAGSGIPEVKAYLNGVDAYSILAPSTLFVKIFGSILGVSAGFVLGKEGPMVHTGACIANLLGQGGSRKYHLTWNWLRYFKNDRDRRDLITCGSAAGVAAAFRAPVGGVLFALEEAASWWRSALLWRTFFTTAVVAVVLRGLIEFCRSGKCGLFGQGGLIMFDLSSTIPTYTAQDVVAIIVLGIIGGVFGGLFNFLLDRILRAYSIINERGPPFKILLTMIISIITSACSYGLPWLAPCTPCPADAAEECPTIGRSGNFKNFQCPPGHYNGLASLFFNTNDDAIRNLFSSGTEKEFHMSTLFVFFTAIYCLGLVTYGIAVPSGLFIPVILAGATYGRIVGTLLGPISDLDPGLFALLGAASFLGGTMRMTVSVCVILLELTNDLHMLPLVMLVLLISKTIADSFNKGVYDQIVVMKGLPFMEAHAEPFMRNLVAGDVVSGPLITFSGVEKVGNIVHALRITGHNGFPVVDEPPVSEAPELVGLVLRSHLLVLLKGRSFMKEKVKTSGSFVLRRFGAFDFAKPGSGKGLKIEDLDLTDEELDMYVDLHPITNTSPYTVVETMSLAKAAVLFRALGLRHLLVVPKTPGRPPIVGILTRHDFMHEHIHGLFPNLGKSH

SEQ ID NO: 114240 - protein, 78 aa, Oryza sativa
  Clone ID: PAT_MRT4530_17950C.1.pep
IKCGVQPKYLLSNGKSLNFLKTANFFRPILKQKKYTIKTVGQQTNFAWIYFPRFIIQFFHTFRANFLSTKTSFFKVVS

SEQ ID NO: 114241 - protein, 504 aa, Oryza sativa
  Clone ID: PAT_MRT4530_17951C.1.pep
MVGADAESSAVVDAGEGHGDLALDSSSAASTDPLLHPPPSPSSTPSSPTAIADHDAFIEEDGEDDSAPHVPSASDEAAPEFVQITVSEPKKHAEPAAGAAGVIPGSGSYFSYLITTRAADGGLFRVRRRFRDVVALADRLAAAYRGLFVPARPDKSIVEGQVMQRHEFVNQRCAALQRYLGRLAAHPTIGRSAELHDFLTEPSGIPTSAGESPRSDPALSAAMSAAAVTAPTAPAKPGRDIFGMFKDLKQTVANGLVAVRPPPVEEETDAKFVMHKAKLEYFEQHLTTASQQVEALLKAYDDLKATTGQLGMTFIKLAKFEKEQDTCNSQRKRAVDMSNFANAVINMSRSQTKLNAKIEIHLGTIYEYLETMTSVRNAFTDRANALLRVQSLSGDLFLLHTQAAKLESVSSRGMGQERLRYQKIEELKETIRKTEDAKGNARQEYELIKENNMNEIIRFNKEKRHGLVEMLKGFVRNQVSYSEHISSIWTKVAEETTGYTGKGS

SEQ ID NO: 114242 - protein, 171 aa, Oryza sativa
  unsure (1)..(171): unsure at all Xaa locations
  Clone ID: PAT_MRT4530_17952C.1.pep
KPPIYHRDIKATNILLDSDMRARGGDFKLTRRSQXGQSHLTTRVVGTHGYLAPEYALYGQLTEKSDLYSFSVLVLKVLSARHVLDMSAPSDPVLITDWARTHVKAVQAREVLDGALSTADSPRSGSMERIVLVGILCAHIMVALLPTITEAVNMLEGDMDILDLSDRPFAY

SEQ ID NO: 114243 - protein, 106 aa, Oryza sativa
  Clone ID: PAT_MRT4530_17953C.1.pep
YPVAQARSMNKVLVANQHKASTLDPLLECLTGVEPARTCPSAKPTCIKNLPGDDEMSPQRWWFVSSSAGLYPYKYADHKLFFIHLCCVKDSSHGTHLHMPHTPGRE

SEQ ID NO: 114244 - protein, 450 aa, Oryza sativa
  Clone ID: PAT_MRT4530_17954C.1.pep
MLPPPAAAAAALLLLLALSAGANDIASDAAALQAFIAPFGSATVSWNTSQPTCSWTGVVCSGGRVVEVHLPGVGLRGNVPVGALGGLDKLAVLSLRYNALSGPLPSDLAKCAELRVINLQSNHFSGELPPEILALPALTQLNLAENRFSGRIPASIAKNGRLQLLYLDGNLLTGELPNVNMPLLTSFNVSFNNLTGGIPSGLSGMPATSFLGMSLCGKPLAACRTPISIPPSQAPALSPEGAVSAVGRGRGGRRLAGGAIAGIVIGCALGFLLVAGVLVLACGALQRKPRPHHSRDVAAELALHSKEAMSPSVYTPRVSDARPPPPPAAVVPAIQPAVAANVAGKKKLFFFGRVPRPYDLEDLLRASAEVLGKGTYGTTYKAALETGPVVAVKRLKETSLPEREFRDKVAAIGGLDHPNVVPLQAYYFSKDEKLMVYEFVAMGSLSSMLH

SEQ ID NO: 114245 - protein, 143 aa, Oryza sativa
  Clone ID: PAT_MRT4530_17955C.1.pep
MEMAVSGITAQLSTGLAILSVGAAHDKGKELTVIDVDVNVGGGRVRSNWWEKSRAARSGNPGRADAFSGARDDTSAPTSAERDEEAEKPPRSHAVSAGGRRCTTLPPRARPACREAEVNISKMTKITNIVQVADWAGSQNTAR

SEQ ID NO: 114246 - protein, 88 aa, Oryza sativa
  Clone ID: PAT_MRT4530_17956C.1.pep
MPLRIEMSSNSCSIIRSRWQQPWHMSPLGFDWRGSSSRVEIPPGTVGSAVLDLQYANMIITTERQLLETEAEERWSGTTRRRALQAML

SEQ ID NO: 114247 - protein, 246 aa, Oryza sativa
  Clone ID: PAT_MRT4530_17957C.1.pep
MAALAPRGGALSCSTSTPSSAAAASSGSATPDPMVGKAAAVDPTIGRAAPTDPEDGSGDGGGDRLGSGGVGGLSGTGSCGGEGGGGGSDDGEGCADGSGGGPTVRRRPRSSPASTPCSNPDAVLALLSTGLCADLAAVVVAEPRVLCAKDDAISRRIASLRDRAGLSLSLSRADLATVVVAKPQLLCAKAEAITRRIASLRDRAGLSVPQTSSFLLSGGMAHLGGRDGAGRREMHLYMLRKCEIQG

SEQ ID NO: 114248 - protein, 265 aa, Oryza sativa
  unsure (1)..(265): unsure at all Xaa locations
  Clone ID: PAT_MRT4530_17958C.1.pep
GGGRQLGRQWRACRRRRXQARQRQWRQARATEVGGRLGSGGAAAVDPTIGRAAPTDPEDGSGDGGGDRLGSGGVGGLSGTGSCGGEGGGGGSDDGEGCADGSGGGPTVRRRPRSSPASTPCSNPDADDAISRRIASLRDRAGLSLSLSRADLATVVVAKPQLLCAKAEAITRRIASLRDRAGLSVPQTSSFLLSGGMAHLGGRDGGCMVKQCKQNVKIHCIRRRREYWGTSCSGKEGNAFVYAAEVRDPGVGVKTKIFSELPEML

SEQ ID NO: 114249 - protein, 196 aa, Oryza sativa
  unsure (1)..(196): unsure at all Xaa locations
  Clone ID: PAT_MRT4530_17959C.1.pep
AHRSFPGSGTAAPSPPRSRVPAHALSWCTPPPSFAEDGKRRLGVAPTADEVQAARRSSPERNGIRREGFGDDWSRPLDWTAQICLALGRRCYXLRCAQWAAEVHRTVPAYVGRAQPLSLRAVELTQLADDGPAQVWACLGRPGPKVNLIKQYXLTFFKLKSVGXLLSRLDIYLSRFININMNVENVRMTYIVKRRK

SEQ ID NO: 114250 - protein, 334 aa, Oryza sativa
  unsure (1)..(334): unsure at all Xaa locations
  Clone ID: PAT_MRT4530_1795C.1.pep
HMISAKGVVVDPEIVTAFTDWKQPKTVTQVRNFLGLAGYYRRFIENFSKIARPMTQLLKKEEKFVWSLQCEKAFQTLKEKLVSSPVLILPDTRKDFLVYCDASRQGLGCVLMQEGHVVAYASRQLRPYEGNYPTHDLELATVVHALKIWRHYLIGNHYEIYTDHKSLKYIFTQSDLNLRQRRWLELIKHYDVAIHYHPGKANVVTDALSRKSRCNTLGVRGIPPELNQQMEALNLSIVSHGFLAILEAKPTLLDQIRDAQKNDPDMHGILKNMKQGKAAGFTEDEHGTLWNGNRXHQRPAGLLQPLQVPEWKWDEIRMDFITGLPKTQGGEDLG

SEQ ID NO: 114251 - protein, 146 aa, Oryza sativa
  unsure (1)..(146): unsure at all Xaa locations
  Clone ID: PAT_MRT4530_17960C.1.pep
RAPPGAQAPAGEPGTRREXXXARQPKAKKXENXXHGPEREEXAXKXAASXDTXHXQTSXGXXFXIXFPILFIINAHDIRGHHVAFLASLISPSXIFDHISVIFALPKLXIDYFTLELTFFXTGFFDRXXEEGDXXTAXTLARVLWM

SEQ ID NO: 114252 - protein, 251 aa, Oryza sativa
  Clone ID: PAT_MRT4530_17961C.1.pep
MAMVARRFLVAAAAVCLALAAVPAAMGQAAAPAPKGAAAAALNVTAILEKGGSYTTFIRLMKSTQQDTQLNSQLNGTSTGFTVFAPTDGAFSSLKPGTLNSLSAQDQVSLVQAHIVPKFYSMDAFDTASNPVRTQASGGDGPYTLNITATSTNQVNVSTGVVDTTLGTALRADQPLAVYSVDKVLLPYALFGPKPPPSPPPAPSKKPAKGDTSASAEAPAGSADHPAGAAPAAARAAGWGVAALLAAACLL

SEQ ID NO: 114253 - protein, 90 aa, Oryza sativa
  unsure (1)..(90): unsure at all Xaa locations
  Clone ID: PAT_MRT4530_17962C.1.pep
FQKRFPPXHVAFLTRFFQNSPNFWGPLLEACKPPFFDGLRDPTPVLPKGGPFPPFFSFRTQKLNGFPPEAIEGLVPEHSKRQSLFMALGP

SEQ ID NO: 114254 - protein, 78 aa, Oryza sativa
  Clone ID: PAT_MRT4530_17963C.1.pep
MAVCSEVGPNAVSHLTWGTSPVIPSLSLEDFCGLMIPGAHWTGAPSSARPAATWQLSGGLGVAQPFGPEGCDGIPRGP

SEQ ID NO: 114255 - protein, 104 aa, Oryza sativa
  Clone ID: PAT_MRT4530_17964C.1.pep
MAVATATGGRREAAEEGASAAGSARCRRIRSRLPPPPPPPPEEGERGRREPPPLWAAAALPTTAAEGRAQPSLPMLPPAAAGPHRLHLPPPPLLRRRRDSVKEQ

SEQ ID NO: 114256 - protein, 90 aa, Oryza sativa
  Clone ID: PAT_MRT4530_17965C.1.pep
SNFVQGSAKVPRSTSVIGNVGRMSEGAPVQHIEKWIWRHLMGEIDSEDLLWWIILEESSGHWSAIKIELSWVQPAKVIFLGDVLGLLLKC

SEQ ID NO: 114257 - protein, 221 aa, Oryza sativa
  unsure (1)..(221): unsure at all Xaa locations
  Clone ID: PAT_MRT4530_17966C.1.pep
VQTKNHVRIDTPCDKTDKLFFAXTKLIISDGNTVHFWDTAWIEGQKPXNIMPLVYTIKKGGKXSLREXHEEDLNGKTHLAVDLINQLVSLWNATQGIHLEXNEVDQIVWKLTNHEKYLTLSAXKTQCLGIIGTNFNTLMIWRAWXPAKSKFYQNSVWISDRLTTRSWXQTNNGHCPLCHRKNESIYHLFLHCHFARFLWRSIQFTFGLYPPHSISHMFGNW

SEQ ID NO: 114258 - protein, 118 aa, Oryza sativa
  unsure (1)..(118): unsure at all Xaa locations
  Clone ID: PAT_MRT4530_17967C.1.pep
TLSFTLVFFGRDTFSRKKPIQTAYDIPYLPINITFSRLGERLLHRMRIPPDPLKILAAILSNIYKEFSAXSNDIDPYFQALHTKWIDYLEANTIYDILLKLTPESLNIFGPLSSAHGS

SEQ ID NO: 114259 - protein, 172 aa, Oryza sativa
  Clone ID: PAT_MRT4530_17968C.1.pep
MASSTSLQRFLPPSPPPSCGGIPPPPSRRPRPPHPVVDGVRAVLLDTSGGRGHVGGAAGATGGAAGGPILGAQGEVPGWAEPVGEDRPDSVALSSWPPDLRRRGEWQGPGGWWDPVRIEGAAGSGREADDGFGREVGTREVISPLKRRRLGHPDSTGFKRTSPLIQKVPQSP

SEQ ID NO: 114260 - protein, 101 aa, Oryza sativa
  Clone ID: PAT_MRT4530_17969C.1.pep
PASHVRGCYLHTSTQQNTGGEVMVYSPKPYHIKGCKNDDAGLAKGTTPGKEERLEQLLEHKDSGDLMLNEKNRTGLNHDENVKLNKEPTLLPMEGYFIELE

SEQ ID NO: 114261 - protein, 243 aa, Oryza sativa
  Clone ID: PAT_MRT4530_1796C.1.pep
MAFHLRSASVPSSPRSNEIDIEGQLQNLKAIVSSSSSTIETMSNGLKRIGNIYSCINEIMCLPSSHVAICQPLQRKAVEQELERSLILLDFCNAMQESFSNLKQSIQDMQLIMKRGDNAAVQVKIQSYICLIKKAQKQFRKISKKSSSVDLESCRVVKLLAEAREIAILMLETSFHLLSRQLAMPSSSKWSLVSKTFKKRALFCQEEQLQVLESNIADLDTGVKNLFRKSIQSRVSLLNTLSL

SEQ ID NO: 114262 - protein, 349 aa, Oryza sativa
  Clone ID: PAT_MRT4530_17970C.1.pep
MAKPSLLLLLPLLIFSIGAALARADLMLDRFEQWMIRHGRAYTDAGEKQRRFEVYRRNVELVETFNSMSNGYKLADNKFGDLTNEEFRAKMLGFRPHVTIPQISNTCSADIAMPGESSDDILPKSVDWRKKGAVVEVKNQGDCGSCWAFSAVAAIEGINQIKNGELVSLSEQELVDCDDKAVGCGGGYMSWAFEFVVGNHGLTTEASYPYHAANGACQAAKLNQSAVAIAGYRNVTPSSEPDLARAAAAQPVSVAVDGGSFMFQLYGSGVYTGPCTADVNHGVTVVGYGESEPKTDGGGAAKGGEKYWIVKNSWGAEWGNPGYILMQRDVAGLASGLCGIALLPSYPVM

SEQ ID NO: 114263 - protein, 435 aa, Oryza sativa
  Clone ID: PAT_MRT4530_17971C.1.pep
MDSAILRHLIEALLERQPILGEDSTFLRRALVFGGVASIISPVHLESFFTRYGVVIATVLLRDATRCERVGMLVFSAESDCLYAAEMEAARPGAYLMISRILRRDFMSKFSVFLVLISELASADECSCFSRFVHVLILSVPVDDEILHNSVNLVKDAADQQSQRCSTAEAFRRMVPWRYLKADAQEDINLRCLLLRMGARSTATPGDLYGVASHSCLPTQQACVTNDFTTPVFSVLPPHSSCDGAVFKRTSPLLDPTAMASWRLPTRKGVLPVTGDRYLGFYPIRGQPLGRAILISYQKMAFESAPLKKMANSSKSPSREAMVVFDESRDMERCGSRSAELVAFHLGLYDSGLFPLVADGAGGHGVVTRDLLPLFCLSPDFLGRVALLRGPGIAELDAGECSIIPLDVHAWWLHIAVSVQCCFLDKTVELINSKL

SEQ ID NO: 114264 - protein, 153 aa, Oryza sativa
  Clone ID: PAT_MRT4530_17972C.1.pep
AGGVAKREGGFPTLKGARGPKKETRVGLGDLGGGSPKAKAPEGAKVIRWAMDPPRLYVPPAGAGKGKSPKKVAPRGEEGKGQSGNRVRTVGKGGGEKENLFKARDRKRKEFFIQNPVLNPGVFPLLIQACWDSGVLKVFSPVIPQGDFGPERK

SEQ ID NO: 114265 - protein, 587 aa, Oryza sativa
  Clone ID: PAT_MRT4530_17973C.1.pep
MGWWGEPAALHSERGFPVEGDCGTDTAGILLEMGGYEYATNGYHRGMEDDYEDEYYSEDPYDEEGEGAGQEYAEEDDEPPEGQQEFLQIRERLKEQIRRKAQAASASAAGRSSSSHDRKPQSTFGSFFGPSKPVISQRVIEERKSLKELQNTASMSRDRRPSAKEIPSSSKVQSKTNGHHHKQKIVNEAKRKAEALKDNRDYSFLLSDDADISPSPMEKPVARSSLSQKSDRESTHSAVKSRAPTGQTARLSNGYGLKNTSSSQRHTEGRVDSNRKVAGANRERVVLPDNGRMHSVVRNGSTQATTSKAASQKLPSKAPIANRPPIKSVSDQSLRANHSASKQLLSQNGRPQSSQSQRMQSTSHGQRPHQPVQSQWPLQSLQGRRPQQSPQNTRPQLMSKSQRPQQSLQRQRPQLSSQNERLESSERQRPPSQSYRPQSSQGQRPSSVQGRQYSEQRRIQANDRVKSAERQIRPPSKPMPSRQIPSNGMRDAHAKKKQPMKRRFNDLSEDEEDPLAMIRSMFRYDPSKYAGRDDDDSDMEADFATIEMEEQRSARIAKEEDDEQLRLIEEEERREQERKRRKMARGR

SEQ ID NO: 114266 - protein, 150 aa, Oryza sativa
  Clone ID: PAT_MRT4530_17974C.1.pep
LRPPPPPTPSGARFAPATPPGRAAGIRPPAGRPSSSSSLVPRRPRRLFLLIQPAASRAAPGGIEFESAPSPSSSPPPPPDNPAPAPSVLPPARGIAGLIRPGSCWKWGVTSTRPMVIIGEWRMTMKTSTTVKIHMMRKGRVLVKSMPRRM

SEQ ID NO: 114267 - protein, 63 aa, Oryza sativa
  Clone ID: PAT_MRT4530_17975C.1.pep
NKRDIFLWILLPQGMNHEYDLVEQFAHVPISTYICNFLEEPRKFFLDAYKKKLKGINRNAHAL

SEQ ID NO: 114268 - protein, 54 aa, Oryza sativa
  Clone ID: PAT_MRT4530_17976C.1.pep
GRRRQLWWKLTGVRGDASSGDGIGRENGGRGGPRDGGRGGADGGVASSSEWWLH

SEQ ID NO: 114269 - protein, 69 aa, Oryza sativa
  Clone ID: PAT_MRT4530_17977C.1.pep
HNSSGSRSPGLGEHWSRPTDSDTDRQSTSRTPADFLCSNCERGHSELAFSSWMSAPFVVLLFISESSIL

SEQ ID NO: 114270 - protein, 52 aa, Oryza sativa
  unsure (1)..(52): unsure at all Xaa locations
  Clone ID: PAT_MRT4530_17978C.1.pep
MXSSPXXSPGTATPATAAAAPSTXTPTPXTQPNATPADPSIXPPAXSPPLPS

SEQ ID NO: 114271 - protein, 60 aa, Oryza sativa
  Clone ID: PAT_MRT4530_17979C.1.pep
NSNEQTKVGITTVYQSQRIKGSQNHNLYFNFYASANHWKIQEYIQLRVQILKTSGNRPHK

SEQ ID NO: 114272 - protein, 606 aa, Oryza sativa
  Clone ID: PAT_MRT4530_1797C.1.pep
MIAMTPLGLLLVLLVLCSSILVAHGGDAAAGAYMVIATSTMKPKTFCSGHKVAPGDVPSPNSTWAPLHHLYGPCSPAPSSANSTAADVAASMADMVDDDQRRADYIQKRLTGATDDKQPMAFSSRTSQYEKNGQYATNGGLGSVPHLKSLSTTATTNSAPDGTSAVTQTVIIDSGSDVSWVQCKPCPLPMCHRQRDPLFDPAMSTTYAAVPCTSAACAQLGPYRRGCSANAQCQFGINYGDGSTATGTYSFDDLTLGPYDVIRGFRFGCAHADRGSAFDYDVAGSLALGGGSQSLVQQTATRYGRVFSYCLPPTASSLGFLVLGVPPERAQLIPSFVSTPLLSSSMAPTFYRVLLRAIIVAGRPLAVPPAVFSASSVIDSSTIISRLPPTAYQALRAAFRSAMTMYRAAPPVSILDTCYDFTGVRSITLPSIALVFDGGATVNLDAAGILLGSCLAFAPTASDRMPGFIGNVQQKTLEGCSANAQCQFGINYGDGSTATGTYSFDDLTLGPYDVDRQGLPLRTATQYGRVFSYCIPPSPSSLGFTGFGVPPQRAALVPTAVACPASSATCRQKTLEVVYDVPRQGHAIAGPPALLSANSNLLASPN

SEQ ID NO: 114273 - protein, 67 aa, Oryza sativa
  unsure (1)..(67): unsure at all Xaa locations
  Clone ID: PAT_MRT4530_17980C.1.pep
ACAPAAKKRSRAHSHITAWYTLGKGRRLITTSSTPHESEKPIPTAAVWKSDDXIAAREAADAIDPPR

SEQ ID NO: 114274 - protein, 33 aa, Oryza sativa
  Clone ID: PAT_MRT4530_17981C.1.pep
EGECAHIHLLHSECLTIDVCILQDIAISYILQL

SEQ ID NO: 114275 - protein, 397 aa, Oryza sativa
  Clone ID: PAT_MRT4530_17982C.1.pep
MAESLLLPVVRGVVGKAAGALVQSVTRMCGVDGDRHKLERQLLAVQCKLSDAEAKSETSPAVKRWMKDLKAVAYEADDVLDDFHYEALRRDAQIGDSTTDKVLGYFTPHSPLLFRVAMSKKLNSVLKKINELVEEMNKFGLVERADQATVHVIHPQTHSGLDSLMEIVGRDDDKEMVVNLLLEQRSKRMVEVLSIVGMGGLGKTTLAKMVYNDTRVQQRFELPMWLCVSDDFNVVSLVRSIIELATRGNCTLPDRIELLRSRLHEVVGRKRYLLVLDDVWNEEEHKWEELRPLLHSAGAPGSVVLVTTRSQRVASIMGTVPAHTLSYLNHDDSWELFRKKAFSKEEEQQPEFAEIGNRIVKKCKGLPLALKTMGGLMSSKKRIQEWEAIAGSKSWED

SEQ ID NO: 114276 - protein, 79 aa, Oryza sativa
  unsure (1)..(79): unsure at all Xaa locations
  Clone ID: PAT_MRT4530_17983C.1.pep
VQSTKTWQPSIPPSFSVVCLFLLCNGSLAQLXLSQSTNQWKRSPPXKSKECXFDRLQAFEPIGTVRSQAGXTEFFDVLM

SEQ ID NO: 114277 - protein, 121 aa, Oryza sativa
  Clone ID: PAT_MRT4530_17984C.1.pep
MEGTGESGGKRKYVEGSAGMLYRGSGETDVAKALPISPATWEVEGLGGELQGVTYGHEHGGNGLQLHAVIHACLCHDELPTEIGFGSMMLELISADSIGSDTGTTIVRNFFGMAALRLANF

SEQ ID NO: 114278 - protein, 340 aa, Oryza sativa
  Clone ID: PAT_MRT4530_17985C.1.pep
MAMKSTTISSLVASGELLVQWHAHYRAVRCLALYDFLLISGSEDGSIKVWDLLTMLDEQSRLEAKTQHIYSFNQHALPVTDVACCHGAIAVSSSEDHTCKIWSLSEGRMLRSISFPSITDSVALDPRSHIFYAGGRDGKIYVTAMGIDVTSPSSDDSTINGALDDHSKAVTSLASSTDGLILISGSEDVHVDKPVDICPSYTQRLMSESIETHGPWNTYSGMMGPVTNVLLVTPKRVNLPPLQSLRKVCSANGGSESRAVIVPQPENDVQIFGNFSSDFLERCLDALQQPGSSSRLFESGASALYGAPKQQGVEWRSKYLELQDLFVREVLDQMPSPKNT

SEQ ID NO: 114279 - protein, 72 aa, Oryza sativa
  Clone ID: PAT_MRT4530_17986C.1.pep
YLLLRGSSRGSSIMGTALVPRQTAANCRGYRCASGHQLRRHGGAERRYAVGYIKCIGMPSRLNGRTGYVKRT

SEQ ID NO: 114280 - protein, 105 aa, Oryza sativa
  Clone ID: PAT_MRT4530_17987C.1.pep
VKYSTVCSFQNKSMSPRCDVLLCTISKSMALHICACLMLCLCVNLFYFPEYLIHIALDTLTLCWWHLKEGKTWAALIMEQGSVAEKKHTWESEITGTLSIPVLLG

SEQ ID NO: 114281 - protein, 86 aa, Oryza sativa
  Clone ID: PAT_MRT4530_17988C.1.pep
EVSFRGKFFFFWNLGHWGLFLKKKVFFPGPVGWLCVKPCLGQSAFLNKKCFNMLKRIPILKSLYLVPHQLKQLAGKHFYHALFKKK

SEQ ID NO: 114282 - protein, 116 aa, Oryza sativa
  Clone ID: PAT_MRT4530_17989C.1.pep
MHAPWEETKKSHPWWQVADVDGLASLVAERAMENIVNNDLPRPTQTVRVHGPQVKGPENKDDYGMSVVSGGQEPDPVHDTMECSYSDASERAKLLDALRHSQTRAREAEIAAKKAY

SEQ ID NO: 114283 - protein, 48 aa, Oryza sativa
  unsure (1)..(48): unsure at all Xaa locations
  Clone ID: PAT_MRT4530_1798C.1.pep
TPRRQQVLQPIQQTQGGNLNYQYQPPSPQIXYQQGGSAQPQFAPQQRP

SEQ ID NO: 114284 - protein, 236 aa, Oryza sativa
  Clone ID: PAT_MRT4530_17990C.1.pep
MASSNGEQPPESPKEANAAPVAAKLAMASGRDGCERLKDLAEGISATDQQASGAVYSLSLLEGLTLDSDQNSALHVVAASGDSQAWEPLLALAAAAPARDSSGAARVDDQELLARRKNKVGETALHGAVRAGHSKVVEVLMKEDPGLAGVDRHDGTSPLYLAVSLGRFEIAWDLLDMSSRKLSYSGPDGQNVLHVAVQHPQGKEGCVTEREGEEEQVAGGLPLLPANNGMHPRPKP

SEQ ID NO: 114285 - protein, 173 aa, Oryza sativa
  Clone ID: PAT_MRT4530_17991C.1.pep
MGGVHGFSLDWPQWTTGGKKDRKGKEYRGVHAVMQQHDQLVVMAASPAAPEAERLTAAGVAKEELVAAVRIQAAEVMRVAAPRRGEGQHVLLGTAGETRAAPQGLADAVDVDGLKRADDERPPAGSMTTPPRRPRPVGANTALQRLQLPPPMATTRRRADDAAAVDLEWTRMV

SEQ ID NO: 114286 - protein, 271 aa, Oryza sativa
  Clone ID: PAT_MRT4530_17992C.1.pep
MASSNGEQPPESPKEANAAPVAAKLAMASGRDGCERLKDLVSREDDATTMVVAMATSKNVDDTRRPPPPRAEGISATDQQASGAVYSLSLLEGLTLDSDQNSALHVVAASGDSQAYVECARMVYDQARHLLGAANNNGDTPLHCAAAAGNHSSRWLLLRLRVTAAVQRGKVVEVLMKEDPGLAGVDRHDGTSPLYLAVSLGRFEIAWDLLDMSSRKLSYSGPDGQNVLHVAVQHPQGKEGCVTEREGEEEQVAGGLPLLPANNGMHPRPKP

SEQ ID NO: 114287 - protein, 111 aa, Oryza sativa
  unsure (1)..(111): unsure at all Xaa locations
  Clone ID: PAT_MRT4530_17993C.1.pep
TRAFDREHGIYRTFQGAQKGGSKTLXXMAESXXMTQGMLTKPSTATPPAXXKDRATPEQRTDYTLKLLNRTIRTAGPCIMPVVGRQSXEDATQNRNAXXQGPNPCHVSVLG

SEQ ID NO: 114288 - protein, 336 aa, Oryza sativa
  Clone ID: PAT_MRT4530_17994C.1.pep
MEWVRVLEEGVFRFDASGAARAAAAPSFSFAEPRRREAAREGADTPAVVPACHVVGDAQKVLIKLPAGTSFYGTGEASGPLERTGKRVFTWNTDAWGFGPGTTSLYQSHPWVLAVLPDGKALGVLADTTQRCEIDLREESTIKFSAPSAYPIVTFGPFNTPSEVMSSLSHAIGTVSMPPKWSLGYQQCRWSYDSSEKVLKVVRTFREKGIPCDVVWMDIDYMDGFRCFTFDSSRFPDPKSMVDDLHSIGCKAIWMLDPGIKKEEGYFVYETGSENEVWIQKADGSPFIGEVWPGDCVFPDFTCKRTRTWWASLVKDFISNGVDGIWNDMNEPAVFK

SEQ ID NO: 114289 - protein, 75 aa, Oryza sativa
  Clone ID: PAT_MRT4530_17995C.1.pep
MAVEQTSGLMSGPCPKAVNSGSTTTASAARPARKTLITSSLPAPWLLLPGAFFLLCCWRLWNHRNEVVFQHLAPS

SEQ ID NO: 114290 - protein, 66 aa, Oryza sativa
  Clone ID: PAT_MRT4530_17996C.1.pep
CLPPSSDLPACRALNPQYHSQHQHRNDLPLQVYPWVSGRRFYFRSPLIRSSFPCKPPPKSIPIQIP

SEQ ID NO: 114291 - protein, 65 aa, Oryza sativa
  Clone ID: PAT_MRT4530_17997C.1.pep
TRPVDCDMYSNNSESIRDALCFFLDEEQGQDIGFVQYPQNFENVVHNDIYGHPINVVNEVSSKIA

SEQ ID NO: 114292 - protein, 317 aa, Oryza sativa
  unsure (1)..(317): unsure at all Xaa locations
  Clone ID: PAT_MRT4530_17998C.1.pep
SLLPNTAHLSEDHMAKPLGSADLGQHWHTLITLLPVLRAHSTMKIGDGCRTNFWLDVWLTDKPLSIEFPALFSHNTTTHLTVRSALHAGLNLPLVPRLSTVAQQQLHLLQDLLQDFPLSQDQDTIQSSISCRSCLISTXSPYCKTMESQQLWPPXGIHLGKSSAPPIVKFFGWLISMNRLPTAVNLHKKSIIPSPTYQLCNTCPEDTDHIFLACPLASASWGLIQVLHMLTSLSEIHTIHWSGDLPERLNSTFFLLCCWRLWNHRNEVVFQHLAPSINRLLRCCVNDAKLWANRFKLADQAVLPSWLASFSSPLHLM

SEQ ID NO: 114293 - protein, 114 aa, Oryza sativa
  Clone ID: PAT_MRT4530_17999C.1.pep
MTKSHYENVQIALWPGLICNYRLGPSPGPAWFGLPANKAASRTPYRLRLGSTSKSLIGLTSSKPSRSDSCTSAWHWATETSKDPDVSPTLSHGLLTASDLRSSLSIVPVLAIDQ

SEQ ID NO: 114294 - protein, 148 aa, Oryza sativa
  Clone ID: PAT_MRT4530_1799C.1.pep
MAAELEASSGHGWFPRVGLERCGEAPDGCHRELFVVSGMGEVLAAVDLVTGVEKPMAAKFAAEGEDGAGESPPCTTGDDGAELVAAGDARDGGRRRCRSGKKHGRQIHAVSGVGVGEEGAGESLLCTWELRERKRESGEGEEKVVRPA

SEQ ID NO: 114295 - protein, 426 aa, Oryza sativa
  Clone ID: PAT_MRT4530_179C.1.pep
MAKLNSDDVARCEKRVGSSELRSPTLNLSIACPQLTPAASTFPAAASNYCQLDELLTEEEKDLQIKVRQFMENEVAPIISKFWEKAEFPFHLIPKMSTLGIAGGTIKGYGCPGLSGPACAMCFLEIARVDASIASFCLVQSCLAMVSIAQLGSEAQKEKYLRPLSKMQKVCVYALSEPNHGSDASSLNTTARKVPGGWILNGQKRWPANSSFADIFVVLACNTSTNQINGFIVNGGAPGLKISKIDNKMSLRVVQNCDILLEDVFVPDDDRLPGANSFQDLVKALSFSRVIVAWISIGIAAGVYDACLRYLGERKQFGAPLAAFQLNQEKLMWLLGWRLYELHDSGRMTTGQASLGKAWITKKARETVALGRELLGGNGIVTDFHVGKAFCDMESLYTYEGSYEVNALIVARDITGIASIRPASRL

SEQ ID NO: 114296 - protein, 498 aa, Oryza sativa
  Clone ID: PAT_MRT4530_17C.1.pep
MATSAAARFLAALAGAAVLLVLLGGAAGAVVGHDDDAAAARRTMEEFAGFPASDYRGDGGGGSGGSSPFYVDSDGLQRQIDELASFSDSPVPSVTRVLYSDKDVQARRYIKGIMNQLGLSIREDAVGNIFGRWEGSEAGLGAVATGSHVDAIPFSGKYDGVVGVLGALEAIRMLKRSGFQPKRSLEVIMFTSEEPTRFGISCLGSRLMAGSEELARSLKETVDNQNVSFFDAADSAGYKMHPEELHNVFLKKDDYFAFVELHIEQGPILEKEGIKIGVVTAIAAPASIKVEFEGNGGHAGAVLMPARSPPHIDIGEVTFYRNDAGLAAAELALAVEKHVLESGSIDTVGTVGILQLHPGAINSIPSKSHVEIDVRDIDEKRRNNVIEKVHQSAIEISKNRGVLLSEFKIINQDPPALSDKSVISAMEFAAKQLNLEYKLMISRAYHDSLFMARISPMGMIFIPCYKGYSHKPEEYASPEDMANGVKVLALAMARLSLQ

SEQ ID NO: 114297 - protein, 176 aa, Oryza sativa
  Clone ID: PAT_MRT4530_18000C.1.pep
SNSKKGRKKLSGMDHHGREESLLSCHHSLVDYRKSPACFGEEITPNDCRSRCLASHCCRCRCTCHRRRAATTVVNVVPELLPLQSLSPNAPMSFPYQIWRPFEGRGFTSKETVGEAKTIDSDGPQTGSAAHRGLGEKEGGNDGLEMRGEKRATLSFLWVARSTGGGAGAAAIGGGG

SEQ ID NO: 114298 - protein, 74 aa, Oryza sativa
  Clone ID: PAT_MRT4530_18001C.1.pep
FFFFFFQQTLWYTIFCGRSYTIYVSLMVSGHTPLSSNTHIHTPHIIAGLSEGGGHSTSQAPPTKPFAPQARVAT

SEQ ID NO: 114299 - protein, 184 aa, Oryza sativa
  Clone ID: PAT_MRT4530_18002C.1.pep
VDYRKSPACFGEEITPNDCRSRCRATAAVVVAPAIVAVPQPPSSMSCPSCCLSNHSAPTLLCPSLTKSGDPKARSGIEVKVRKRVEKEARMGGGGRRRRWGWLRLPCVTFEGRGFTSKETVGEAKNIDSDGPQTGSAAHRGLGEKEGGSDGLEMRGEKRATLSFLWVARSTGGGAGAAAIGGGG

SEQ ID NO: 114300 - protein, 489 aa, Oryza sativa
  Clone ID: PAT_MRT4530_18003C.1.pep
MDPSNGVVQLITNVRNPRASAKAMWRPILLQPRRTPISHLRRRGHDATGHDATDDDKAVLPLRRLIGSRGYASSSDATNAAASAAANIAAPRADSRRRRRSPAAKAKAKQHLYVVLNDRKDACEIHKLDIDGGGGGRLMMNAGDMASLKTLRRLPEPPLLRLQSPTVHPCSKFTTVGSSIVTMGEYFSDHYCGDWFREARGNTLVYDTKTAALTVVRHLPEGLLGVYDFVAAIAVGANRLYVLDEGTMDDYRGRIVGGMHCFRLTDDDDDGSRKKKERWSWWQPDESTRISWSDHPSRLPFDTITGQIEAYAVHPKGRTFFVSVRQVDDEGTFSYSVESGKWTRRGDWMLPFVGHGHYDGELGSWVGLHHSDDDGRLSACRVVSARQRRALPEVKVSKEKVFVQVPGWARVQAELVYMGGRSEYCLVEWLEPEGSSDEEKCDECVLRLTKMRVVYDGDGELTVAAHRLSGCYKVSRSEKYSRHMAAFWM

SEQ ID NO: 114301 - protein, 32 aa, Oryza sativa
  Clone ID: PAT_MRT4530_18004C.1.pep
GKMHLFYLCKLIFHFFIASFPFFLFSIFFYWL

SEQ ID NO: 114302 - protein, 66 aa, Oryza sativa
  Clone ID: PAT_MRT4530_18005C.1.pep
ILKRADKVPHIAEYLNLLLMCCVQRANEQAHRYCHMARTRVLGLGLLAGTERDPVNMTINYTSPSG

SEQ ID NO: 114303 - protein, 112 aa, Oryza sativa
  Clone ID: PAT_MRT4530_18006C.1.pep
ARGKIMSARKANLFALAVMAFFFVGIVIADVTQGNSEDLFLGRTDGHNHAAYGANTHSNSGVMNKGENSGADSNERKLMVSTTDGQTDGTMSPRHRSPDWYCQYIGKTEHCP

SEQ ID NO: 114304 - protein, 270 aa, Oryza sativa
  Clone ID: PAT_MRT4530_18007C.1.pep
MRRSKSSLPSATGSRTGPALHRLRRRHRHRPPAPAARAAPPLGPTNRRLHQQPPPPASRDGRHEPPPKPKDVVVIPTDTVLHHKQPPPTHHHQHQQHKVKDQEEKKGDLRKDLKAGLAGMLSAASHGQQGTSIITLAGDNKGASMKISSPAPGSKGAGDDKRSSADGKGGVKAMINSNVQSINNSLLLHSSCSGGDLGVHLKLKLSSNSKSKSKTKSKEKQQHNVVADTSNKEKKPDSSQEKKEAGTSAAKPNKPSAAAKGNKPAGAANK

SEQ ID NO: 114305 - protein, 85 aa, Oryza sativa
  Clone ID: PAT_MRT4530_18008C.1.pep
MQVCTSRHVAPVPLRSCVRDRVYGTGSMIGRGARCTEHRSNGSSGIEITCSCLYDCNFRSHTTIVGSNIKGSNHTKVLFIRYCSR

SEQ ID NO: 114306 - protein, 225 aa, Oryza sativa
  Clone ID: PAT_MRT4530_18009C.1.pep
MAPSAAAAAAAAAAAATASPLSRLLLSLPNPSVKLPVSSPSRNAGAAVAAKNSTPVVALRRREAVAAVLSASILSRVLPAAAEASGGECPLEVAPNGLAFCDRVVGTGAAAEQGQLIKAHYTGRLEDGTVFDSSYKRGKPLTFRVGVGEVIKGWDQGIVGGEGIPPMLAGGKRSLRLPPELAYGARGAGCRGWEPTSCVIPPNSTLLFDVEMFRVYIDTELRVSD

SEQ ID NO: 114307 - protein, 232 aa, Oryza sativa
  Clone ID: PAT_MRT4530_1800C.1.pep
MASLQNLICSVSKQLVAPNCAVTSKLNASPLSVVNASSSEASSDEKNVTRRRLALLGAGALATGLLKSSSAYAEEVPKNYKSYVDSKDGYSYLYPADWRDFDFLGHDSAFKDRNVALQCVRVGFIPTTKTDIRDLGPMDEAIFNLVNNVYAAPNQIPTVYDMQERTVDGKNYWTFEYDLEAPGYGVSAFATVAIGNGRYYTLIVTANERRWSRLRNRLKVVADSFKLSDLTA

SEQ ID NO: 114308 - protein, 40 aa, Oryza sativa
  Clone ID: PAT_MRT4530_18011C.1.pep
SQERTKWKWILRSTQYRNLPPPFTRSCTAVHHRFYIDKRL

SEQ ID NO: 114309 - protein, 88 aa, Oryza sativa
  Clone ID: PAT_MRT4530_18012C.1.pep
SAHRPSSPPARTASTPPPSAPAPTTATRFRSRPSASASPRRPWRPPRPAACCPRAAARSRRGPPSSPPPTPPWPRSTPGSAAPARTPA

SEQ ID NO: 114310 - protein, 41 aa, Oryza sativa
  Clone ID: PAT_MRT4530_18013C.1.pep
LTEINESHTYKVITKCALLTHDTMKVHCVVCTCMYDHLLHL

SEQ ID NO: 114311 - protein, 1415 aa, Oryza sativa
  Clone ID: PAT_MRT4530_18014C.1.pep
MEASVSQIRRSPPRIEKRKKKNHNSLSGKAPPTRGNCDSLPPVWNAKSASECHWTRRLTSNYLSLVVVVVGEELPPCFAPPPMETPPPDPVSPPPPAADEGSPGGDDGAEDAGGFSAGLDSLWTALFGSPEELEPMWSPPRGFGVGAEFAAAEVEPEIMDVAGGPWDGAPWRSSGVVAGEGAATALVPPTAAAGFAEFEPAAPIDSYPAGAAAASLGDVPEVSALDSGVDCSPDPPPSSSPPVDFDARGFDPVADSAPAMESPLPPSVASSEANLDGRMLDCTLNSVPSPPLASPYEVGLGAEDPIKDSSPSVAWGTTMDAKDPEVDATCANGTALRRSRRIMKIKSAASSMPLNQNGDSSRASKRRVADSRKSRSSEGSKLPAFTGPISVNTVDLINGVKVQGLQEIVAVENVSSSYDNNQKAGGLYNQVVVALPAASNSLLKDKGASVLPRRKTRLASKVLVNSDRVSAISPVVNGGPPVQKSDVCIPTKKHKLAVEECLTSLDGVDGGGIVLCNSKLKSAKSRVVSKTPQGRGRRSPQPPKTQRARTLSVKYLEKLKRAENNNNNGSMSKSPRVPMIPENNGSMSKSPRVPIIPELSTKHELVLDKHMVDSVMLETDDGSCFFVGDAVPDDEARKQWPHRYEINDQIMKKDKRTSSQTFAKLVTVSFCVVFMYVYLQMLDFRGPEGKPNYIGRLLEFFETKTGECYFRVQWFFTAEDTVIGEQAQSHDPRRLFYSDLTDDNLLDCIVSKVTIVQVPPSVDGKSKSVPSSDYYYDMKYSIDYSTFSTIEMEDTDDLMQSCYTSRINDKMKKIDVNKKHKSPVLEKMELSLLDLYCGCGGMSTGLCLGARGGGVNLSARWAIDDDEIACESFRNNHPETRVRNETTDDFLELLKEWEKLCKTYVKHSRTKACVDSTTESNNETPDCSTVPPEEFEVWKLVDICFGDPNKVSKHGLYFKVRWKGYGPHHDTWEPVEGLRNCKEAIRDFVIEGHRQRILPRPRRNIAVFLLRPSKFPLGDVDVVCGGPPCQGISGYNRNREFEAPFKCEKNKQIIVFMDVVQFLKPKYVYMENVLDILKFADATLARYALSRLVAMHYQARLGIMAAGCYGLPQFRMRVFLLGCHSKEKLPPFPLPTHEAIVKNGCPLAFERNLVGWPNDTPMQLARPIVLEDILSDLPEVANGESRDEMLYVKGPQTEFQRYIRSFNVGELIAFPSEVHGPRAHVTKDSKSSKLYDHRPLVLDNDNYQRILQIPKRKGANFRDLSGVIVGPDNVARLDPTKERVLLPSGRPLVLDCILAYENGKSLRPFGRVWWDEVVGTVLTVPNARMQALIHPAQDRLLTIRESARLQGFPDNYRFRGTVKDRYRQIGNAVAVPVGRALGYALAMAYLKKSGDDPLMLLPPNFAFSHDLRGFA

SEQ ID NO: 114312 - protein, 93 aa, Oryza sativa
  Clone ID: PAT_MRT4530_18015C.1.pep
MNPPPKTKAQQMDTRAEHRTHGATPNMHTIKKETEKEMAKISFSDSRGKETAVVTGQLPSSSSSWTAGGSSLGRQILAGARRHKSSEATEESG

SEQ ID NO: 114313 - protein, 137 aa, Oryza sativa
  Clone ID: PAT_MRT4530_18016C.1.pep
GRRERANSGGPAPRGEKKPPRRPKRKAPPPGRGTKQKGTRPDRKPDRKTGREPNANKGGQPPPKAPQAKPQKHPARKEGGNVSGKPIPPGSSHGQEKAKLPPPPQKGKLGRPQGPDRKTRDNPRDRKKIKKCGKKRE

SEQ ID NO: 114314 - protein, 303 aa, Oryza sativa
  Clone ID: PAT_MRT4530_18017C.1.pep
MAPPLLGSSATLNPGHWFLGALPALFSQFPNLHKVEINYSGWAPGNGSQIDNQGLRVLSFSLPLLNDLTLSFCSEINDSGLACLTNCKMLMSLKLNSTPEITSRGLLSLAVGCKTLSSLHLNNCKGITSSTEWLEHLGTNGSLEELVVKNCKGIGQYHFLMFGPGWMKLQKFEFENEQSFWSIFRRDRDPSYKAHTYRYDLLCEGLKDLRLVHIVTEPKGPEIGLRFLLGKCRSLEKLSLEYVSGLIDNDMIALSQTCKNLKSISLWLKPEHYNVGDDIIFRTGFTDESLKALALNCPFLQKC

SEQ ID NO: 114315 - protein, 125 aa, Oryza sativa
  Clone ID: PAT_MRT4530_18018C.1.pep
MGSPSPAAGTEEIERLEGVQDLLPPPPEHALGGHACAAAPSAKAMRWRAKWPRARLFDDKQFYHRFYRKSSVSSDTDAYTVNPPLFDGLILLAWAERKVPVGVPCLLASVRCRTSGLATSNVSSY

SEQ ID NO: 114316 - protein, 232 aa, Oryza sativa
  Clone ID: PAT_MRT4530_18019C.1.pep
MPGVRLNHHHHHQPPAAAPFVGAAPLPHHPRSGGACYCDPCHVAGAWRRGGCGGGGARGVLPAKRAPRAPRMRWTSTLHARFVHAVELLGGHDRATPKSVLELMDVKDLTLAHVKSHLQMYRTVKNTERPAASSDQADGFENGSAGEICDENSLDLHGGCRPEAMSAAARHGREDWSGFHESNTGTMQTLKDMQSKSLEIISDMNSCVSETTSSTSELNLEFTLGRPQNRPN

SEQ ID NO: 114317 - protein, 181 aa, Oryza sativa
  unsure (1)..(181): unsure at all Xaa locations
  Clone ID: PAT_MRT4530_1801C.1.pep
SRCLLLIVLFVLAAPMXTMACHHQXYTAPGESCGGRXSYPTYLTXVLCSLARRRCVGRGAGSADLERVWQDCCRGFAAADYCWRWCASLVHWLSGLCWXRGATAAGLPMAWAFPGCRRGDLCRALLSSPAVCSAALPXGAXGVCFWLGCPTLPGPGRFVTMVRCWFGSVWGRLLRSGVCLW

SEQ ID NO: 114318 - protein, 333 aa, Oryza sativa
  Clone ID: PAT_MRT4530_18020C.1.pep
MQGGLVDLGCRFPRIIKTTSPARCYAHPALCALLPVFIYTLPATTLHKAIAGGRRRSNSSSQANPSGEQEATEAAKGGGGRTPLFACIVLWGKRISATTARAAAAARMAMAVAARDDDLDEDDGAPDNLNDIVDGDGNLDDDGSRNGWMRWRWRLGGRRRRAAHSSPSWLLPRRRRQRTLPHGGGGGNRTAVMAQGDDGWEKAMARGGDRQWRDDVSYENPFHNSPVVVFVVYVEFIVPAISIYPTICWLIKSDAESVFLCEEKKAMQQPSSTSTQPHASRKQQPILVFFASTVAFLGQMRPYLCRLVSITSLGTLRGSSILHWGGQISMGGE

SEQ ID NO: 114319 - protein, 59 aa, Oryza sativa
  Clone ID: PAT_MRT4530_18021C.1.pep
MEGSYYRCTQDNCRVKKRVERLAEDPRMVITTYEGRHVHSPSRDDDDAARASAEMTFIW

SEQ ID NO: 114320 - protein, 286 aa, Oryza sativa
  Clone ID: PAT_MRT4530_18022C.1.pep
MGTEATATTTVSGGSGRAAPAALCLQAARGAWSRTSKVLDVDAASPTAAPSLGSSVGVPFLWEEAPGRPKVVVVAPEHFAPPPPLAPAADERAPVSHGGEAAPASGGDRGDGDKARHVVVPLKLPPRLQAAAAAAAAADSSLSPNTVLHGPYGGNKPPRPLTRSGSTASHRRKPSAVGVSLWRKATAAARGKKHDYDAAALDASCRSPASSSSSSSSSSSSSMSYFADDDHRRKADGHGDPEPEADGEECGAKSTVRITRFKRNKSLPSVNTSHLWILTWNSKKYF

SEQ ID NO: 114321 - protein, 47 aa, Oryza sativa
  Clone ID: PAT_MRT4530_18023C.1.pep
LAGPRVRLVKTPTFLPLLCRGADIDPSLTNNTMSRASVAILFYILTA

SEQ ID NO: 114322 - protein, 250 aa, Oryza sativa
  Clone ID: PAT_MRT4530_18024C.1.pep
MEYKRSSHVEEEEEEEEEEDDEEEDEEEQGHHQYTTAAAQQQLHPQVLGSSASSPSSLMDSAAFSRPLLPPNLSLVSPSAAAAAAPGGSYLHAAHHHGQGRRVEAPGGESQHHLQRHHEPARNGVLGGVAGAHAASTLALVGGGGGGPRGGEGAAGEAPTWRYRECLKNHAARMGAHVLDGCGEFMSSPGDGAAALACAACGCHRSFHRREPAVVAPASLSLCPASASASAAAGLRARFVGASPRCCHER

SEQ ID NO: 114323 - protein, 66 aa, Oryza sativa
  Clone ID: PAT_MRT4530_18025C.1.pep
MKRNTILALFIWAMAMVIFATAMPAKARMEGIHPQEGVDPVLIISPEDLDSTTQGALGLAVKTRGG

SEQ ID NO: 114324 - protein, 83 aa, Oryza sativa
  unsure (1)..(83): unsure at all Xaa locations
  Clone ID: PAT_MRT4530_18026C.1.pep
GMSMTSMYWCGQDLQELVNANGHGXEDEEEEKTSPEREDGGCRPNPIDMHAAELIGKFYEQLRLKKSDXFNNRAYGSISVLGS

SEQ ID NO: 114325 - protein, 330 aa, Oryza sativa
  unsure (1)..(330): unsure at all Xaa locations
  Clone ID: PAT_MRT4530_18027C.1.pep
MPAPSASIHLGVPTPYITSHGSKIARLHMYDWXIVLILLVVVDGILXNIIEPFHRFVGSDMMTDLRYPXKDNTVPFWAVPIIGIIGPMIIITGIYFKKRNVYDFHHAILGLLFSVLITAVITDAIKDGAYDNFTTGVLCHGKASVIKEGHKSFPSGHTSWSFAGLGFLSWYLAALVAVSRVDDYWHHWQDVFTGGILDYTSQQVKEGWWFLHFATSNFFQCHLMKTVYEKDLKPRCDMGRVSPARTPTLGVVQPVKDWWKILASVSGVPKKGLCTLILLIVWEVWKVRNRRIFDYKEATTSYLLSKIKEEAGMWALAGAKCLGEIIPQFV

SEQ ID NO: 114326 - protein, 583 aa, Oryza sativa
  Clone ID: PAT_MRT4530_18028C.1.pep
MSSKSPLQSMPGQAAKPKGTGEQGGDAEVVSEERTPSDQHQGSPASTLDKELSGLSSESGILDDSLVAEEEDSGELKEIQNLDCNGNQEKKTSQKSSTSDSFASAKVSDGTNSLRKTSGSAKTSDRANFTESGKSSMCRASTSSDISDESSRSSMSSATTKPHKGNDSRWEAIQTVKTKDGILGLNHFRLLKKLGSGDIGSVYLSELSGTRSYFAMKVMDKASLASRKKLLRSQTELEILQSLDHPFLPTLYTHFETDKFSCLVMEFCPGGDLHTLRQRQPGKHFSEQAAKFYVAEVLLALEYLHMLGIIYRDLKPENVLVREDGHIMLSDFDLSLRCSVSPTVIKSANPGLDALQRNNAAYCVQPACIEPSCIQPSCVAPTTCFGPRFFKSKSKSKSKKEKSKPEAANQASLFPELIAEPTDARSMSFVGTHEYLAPEIIKGEGHGSAVDWWTFGIFLYELLFGKTPFKGSGNRATLFNVVGQPLRFPESPIVSFSARDMIRGLLVKDPQHRLGYKRGATEIKQHPFFEGVNWALIRCASPPDIPKPVELDCRPKQVPSTNGKVAPASNQKGSDNYLEFEFF

SEQ ID NO: 114327 - protein, 43 aa, Oryza sativa
  Clone ID: PAT_MRT4530_18029C.1.pep
MAWVASFCLTKLINLLIVFDWLYKNLNISDYNVGHCNGKQLLL

SEQ ID NO: 114328 - protein, 97 aa, Oryza sativa
  Clone ID: PAT_MRT4530_1802C.1.pep
PAKKGSVFIKECLLLHHIIHIISQVHNQQSMHCSINNYIPIHHHHSQPTHLLKNTGNLVETNKLFNFLHLDILDNTPTPQQLTILFLIPGTLWPLPD

SEQ ID NO: 114329 - protein, 80 aa, Oryza sativa
  Clone ID: PAT_MRT4530_18030C.1.pep
TRAQRITNAGRRQRPSPPPPQPYEREGAGAPAIQAWPPPLPLATCPSTLFSPPTPRLSLRLSHYYLFYSDLSSPSYFYIL

SEQ ID NO: 114330 - protein, 67 aa, Oryza sativa
  unsure (1)..(67): unsure at all Xaa locations
  Clone ID: PAT_MRT4530_18031C.1.pep
MMVECISIADRIMMETIAKDVTNLXGNTALVYLNRMTDACIHPVAAKLESMAPCSIMQDRMGYINEH

SEQ ID NO: 114331 - protein, 77 aa, Oryza sativa
  unsure (1)..(77): unsure at all Xaa locations
  Clone ID: PAT_MRT4530_18032C.1.pep
MLKQGVPYTKQFTFLDHAGINDTPDSEHSXWTLATLTDVEEVKTGARMLAIWATTIMFWTEYTQMTTFSEIPATTMD

SEQ ID NO: 114332 - protein, 62 aa, Oryza sativa
  Clone ID: PAT_MRT4530_18033C.1.pep
MQHDPSSPAPMDPQQPKPVSYLCTDCGTETLLKPTDVVQCHECGCRILCKKRTRQVVQYEAR

SEQ ID NO: 114333 - protein, 67 aa, Oryza sativa
  Clone ID: PAT_MRT4530_18034C.1.pep
NMGAPHLRLIKLTETQGICIFFKKRGFCFNLKKNEKIFFFFQKKKGDPSVDLKGGRLTPKRGVNATS

SEQ ID NO: 114334 - protein, 414 aa, Oryza sativa
  unsure (1)..(414): unsure at all Xaa locations
  Clone ID: PAT_MRT4530_18035C.1.pep
DDDNEVEYVDPVEIFTMDDYLARQTKFNNVVSQVAFNMHNLFQPSSSNAHRASRTYIRRDREAHHAMIXNDYFSDNPIFSXQQFRRHYRMNKPLFLRIINALGQWDEYFTQRVDALGQPGLSPIQKCTDVMWMLAYGCCADQTNDYVXIGGTTAYELLARFCEGVIAIFRPHYLRKPTDDDVQRLVQRHEERGFPAMLGSIDCMHWRXKNCPNGWKGMYTRGDYGATTIILEAVASRDRWIWHCFFFXGMAGSNNDINVLNQSPIFTDILMGTSTRLRYTVNGIQYDLGYYLADGIYPEWATIVKSIRHPQLEKHKLFAQQQESARKDAECAFGLLGARFKVVATTTHLWEQSDISNIMTACIIMYNMIVEDEGHLDPLDAHEFEGDYEIEPPEHMYSTPIPSYNLTISIYQVA

SEQ ID NO: 114335 - protein, 97 aa, Oryza sativa
  Clone ID: PAT_MRT4530_18036C.1.pep
MQHDPSSPAPMDPQQPKPVSYLCTDCGTETLLKPTDVVQCHECGCRILCKKRTRQGALQEEGIWKAQYVLFSMKRAEDEGMDTFASYYHALKRRNDY

SEQ ID NO: 114336 - protein, 104 aa, Oryza sativa
  Clone ID: PAT_MRT4530_18037C.1.pep
MAKGPHGLPPTESTTTATEGGHACKIRRNNKTDRPTSCNVCVHATRASASTAYACANTGCITTGSGSLATCLADTTFGSLGPSLGVPFHTKCDLCHPSPVSSFH

SEQ ID NO: 114337 - protein, 117 aa, Oryza sativa
  unsure (1)..(117): unsure at all Xaa locations
  Clone ID: PAT_MRT4530_18038C.1.pep
PSGFLVEPIANAIRGIFKLTIGSCAAYPKRSDAKVASAPGLSDGXTTGAFTLPSMGAISNRTTYGTNDAHDAXNAACGXSATQNLVIPTGEYMNDHLNFRGACKGYIRLDMDRTMFG

SEQ ID NO: 114338 - protein, 234 aa, Oryza sativa
  unsure (1)..(234): unsure at all Xaa locations
  Clone ID: PAT_MRT4530_18039C.1.pep
LDAWVTGDDIIPVCKAVLEAYRDLGTRGNRQKTRMXGMEAFRSEVEKRMPNGVLERAAPEDLIDKKWQRRDYLGVHPQKQEGMSYVGLHVPVGRVQAADMFELARLADEYGSGELRLTVEQNIVIPNVKNEKVEALLSEPLLQKFSPQPSLLLKGLVACTGNQFCGQAIIETKQRALLVTSQVEKLVSVPRAVRMHWTGCPNSCGQVQVADIGFMGCLTKDSAGKIVEAADIFV

SEQ ID NO: 114339 - protein, 179 aa, Oryza sativa
  Clone ID: PAT_MRT4530_1803C.1.pep
WSAISGEKIPARGDCWDVVVAWRGSSTLADWMMDMHVMNLVDFGGGAGTAGHVAEGFYNVYTSKDVKVKHGTVSAKEQAVMEVKRLVDHLRRRSGAAGEKPVKVRVTVTGHSLGGAVAVMTAHDVAAALAADADAEGVRVRAVTFGAPRVGDDAFRRAVAARGVEVFRVIVKQDIVPKL

SEQ ID NO: 114340 - protein, 108 aa, Oryza sativa
  Clone ID: PAT_MRT4530_18040C.1.pep
MFVNFPPVAAISRSICPFELAKSQQQRPRAPSLLHRNSAPPPPPSPAMASSASLQRFLPPSSHVAASRRRPPAVRTRPVQSLTVSAPSSSTPVADDAVSAERRAGLNP

SEQ ID NO: 114341 - protein, 589 aa, Oryza sativa
  unsure (1)..(589): unsure at all Xaa locations
  Clone ID: PAT_MRT4530_18041C.1.pep
MASSASLQRFLPPYPHAAASRCRPPGVRARPVQSSTVSAPSSSTPAADEAVSAERLEPRVEQREGRYWVLKEKYRTGLNPQEKVKLGKEPMSLFMEGGIKELAKMPMEEIEADKLSKEDIDVRLKWLGLFHRRKHQYGRFMMRLKLPNGVTTSEQTRYLASVIAADGKEGCAGVTTRKNSQIAAVTLTDXPAILDSPITRGPEHRDPERQRTRRWRRCSPSRCFRSSPRSRRCCSRXLVACTGNQFCGQAIIETKQRALLVTSQVEKLVSVPRAVRMHWTGCPNSCGQVQVADIGFMGCLTKDSAGKIVEAADIFVGARSRGSKLTDACMRRHSSSIVXLIDELGMEAFRSEVEKRMPNGVLERAAPEDLIDKKWQRRDYLGVHPQKQEGMSYVGLHVPVGRVQAADMFELARLADEYGSGELRLTVEQNIVIPNVKNEKVEALLSEPLLQKFSPQPSLLLKGLVACTGNQFCGQAIIETKQRALLVTSQVEKLVSVPRAVRMHWTGCPNSCGQVQVADIGFMGCLTKDSAGKIVEAADIFVGGRVGSDSHLAGAYKKSVPCDELAPIVADILVERFGAVRREREEDEE

SEQ ID NO: 114342 - protein, 321 aa, Oryza sativa
  Clone ID: PAT_MRT4530_18042C.1.pep
MASCMMIPIIVLILVSMAANALADDRRQLQLMQDPAAGDVLSYHGGAVLSGDIPVSIVWYGKFAPSQKDIVVDFVQSLTSTSSSSQRAATPSAAQWWSTLATVYLSNATTGGGGKPAAATRVVLSGQVSDEEYSLGKTLTLVQVFQLAAGAAPKRGAVVLVLTDPDVVVEGFCSVRCGVHGSDAGAGYAYAWVGNAERQCPGQCAWPFAAPPYGPQGSPLGAPNGDVGTDGMVVTLASTLAGAVTNPFGDAYYQGDKDAALEACTACAGVYGSGSYPGYAGKVLVDEANGGSYNAIGGGGKRFLLPAIYNPATTGCCSTTV

SEQ ID NO: 114343 - protein, 582 aa, Oryza sativa
  Clone ID: PAT_MRT4530_18043C.1.pep
MAAVWSGCSTSFSQELPPHPRGRRGGDGARIHPWSGGAGRDATTRHAEAARTVVVFARGRVRVCRAAAPCVLEPDVAGKEEVGVAVWGMDDEPPVADGHRRHGLRRRPVRPAAVEEGPVAAARSAASASASAAGSKSEVGGSRLHFLEERDEEMLSRRLIKLSQSNKVRSATELFDSMRASGLQPSAHACNSLLACFVRRGSFADAMKVFEFMKGKGMATGHSYTLILKAVATTEGYFAALKMFDEIEESDKKNVDVIVYNTVISVCGRAKDWRQVERLWRRLGENSLSGTLMTYDLLVSTFVQCGQSELAVDAYQEMFKSGIDPSEDILKAIIASCTKEGKWEFALTTFRRMLSAGMKPSIIVFNSIINSLGKAGEDELAFRMYHLLTSSGLKPDQYTWSALLSALYRSGRCWDVLDLFQGIKTKHSALLNNHLYNIALMSCERLGQWEHGLQLLWMMERGGLQISAVSYNHVIGACEVARMPKVALKVYRRMTHRGCSPDTFTHLSVIRACIWGSLWNEVEDILEEVAPDSSVYNTVIHGLCLRGKIRLARKVYTKMRSIGLKPDGKTRSFMLQNLATDY

SEQ ID NO: 114344 - protein, 73 aa, Oryza sativa
  Clone ID: PAT_MRT4530_18044C.1.pep
MAVARTAVGEGAGVGGMRRGARSATLWRRTAMAALGRRRGGGRRSNITAQREDGFVQKFSLPRWIVNLSVAVV

SEQ ID NO: 114345 - protein, 56 aa, Oryza sativa
  Clone ID: PAT_MRT4530_18045C.1.pep
ALKALLGELSDDPSIDKRELYLVAAGVYERACKFDESSQIISQIRSPNAIGVQKFR

SEQ ID NO: 114346 - protein, 70 aa, Oryza sativa
  Clone ID: PAT_MRT4530_18046C.1.pep
NVHVLLPYLVVQKYCSASYDPNDNTHSLINQPPIQYWKTMIITSSRNHLIFRFTVACALLHISQVWHGSA

SEQ ID NO: 114347 - protein, 35 aa, Oryza sativa
  Clone ID: PAT_MRT4530_18047C.1.pep
VFMEVSLSLFLYHVSGYNRTSVVIIPPKEQISLYI

SEQ ID NO: 114348 - protein, 121 aa, Oryza sativa
  Clone ID: PAT_MRT4530_18048C.1.pep
AGILILIRGEYNPEGAQLTRQTIYSSTEFLLSVPTCSRNIIDRGWMIQVMAKEKVAKKEAICNGIEKPHVSGTFSSRSIRCPSWGPSCPAHLWSRAAHDRLIDMGGWHRGFHGGEAKYGYR

SEQ ID NO: 114349 - protein, 874 aa, Oryza sativa
  unsure (1)..(874): unsure at all Xaa locations
  Clone ID: PAT_MRT4530_18049C.1.pep
MEERIKVITQEMLMRSCIRTRQGVVLKPSPPLKFKVTSNSPNPSIAIQNVNDRCVDASATSSFASVQYAYNAMEGSMGVYTTDCTGIGYKQNLYDGVTGRNTGVTASYDGQAVSTMAGQTTMPYPGQIGPPVAGLTVPLTTGQTGPWADQTGXLGWSERTIYSRSDRFPGNFSRGYPPDTRYGQYNHIAPQQPPLRPLNSPPNPHRPENMEKLISIIIRDKFGIKARNRVRVYQKLYPDYYDNISYPRGYRVPKFTKFSDNDTIESITELNDGLDCITSESEIALSPNTESQIDHVDVGKDDDSVLRDSSEIESKVPMHTYQRPYPEHVDLVPYLQGFEVPNFTKFTCENAMTTMEHIGRFIDQCDASLMEQRPIDDSSVTCETIPVTPMPKTRIVSNPLPISPIDSDNKEVLIRPSQAESTKGKNVIIRDPRPETIRINDAKAKDCRVTKDKSSSSQKTKKPKLTFEMLMAKYEKGLASQRFHNQISDSKRPRSSRRKRFGQSPKQSKPSIIPTPYKLPVVMPSYPYPISLYGYPFMYYMPWMHQPPMQYYQEWKESPRSVPTNSSNSRQDRFSQKNRSGGSKVKKGKKVWVRKEAKAPEVVSIKEEFQDVEVRTGDAVETIQAKEIEANTVIVKSGGLTEASGRSDRQPMFIGIYACVTYDFGHSLLIIFQLGHWFVLVAMDYFTKLAEAMLLENITCTEREIEEHSNKWHEVLSEALWTHWISKHGATKVTPFELVYGQKAVLSIEIHDVHQKGRRAVFTPKFGTYGRNRGKLPKFGKCRVPFTGPVRPQLPTTLRPPTFSSTNSPVDALDWLHARKKLDTVQCTDEEKVAFAGHQLQGRIGVVGRLPVLSCHHQLPTSTYPQHITPINDT

SEQ ID NO: 114350 - protein, 422 aa, Oryza sativa
  Clone ID: PAT_MRT4530_1804C.1.pep
MVARSPDARRSRQTAAAAAAAAALNPALVRETLKKVDRCMARLQELQYTVAGGAKVVSGVSLSPRSTRGYLRTSLRCKQETVRQVLDPDPLMRATPARKTSPNGKFGGSDGGATQWRRMSLPAMLLGETVLEIVQASKFASDIVAVVDAGANKNREAPKTPNPVTRTRKVNAEATPLRARRAREKQSQRGTARAEASTPPSRGRVRSRIQFKPASPLGRPSVSANRVSPRNRPWAKKTVMFPNPAFLASTSSAAYDSPSPSKKQKRFYKTRSPIIARQTPHKFLVKSPPSSLGSKLKSHGKLLPSRPFTVSPPGKVQVAAAAASVSKTRRCTFSPSRLVSRLVSSPGKAQAAASNNNNNKGRRCSFSPSRLATRLVSPIKARLSLNRSRDGGVHGGGGMVCGLKQRPGVSMTVRTVSSRIPS

SEQ ID NO: 114351 - protein, 112 aa, Oryza sativa
  Clone ID: PAT_MRT4530_18050C.1.pep
MGAERGAARCRQGAARNERGCGAVRRGAVGTWKAQWGWGVARSFNGSKLQVMGTTPETGEWAIVGGTGQLAMAYGTIQHNIVKNNPGIETTRQLDIHAFYSTPQTQAVSGKL

SEQ ID NO: 114352 - protein, 39 aa, Oryza sativa
  Clone ID: PAT_MRT4530_18051C.1.pep
FYEGDQLQYIYKHKQRTQFLLLKFRHTAWLHTILSKTDL

SEQ ID NO: 114353 - protein, 121 aa, Oryza sativa
  Clone ID: PAT_MRT4530_18052C.1.pep
MKAEARAVRPRRGREASTALVSHPRLVLPHRLAATTDVVKWREPHWLDLAVNEELASTAVPSPPGKRVSWVGLDSAMTNGLELCMCYRIRYAAAHSNLTAVPSAGGCTRPLRRRPLRLPSF

SEQ ID NO: 114354 - protein, 385 aa, Oryza sativa
  unsure (1)..(385): unsure at all Xaa locations
  Clone ID: PAT_MRT4530_18053C.1.pep
ARLMELVKNGVLLAKEIISWRSTCGEXFPTLNSGEIVVFESFLYQGFGLTSSDFFXGLLDFYSIKLYHLNLNSILQIVIFIHLCESFLGILPHFNLLHRXFFPKLQTCKENPCIVAGAGIPLHTDIKNKYFSLPLKTSNKGWYGELFYCSNPNPSLLDFVELPPSPSIIXNSLPNDKEISEADTLMSKFMVMKDLGLTSEYVTRHFIKTRLQPIKDRVHPAXYAGVEDPSREAKESLDLTHFKNRMXSHIEIPTTSKKPVNTYHLLNLAPKENHLIVSRPPNMRHXTPKKSTTGPRIGEHGQRGEKRAAASPKIDDADHKRKRWLVVENDEDEYISSKASHTVTTPQPKSKAPNPPPLNRRANLCFRTSSRKPSDIDWIGKSGKN

SEQ ID NO: 114355 - protein, 143 aa, Oryza sativa
  Clone ID: PAT_MRT4530_18054C.1.pep
MVATTRSPSPELRKPNHRAIEFASTSGSYVSPREGGKYMPRRANVIFTEAQGLKQLNMSVSESLVLGADNYHPGKANVVADALSRKGYCNATEGRQLPLELCKEFERLNLGIVSRGFVAALEAKPTLIDCHTPKFFPKPKLEF

SEQ ID NO: 114356 - protein, 253 aa, Oryza sativa
  Clone ID: PAT_MRT4530_18055C.1.pep
MTQPREAGGGSGIGGGCGAPMWMTPVAGSDGLGRVVDDDGPAEVEANPVGDGEAVSATASKRRRRVGGREIWRGAAAVEESVAGRSGGGQRENRKRWWGDPPCSPLAARHAPAMPITCRAHRRLLSATSEREREKRGERRERGRGGRGVRQCFKQPSSTNLCGYYMLEMLRVNRRYTTNINHTPEISYVANRFDNTTIMKVCADICHFIRCDCCNALGQSYDNESQLALEDKFKPLREWGKNICSKNLLFRLC

SEQ ID NO: 114357 - protein, 1023 aa, Oryza sativa
  Clone ID: PAT_MRT4530_18056C.1.pep
MGHLNIMLAFLSFVLLGLAEVEGTVALSQILSNSHLITPYREVTARKFERRSLLQDHSSDDRRSSNASLPSAATLANCPKRCGNLSFDYPFGIGDGCFRHPDFSLTCNATTQPPKLLLHINESVEVIDNIEVVGKDIAEFFYFNFFMVAFNHLIPIKAGVDVYNLTWKAPGISFTISEMMIITVVSCDLDVFLIGQDNTPKLLCMVACPNKEIADMVYMQDCEGPGCCTVLSETPVQAVQLQFVRHETSNAGKISNLSMLWDRINITIGAPLVWSIVDQTRCSRNMEDNFACVSNHSGCITSVFRDIGYACQCNSGYKGNPFILDGCKHDSGSSIFLFNSRELTKKRIIQQPHEKAYVYTIMFPTCIPFYQKQREHLEMGHNMEFLLMPGYNPRPEKHNCARQCGTITVPFPFGLEEGCSARKRFQLNCSDKTNSVLKFNDYFQVTYINVSEGLLGIKHNSSLEEQLFNIMMEMMTSDNEPDLFVDPLESVSVQWAVANLTCQEAQHNTSGYACVSTSSSCLNVLSSMDGYVGYRCSCLPGYRGNPYILDGCEDIDECRETPGICKGVCKNTVGNYSCTKCPDHTEYDILRMQCTPIRKKSFYLGIIIGLSSGFGMLLLGLSGIVLIRRWKRHAQKRLQTKYFRKNQGLLLEQLISSDENASEKTKIFSLEELKKATNNFDTTRILGRGGHGTVYKGILSNQHVVAIKKAKVIRECEINDFINEVSILSQINHRNIVKLFGCCLETEVPLLVYDFIPNGSLFGLLHPDSSSTIYLSWGDCLRIAAEAAGALYYLHSAASISIFHRDVKSSNILLDANYTAKVSDFGASRSVPIDQTHIITNVQGTFGYLDPEYYQTRQLNEKSDVYSFGVVLLELLLRKQPIFTINSGMKQNLCSYFLSEIKTRPITDMVDAQVLEEANEEDIKEVASLAEMCLKLKGEERPTMKKVEMTLQLLRTKTMNSSQVDPTIDQEIQTVLTEGASDPEIQPLVTNLDVDRANAASQRFQISCYSLEQEFLSSASLPR

SEQ ID NO: 114358 - protein, 277 aa, Oryza sativa
  Clone ID: PAT_MRT4530_18057C.1.pep
MATRMYGQKQNISQSGYYVVKTHEATMHRQRRSISSPGGNLSPPLLVVAAAVFVVAGLSAAVPGAAAYKNYTVGDDKGWYDGLTHPGVDYQEWADGKNFSLGDFLIFNTDKNHSVVQTRNETLYKSCDYNDSGPDDTVEWSAAAPEFSKDAVTVAVPLLKEGSSYFFSGNYDGEQCESGQRFAIAVAHGQGLPPDLRPPAAEAPGPSSSAGAAADAPPTFDFSHPKNVSNSPADTSTTAPLDDADDAPTTGGAGRSIARLGSGLAAAATLLFFVVQV

SEQ ID NO: 114359 - protein, 91 aa, Oryza sativa
  Clone ID: PAT_MRT4530_18058C.1.pep
MATGTAAHGLLASLASTVRRPPSLTIDRLLSDKESHRRWRGSCINVDLPSMADFSDSDTTSQATGTVPSSALTTPLPQPFLFMVVIDGHRN

SEQ ID NO: 114360 - protein, 84 aa, Oryza sativa
  unsure (1)..(84): unsure at all Xaa locations
  Clone ID: PAT_MRT4530_18059C.1.pep
WPVPXTAHLGARATTHSVALVPASAAGSQPSLSLLVPGPRASRAATREADVVGPACLVTGVSCFFKNFVVLCPFLVIEMGAMAL

SEQ ID NO: 114361 - protein, 35 aa, Oryza sativa
  Clone ID: PAT_MRT4530_1805C.1.pep
SFFFFIYSFVTLFFILSGSLFNIVYTILVIELGIV

SEQ ID NO: 114362 - protein, 259 aa, Oryza sativa
  Clone ID: PAT_MRT4530_18060C.1.pep
MAYASLTLSGGMLVTTTQARSKGSEADLVAAARRFFIFSVTSILHGIKIKSTRHKLGDALYPVLRLRGEIHPRARLVGGKIDLFLVYNGIYRSVVNIAIEKTPERTIRQNGIIVECDPTYAYIVADARAFEGNIAADKITVDFPGEQCIKPLPKHCNITNGLVGIYCCPGDEKFNTDLFKRVEMCNQPLQMSEAVTLNGHEFSHNCAVSVSAEFGTPVINKNGELVGMNCSLSYHLTARNISALVGTIRDIQNTLRNRV

SEQ ID NO: 114363 - protein, 228 aa, Oryza sativa
  Clone ID: PAT_MRT4530_18061C.1.pep
MAQDPAERRQGGFAAHDPRAITNRATGTAWTPFGHGRRTPPYRRSCLAAASRGPSLATAELLRVTVVLAREREKREDRRRKEERGMPWRWPKAGTSSSEPWHGGGWRGEDAAARGLLEPRPSGRGSFPLPPRPATSSTILPSDLEEGERGSALDWLRLAAAIAHQGGGPVDDDPGGRRGWVHRSMPTGHETAPTHAAHPRPPVRRNAKGGDEGVAPAVHARKVFEQMP

SEQ ID NO: 114364 - protein, 120 aa, Oryza sativa
  Clone ID: PAT_MRT4530_18062C.1.pep
MELTARAAMVVPSAAMLIARLHKEIHAPPSPVAAAAILAAESPRRTYRPSFPSQESHTRHRNTTNSPSAVVTATTVFIHAAPTTGSGAVAPLFLRKREGRRWKMNEMDEKCDVSGTVPIL

SEQ ID NO: 114365 - protein, 52 aa, Oryza sativa
  Clone ID: PAT_MRT4530_18063C.1.pep
TVTHFANLANRNEELEAQLQQLRSSFNILQAFATPFVAVLICIIAIAVVVEC

SEQ ID NO: 114366 - protein, 155 aa, Oryza sativa
  unsure (1)..(155): unsure at all Xaa locations
  Clone ID: PAT_MRT4530_18064C.1.pep
LAVDXELNIXQSKILLSLSVLLSIRIVLLSALSKGSSPDRSRPSSPSPRRQIAIARILVHIVANLISAPQLHCIPRRSVRQHVVATSSASSATTANPNSLRHREESLYSRKGSFMLHYQEGCQGKRQRFWQSLKKKVDPTRRSTRNIVYKDVLDW

SEQ ID NO: 114367 - protein, 179 aa, Oryza sativa
  Clone ID: PAT_MRT4530_18065C.1.pep
MAERLTRRVAVPPGARAYERLPLDKDFFFLRHLSIAIQVVKALHVATATAEDMSDSARAAVLGGPRTGGSGGGVDGSASTGAADDAQAATVLRRGRSARAGTTGDRRMACDGQHADAGGQVVQGRQRAERTLGRRTAGGGRFGVKGYQTLLGGSPTLIGASSNWCRSLELGVRVWSPTK

SEQ ID NO: 114368 - protein, 257 aa, Oryza sativa
  unsure (1)..(257): unsure at all Xaa locations
  Clone ID: PAT_MRT4530_18066C.1.pep
KWSGDWYCALASSKLLHQLELAPISVGDPXKVFGNXLTPNLKNIKKKRKKKESPLSIGCASXRASSLRTPPAAGRAPPERPLRALPPLHHLPARVGVLPVAGHAPIARCPRSRRPPXVGAPSPPVRRPPPPAARIARRRRSPARRRRRSXPSARRLCPPVGDEVSGERAGGGEEEXFGGSSMVYFXKYVKKLKGNMSFGLEWSCRAVKTYLHPCSSFFRSSSVNSXPKNRESGPFGTALALGKLKLGARVVPNRPYT

SEQ ID NO: 114369 - protein, 72 aa, Oryza sativa
  Clone ID: PAT_MRT4530_18067C.1.pep
KAQVKIPAPPPRRPTKLSDQFTTSHSHESAVFFSPISSRLLAVYLIVASMNYILFMHAKLSTKSVSRDECNL

SEQ ID NO: 114370 - protein, 821 aa, Oryza sativa
  Clone ID: PAT_MRT4530_18068C.1.pep
MAGEERPERIVVSVRLRPVNAREAERGDGSDWECAGPTTLTFRGAVPERAMFPASYSYASIFAYGQTSSGKTYTMVGITEYSMSDIYDYIEKHPEREFILKFSAMEIYNEAVRDLLSSDATPLRLLDDPEVTFFLDMKGTVVEKLTEETLRDKGHLLELLAVCEAQRQIGETAMNEASSRSHQILRMTVESSAKQFLGKGNSSTLIACVVLMKYLHLNFVDLAGSERASQTASAGMRLKEGSHINRSLLTLGKVIRQLSKGRNGHIPYRDSKLTRILQSSLGGNARTAIICTMSPAHCHIEQSRNTLLFANCAKDVVTNAQVNVVMSDKALVKHLQREIARLENELKFPASASCTSHAEILREKDELIKNLEEQLKELMEQKDTVQSQLDNFRKVASDGDINNHLARRWSRSSDSIPRIVSEGAFSSSDTQDIDYQDQTMDELSVPHSFPPSSQISDITEEHEAQRVAHRAESEPPEEHCKEVQCIETNKLRSRRSQEFFQTPEKKTHTDDQKHSESMSNSAENAIKLYACDFEPSFDLEKPETEESLALKSWFDDSASTTPSSETFRYSTRRPEKVRKSLSPDEIADKSTGNAEEDKSTCNAEEETAVNDIGCVTEVKQKTEMNHAPQSSEQHQPKIAKEVATVSLSKWHIDFERKQQEIIELWHDCNVSIVHRTYFFLLFKGDQTDSIYMEVEHRRLSFIKNSLIADGELHATTASSLRNLRHERDMLYRQMVRKLHLAEKERLYGKWGIDMSTKQRRLQLSRRIWTQTGMDHVRESAALVAKLVEHLEKGQAIREMFGLSFSFKPRRSFSWVGVYSRD

SEQ ID NO: 114371 - protein, 107 aa, Oryza sativa
  Clone ID: PAT_MRT4530_18069C.1.pep
MAPGDANWAFFPPLIYIELANKMRMARTAAEPWASPFFMFSTRHVEPLGDRANTRQDKLPDIDIRDKPRQTQYGVYGGQQKRFSTISDLAECEFEEEDYCVVDYVMQ

SEQ ID NO: 114372 - protein, 79 aa, Oryza sativa
  Clone ID: PAT_MRT4530_1806C.1.pep
HKKLGECWRHLECVEEVPIVCKVAQCFHQEEISLVLVVLSILACDISSSFSTCEVLMTVISVVALPVNMCTHCAICQSL

SEQ ID NO: 114373 - protein, 420 aa, Oryza sativa
  Clone ID: PAT_MRT4530_18070C.1.pep
EEGEEAEMAGEERPERIVVSVRLRPVNAREAERGDGSDWECAGPTTLTFRGAVPERAMFPASYSYDRVFSHECGTRQVYDEGARQVAMSVLSGINASIFAYGQTSSGKTYTMVGITEYSMSDIYDYIEKHPEREFILKFSAMEIYNEAVRDLLSSDATPLRLLDDPEKGTVVEKLTEETLRDKGHLLELLAVCEAQRQIGETAMNEASSRSHQILRMTVESSAKQFLGKGNSSTLIACVNFVDLAGSERASQTASAGMRLKEGSHINRSLLTLGKVIRQLSKGRNGHIPYRDSKLTRILQSSLGGNARTAIICTMSPAHCHIEQSRNTLLFANCAKDVVTNAQVNVVMSDQALVKHLQREIARLENELKFPASASCTSHAEILREKDELIKNLEEQLKELMEQKDTVQSQLGNFRKGASD

SEQ ID NO: 114374 - protein, 89 aa, Oryza sativa
  Clone ID: PAT_MRT4530_18071C.1.pep
RGSQTPPYPLLVLHDAYYLSVRAYSFFYTYLLTHDILLCGLPVSDLCDTILSTYKKVALLNSLFGTRFYAHLQGYRASIMHLCDLKSNC

SEQ ID NO: 114375 - protein, 65 aa, Oryza sativa
  Clone ID: PAT_MRT4530_18072C.1.pep
GNRMRIDYFRVSEKLSDPIVSCDIRGRGIELQVFYESDPCHVSLELSEEVEAPTQVLQLISIFRT

SEQ ID NO: 114376 - protein, 89 aa, Oryza sativa
  Clone ID: PAT_MRT4530_18073C.1.pep
ARRTADGRRCSGGDATGRRWEHASGGLRAKRRRRRWRGSSCDAEGGDGAVGRRTGATAEAAEAEGSEPSTGGAGNGGGKGARRPWKAAM

SEQ ID NO: 114377 - protein, 49 aa, Oryza sativa
  unsure (1)..(49): unsure at all Xaa locations
  Clone ID: PAT_MRT4530_18074C.1.pep
HWLHLQAVTQLSLIVESVIRAWRNHGHSCFLXCEIVIRSQFHTTYEPEA

SEQ ID NO: 114378 - protein, 101 aa, Oryza sativa
  unsure (1)..(101): unsure at all Xaa locations
  Clone ID: PAT_MRT4530_18075C.1.pep
SLYRRLRSDIDQYEGGLETFSRGYEKFGFNHSAEGVTYREWAPGAHSAALVGDFNNWNPNADXMSKVRMETXSGIKDSIPAWIKYSXQAXGEIPYKGXYYD

SEQ ID NO: 114379 - protein, 825 aa, Oryza sativa
  Clone ID: PAT_MRT4530_18076C.1.pep
MAAPASAVPGSAAGLRAGAVRFPVPAGARSWRAAAELPTSRSLLSGRRFPGAVRVGGSGGRVAVRAAGASGEVMIPEGESDGMPVSAGSDDLQLPALDDELSTEVGAEVEIESSGASDVEGVKRVVEELAAEQKPRVVPPTGDGQKIFQMDSMLNGYKYHLEYRYSLYRRLRSDIDQYEGGLETFSRGYEKFGFNHSAEGVTYREWAPGAHSAALVGDFNNWNPNADRMSKNEFGVWEIFLPNNADGSSPIPHGSRVKVRMETPSGIKDSIPAWIKYSVQAAGEIPYNGIYYDPPEEEKYIFKHPQPKRPKSLRIYETHVGMSSTEPKINTYANFRDEVLPRIKKLGYNAVQIMAIQEHAYYGSFGYHVTNFFAPSSRFGTPEDLKSLIDKAHELGLVVLMDVVHSHASNNTLDGLNGFDGTDTHYFHSGSRGHHWMWDSRLFNYGNWEVLRFLLSNARWWLEEYKFDGFRFDGVTSMMYTHHGLQVAFTGNYSEYFGFATDADAVVYLMLVNDLIHGLYPEAVAIGEDVSGMPTFALPVQDGGVGFDYRLHMAVPDKWIELLKQSDESWKMGDIVHTLTNRRWSEKCVTYAESHDQALVGDKTIAFWLMDKDMYDFMALDRPATPSIDRGIALHKMIRLITMGLGGEGYLNFMGNEFGHPEWIDFPRAPQVLPNGKFIPGNNNSYDKCRRRFDLGDADYLRYRGMLEFDRAMQSLEEKYGFMTSDHQYISRKHEEDKMIIFEKGDLVFVFNFHWSNSYFDYRVGCLKPGKYKVVLDSDAGLFGGFGRIHHTAEHFTADCSHDNRPYSFSVYSPSRTCVVYAPAE

SEQ ID NO: 114380 - protein, 75 aa, Oryza sativa
  unsure (1)..(75): unsure at all Xaa locations
  Clone ID: PAT_MRT4530_18077C.1.pep
LFLVNAAVHFTCLKFWRSFCFLHHXINSSQRHLXTMNVQCFYPEEVTTPSVLVLDRGAALEIQANVRGMRRHSSS

SEQ ID NO: 114381 - protein, 407 aa, Oryza sativa
  Clone ID: PAT_MRT4530_18078C.1.pep
MAGYGEENQNGMNGYEEEEEEEEVEEVEEEVEEEEEEEEEEEGADATAAAADAAEEVAEERRGGGGEVEGVGNGEEAGRTAGGGEGGDSSGKIFVGGVAWETTEESFTKHFEKYGAISDSVIMKDKHTKMPRGFGFVTFSDPSVIDKVLQDEHTIDGRTVEVKRTVPREEMSSKDGPKTRKIFVGGIPPSLTEDKLKEHFSSYGKVVEHQIMLDHGTGRSRGFGFVTFENEDAVERVMSEGRMHDLAGKQVEIKKAEPKKPGGGDSSSNGRHSHGSGGGHRSSYRGSGGGNSGSSSSGGYGGYGGGYRSAAAAYYGSTGYAGYGRGYGYGGNPAFGSGFGSGYGGSMYGGPYGAYGAYGGAYGGGGAYGAPGGYGAGGYGAYGGAGGMGGGGSTSGRGSSRYHPYGK

SEQ ID NO: 114382 - protein, 431 aa, Oryza sativa
  Clone ID: PAT_MRT4530_18079C.1.pep
MDLKQVATTLPHATNIRGGAHEGTGAPTSLRSLDGGAMVTSRERHVSRATRAALPSPFTLFVGEASRQWEVDLKTRETGLEGTYQEDPYCRHHWRAAAVVWDGRQRQRGAPRRQQGGKWDAEAGAAAAWDAAAAAAAWGAEAAVAWEEPAAVQGRRRRRTGLSRRIPTPPGGGRVVPRPALPPPPRPAPPRPPHPASPPLPHSKPTSTPRTFTHHLVDLLHSPLYLPRRLTISDIAVHRWSKRTAVASALLSPLLLAAITARHHNNHPPVLLTISLAGVLLAAAAAATTDAASPPKSRSSRLPALWSNVREGISDGGRWSSRPYRQPMARRYRKGYQGHIRWCAGGGDDFASEGREDLDGVGSGGTKGRPPRSRAYATRPDGAQSGSCAELHKSNDHDTVRDGGGVYNTPPSTRRDSLPVNAVSGDWETVN

SEQ ID NO: 114383 - protein, 35 aa, Oryza sativa
  Clone ID: PAT_MRT4530_1807C.1.pep
LVGLILPEEATHRMSSSAADAVRLCFTRPGPASLT

SEQ ID NO: 114384 - protein, 38 aa, Oryza sativa
  unsure (1)..(38): unsure at all Xaa locations
  Clone ID: PAT_MRT4530_18080C.1.pep
TTELFLPSMTSVPSGERGLQPYSASFXSRMHVSSMLRA

SEQ ID NO: 114385 - protein, 272 aa, Oryza sativa
  Clone ID: PAT_MRT4530_18081C.1.pep
MASEQAAESYTVEELVAVNPYNPDILNDLEGFVNDQVSNQTYNLDANLSLLRLYQFEPERLSVQIVSRILIKALMAMPGPDFSLCLFLIPEHVQMEEQFKTLIVLSHYLETARFRQFWDEASKNRNILDVVPGFEQAIQSYAIHVLSLTYQKVPRPVLAEAINIEGLALDKFLEHHIANSGWVIEKGARSQLIVLPRNEFNHPELKKNTAETVPFEHLNKSILVTIRASYLPSYVYVRAKFCIAAVFGFGHNSIFHLPRDYNHSSLSDFCDC

SEQ ID NO: 114386 - protein, 226 aa, Oryza sativa
  Clone ID: PAT_MRT4530_18082C.1.pep
MASEQAAESYTVEELVAVNPYNPDILNDLEGFVNDQVSNQTYNLDANLSLLRLYQFEPERLSVQIVSRILIKALMAMPGPDFSLCLFLIPEHVQMEEQFKTLIVLSHYLETARFRQFWDEASKNRNILDVVPGFEQAIQSYAIHVLSLTYQKVPRPVLAEAINIEGLALDKFLEHHIANSGWVIEKGARSQLIVLPRNEFNHPELKKNTAETVPFEHVTRIFPVLS

SEQ ID NO: 114387 - protein, 1443 aa, Oryza sativa
  Clone ID: PAT_MRT4530_18083C.1.pep
MASSSGGGDKGIVTGMVTHPKPLVDAMLSHQETSTTAKEIILAPNKQALESASQSKDKMIHANPKTLPATGASDTYSTGPGAYTEGDVEEEDDEAVEVLLEDDEVQLAGQWTVLSRFYSLRSPNQAALFDDMKRAWRLRANMKVKSLRDNMFIITFSSEGDYNFVLQGGPWLHRGDALLVAKFDGLTSPSMVPLEFVPIWVRIYDLPLVLMTKRRGELYGSKLGHVREVDVGEDGRNKHDFFRILPFERRMSTIHGQQKSGVARNLAFRGAGSASSSSSKQGKGKSREEIIPDRVDAQDGFEGREDVGDGVVDELLASQTSNLNMSGENMVQKGEPVGMEEEQRHQLSTSNLVSDTDMILAIQNLQQPASFGGESSEDISDTNRKRVQPQSGSKISDRVQQALVLYGQGSGREQAKQVDPKEPARALKRFRKTEVESMEVLEATSPGATVKEADSQIVFLSETRQKADRIRRLRNRLGLRGFAGVDSDGMSGGLALYWHESVNVEIKALCERYIDAYVRLSPDGPLWHATFVYGEPRVENRHNMWSMLRSLRNSSNLPWLVIGDFNEALWQFEHFSSHPRGEPQMGTPFTYDNKRQGRNNVRVRLDRAIADNAWRDTFPNATLAHLASPRSDRCPISLQLSQEMKQPARKKILHYEICWEREPSLPEVVQESWVEAGTKSDLGDISAALRKVMASLHSWSKVKFKNIGRELQKARKKLAELLETYADSAAVRQASDHMNELLYREEMLWLQRSRINWLKEGDRNTRFFHSKAVWRAKKNRIQSLKDSAGTVHRSATAMEQLATEYFQEVYSADPSLDHSIVSSFFQSKVSAQMNEALCSDLTEEEISTAIFQIGPLKAPGPDGFSAKFYQRNWGTIKSEVVKAVHNFFIIGVMPEGINDTAIVLIPKIKQPTQLKDYRPISLCNVIYKVVSKCLVNRLRPFLDELVSPNQSAFVPERLITDNALVAFECFHFIQKNKNPNKAACAYKLDLSKAYNRVDWRFLEQAMHKMGFAHRYLGFPTPEGRMKKGHFQSLQEKAKYYPNGSIVDTCFSGNASPGWRGIEHGLELLKKGIIWRVGNGQSIRVWRDPWLPRDYSRRPITRKGNCCIKWVSDLLQDDGTWRVDKVQEHFWPIDVEMILKIRTSASLESDFLAWHPDRLGKFSVRSVYHLVVSLAETGDCSSSTEVLVNKSWKRIWACNVPQKVRIFAWKAISNSLPTMKNKKKRNLELLSTCCICGAEEEDVAHALCHCQQARNLWSAMYSARAISHDVNSAWSGTDWILNLLEDAMFLMLMWRIWHNRNEITHGKSIAPVAVSQRFIFSYVSSLTTIKQYPQADIIKGKQVAHPDRIRLPSQAPPAVSSPRRWEKPSTRWMKLNVDGSFQASDGKGGIGAVFRDSSGNVIFAACGSMLVCGSAMEADYSRAGRVLQWRFNGRSCLSLWKLIA

SEQ ID NO: 114388 - protein, 98 aa, Oryza sativa
  unsure (1)..(98): unsure at all Xaa locations
  Clone ID: PAT_MRT4530_18084C.1.pep
WFALHLRRIKGSLQGVRAEEVPREAVHVQAPQAEQRQDAQXRVIQVITRSDRPSXRRNAXKKMQLRAMHNIASAGEGVPRYLTQXISFGPEDAEVVMS

SEQ ID NO: 114389 - protein, 76 aa, Oryza sativa
  Clone ID: PAT_MRT4530_18085C.1.pep
VYLWLIWSWCGYSVFSKHWRSIRQLSIRSFYSLTCIRSCSIPYEGRRGIECSWSLCGYSSMYLVFELSTRFFKAIC

SEQ ID NO: 114390 - protein, 94 aa, Oryza sativa
  Clone ID: PAT_MRT4530_18086C.1.pep
PPSVRIINLAGEPLKQTLVEALYQQPGVEHVYDLYGPSEDTTYSTYTRRTAGGQPSIGRPINHTASYLLDAQLQAVPQGVCAELYLAGAGITRG

SEQ ID NO: 114391 - protein, 369 aa, Oryza sativa
  Clone ID: PAT_MRT4530_18087C.1.pep
MWKKIAAGAAEGETWKALAAGAAEGWRGLLPKTASATTKLVPDSSPKSATPTAALNLVADAVAAWRRWLRSPSASPTASCRDDRSLDIWYTAKEFVKKYPVVLFAQPTDTHSQFHRWVYQEWFKPTVRSLLKCVSDHHASNLEFQEITTENVKIFCNADAPQFIPRIKIYCETRKATYEGRKQNFVQTGELITELIKSSVDNPTEVLDLLSEDIKDKLSMLKNPDLSHDADPRQCGVYILVNHPSMLRREMQSPFYLACYDLLMSVDKRIANRAFRKLPYKNWQSRALQHPLLKDHLINRRSSYGRDKYHQARYHRNVASHKTSWKSKYKAEEVDEIIHHHFPMILTRLMKVLSKMKLLIRLTLHNFFG

SEQ ID NO: 114392 - protein, 111 aa, Oryza sativa
  Clone ID: PAT_MRT4530_18088C.1.pep
HSISNSSYAMAKCMTYTHQGVMLFFLVLLVCSAIPAQIRGQNTNKIRSDLLMGVKGRNGFLGLDYKPDHCVQTRGGFYCCSLDQLCYPTLEECLPNCTPPKVHRGSQLTSD

SEQ ID NO: 114393 - protein, 198 aa, Oryza sativa
  Clone ID: PAT_MRT4530_18089C.1.pep
MAASLLRSGHRLRLLRHGSLSWASFSAAAAEELIDVRKLPTDYDASTFDPTAPSRPPPSDRVWRLVEDVSSLTLAESAALSALLLRRLDVPAPPIAILNSAAGLGGGGGAGAAGAAGEKAGGAAAAEKTVFELRLEAFDAASKIKVIKEIRSFTDLGLKEAKELVEKAPAVIKGGVSKEEARTIIDKMKAVGAKVVMD

SEQ ID NO: 114394 - protein, 76 aa, Oryza sativa
  Clone ID: PAT_MRT4530_1808C.1.pep
LHTHGIHTPRIQSTPPNCSHWHVSSRLVTCGHFAPACRVHRYYTRDTPALDQTSHSSRWLLRRGWCDPCVGVRDIV

SEQ ID NO: 114395 - protein, 37 aa, Oryza sativa
  Clone ID: PAT_MRT4530_18090C.1.pep
MSIGITEPRSKQEDASEKQTTASSEFREQEMTSSVAS

SEQ ID NO: 114396 - protein, 454 aa, Oryza sativa
  Clone ID: PAT_MRT4530_18091C.1.pep
MCGILAVLGAADWSQAKRAHVLSCSRRLKHRGPDWSGLYQCEGNFLAQQRLAIVSPLSGDQPLYNADRTIVVVANGEIYNHKKIRKQFASKHTFSTGSDCEVIIPLYEEYGEDFVDMLDGVFAFVLYDTRTKTYMAARDAIGVNPLYIGRGSDGAVWISSEMKALNEDCVEFEIFPPGHLYSSAAGGLRRWYKPQWFAENVPATPYQPLLLREAFEKAVIKRLMTDVPFGVLLSGGLDSSLVAAVTKRHLIKTEAAEKFGAELHSFVVGLEGSPDLIAAREVADHLGTIHHEFHFTVQYNADLGRIEKWVMRKAFDDEEHPYLPKVSDEMMKNAAKVYPHNTPVNKEAYYYRMIFERLFPQESARETVPWGPSIACSTPAAIEWVEQWKASHDPSGRLIASHNSASANHTNHANANANGNSNGKANGNCAMAANGTNGVGLVVANGTANGKMEA

SEQ ID NO: 114397 - protein, 137 aa, Oryza sativa
  unsure (1)..(137): unsure at all Xaa locations
  Clone ID: PAT_MRT4530_18092C.1.pep
MSPKKIIKERVAKRKEGGSEGEMVAEEGAEPSASEGEAGAAPPPVAQPTLPPSVPTLSTNAEAAKVEAGAKALXVRGAILSSQVPGVPPAAAFAQQATMSMAITTSQANANLKAQAEVDMGAMRQSMAKLQDTLRQM

SEQ ID NO: 114398 - protein, 347 aa, Oryza sativa
  Clone ID: PAT_MRT4530_18093C.1.pep
MGGYENGDSPAAAAGDGGVILGVDGGTTNTVCVCLPVAMPPPESPGAVPVLSRAVAGCSNRNSVGESAALETLEQVMAQALTLVNTDRSAVRAVCLAVSGVNHPSDQQRMLDWIRDLFPGHVKFYVENDAVAALASGTMGKLHGCVLIAGTGSIAYGVTEDGKVARAAGAGPVLGDWGSGYGIAAQALTAVVKAYDGRGPHTNLTREILRKLELSSPDELIGWTYADPSWARIAALVPVVVSSAEDGDEVANKILHDSVQELADSVVAVVRRLKLCGEDGMDQFPLVLVGGVLEGNKKWNISGEVVRCISKVFPGVHPIRPEVEPAIGAALLAWNHHRKGLKLENGS

SEQ ID NO: 114399 - protein, 163 aa, Oryza sativa
  Clone ID: PAT_MRT4530_18094C.1.pep
MIPRAPSLFHIEDGAVGVAASTKKPMPADSGELVGLRLIIQQSPRQRPPLSVLRRSAVRPSPAATAAASQDEAGAPAGRGFMGLGFLNCCYCCHKKLYADMDVFVYKGEHAFCSAECRSQQMAREERREIEMLVRRRRDAFHRRRASPPAKIGGHARLQIAAS

SEQ ID NO: 114400 - protein, 302 aa, Oryza sativa
  Clone ID: PAT_MRT4530_18095C.1.pep
MVFTLKEMEEATNMFSERNLIGKGGFGRVYRGVLKDGQIVAIKKMDLPTSKQADGEREFRVEIDILSRLDHPNLVTLIGYCADGKHRFVVYEFMPKGNLQDILNGIGEVRMDWPVRLRIALGAARGLAYLHSTTAVGVPVVHRDFKSSNILLTEHFEAKISDFGLAKLMPQDIDLYATTRVLGTFGYFDPEYALTGKLTLQSDVYAFGVVLLELLTGRRAIDLSQGTPEQNLIVRMQQVSGDRKRLRKVVDRDMARSSYTPESVSMFAGLAARCVCFESAGRPSMADCVKELQFIMYANMKI

SEQ ID NO: 114401 - protein, 512 aa, Oryza sativa
  Clone ID: PAT_MRT4530_18096C.1.pep
MPPRSLTLSRLPVAALGLPFSSCSPPPPRLRFPFAARRARSLATRASSSSPDSSFGSRMEDSVKRTLADNPVVIYSKSWCSYSMEVKALFKRIGVQPHVIELDRLHPQGPLLQKVLERLTGQSNVLNVFIGGKHIGGCTGAGAGAGAAIVVVVVAVAAAVVCECEAKPRAFFVFGDSLVDSGNNNYLMTTARADSPPYGVDYPTHRATGRFSNGLNVPDIISEYLGAESVLPYLSPHLDGPKLLHGANFASAGVGILNDTGIQFANIIRIEKQLRYFNQYQDRVRGLIGGAAARRLVEGALVLITLGGNDFINNYYLVPFSARSREFALPDYVRYIIGEYGKVLRQLYHLGARRVLVTGSGPLGCAPAELATRSATGECDLELQRAAALYNLQLVRMTRELNAELGAGDVFVAVNAYRMHMDFISDPAAYGFATSKVACCGQGPYNGVGLCTALSTLCPDRSLYVFWDNFHPTERANRIIVSQFMSASPDYMHPFNLSTILAMDAATAAAAP

SEQ ID NO: 114402 - protein, 130 aa, Oryza sativa
  unsure (1)..(130): unsure at all Xaa locations
  Clone ID: PAT_MRT4530_18097C.1.pep
PGICWMKRDFVPEGSNMNVGFVTQSKELLMPRFDKILTGAXGKRVLTLAKQLVADGRLSGISSRNVSVXEGKAADEMMLIGSGILVKPVVQWDDQIIGSGKEGPIAQMLFNLILEDMRSGPPSVRIPVSY

SEQ ID NO: 114403 - protein, 162 aa, Oryza sativa
  unsure (1)..(162): unsure at all Xaa locations
  Clone ID: PAT_MRT4530_18098C.1.pep
SGLRNHALLRRLHGRAGDQVFGXSARRDYSLFVNIYFTFTNMSNTGDNGNTGDKEKEASVNTNGGNTASNSSRGPFLGYNLLTLFQLELAAFQYDVSPPMAPARSNIPASSTAVGGAQSAAAAAAAAAGPSEDRAAANGGEMLCAANDTPRGLPGPLRGWEP

SEQ ID NO: 114404 - protein, 63 aa, Oryza sativa
  Clone ID: PAT_MRT4530_18099C.1.pep
MLDTRRRAIGRGEDSKGRFGTAGPHVSWTERNRSRFRQEQEPISGNFLCGAIAAHDYEHEHEQ

SEQ ID NO: 114405 - protein, 174 aa, Oryza sativa
  Clone ID: PAT_MRT4530_1809C.1.pep
MSSSSSSSVSPSPYTTLVGRVSCEREIKKSKFIAIAAPVPDERAAMSFLNEVSDPRATHNCWAYKLGEQFRYNDDGEPSSTAGKPIYSAIISSGIDMVMVVVIRYFGGIKLGTGGLVRAYGGVASECLKDAPTCLVKPKARVGMEVPFDLLGTVYHQLQHYQAEDIKQDYDTGK

SEQ ID NO: 114406 - protein, 45 aa, Oryza sativa
  Clone ID: PAT_MRT4530_180C.1.pep
PTRPKKKKKKKKKKKKKKKKKNKRKKNIKKKKLKKKKIKKKGRPF

SEQ ID NO: 114407 - protein, 376 aa, Oryza sativa
  Clone ID: PAT_MRT4530_18100C.1.pep
MEDIVDIFLVHVESMEPASPHMLRRLRKKIGKLFKKVKVRRKIAGAIQDIDKKLKEVAARMATELVGIDGPMDELIEMLALGDDIHPSMNKPKVVSIFGFGGLGKTTLAKAVYNKFKPGFDSGAFVPIGQHPDMKKVLRDILIDLDKQRYMHSIMMLLDERQLMNELQEFIQKKSKHSLQHVWSLLHLRYLGLQYIDSIEIPEDVGHLKFLQVLDLLGTQIKELPESMGLLTKLVCLRANRIYKVSAGLIGELTSLEEIWIEAENDDRIQFMKALGKLSKLRVLWIRLSTYEPDERPNRDLLDCLHNLHSIQTVDIYASSGKKSVMALKEQDIETLGRLPELNYLKLDSNYTATISMGGTSGDVYFQKLRIFKSPA

SEQ ID NO: 114408 - protein, 769 aa, Oryza sativa
  Clone ID: PAT_MRT4530_18101C.1.pep
MKPLSHEDSKKLLYTRIVGGEDKCLDSDPSVDACEKILKKCCGVPLAIITMASLLANKPMEDWPVVYKSIVWGMEAMTIIFPEDYYIEKNMLIWKWITEGFVHEEKAAGIGLFELGEGYFNELINRSLILPAEAEDKGYIDGCHVHDMVLDLVRLLSAEENFVTVLDGNEELVLLSRNSRRLALQCKSSEPNVECPLLANKGVEQLRSFVVTECCDISMASTGSHVIRVLALQNCLILDHCSKHSLQHVWSLLHLRYLGLQYIDSIEIPEDVGHLKFLQVLDLLGTQIKELPESMGLLTKLVCLRANRIYKVSAGLIGELTSLEEIWIEAENDDRIQFMKALGKLSKLRVLWIRLSTYEPDERPNRDLLDCLHNLHSIQTVDIYASSGKKSVMWEEGHASPQCLRHLCLQTLKFCRFPMWLNSSFLPNLCYLELQVMALKEQDIETLGRLPELNYLKLDSNYTATISMGGTSGDVYFQKLRIFKAPRSLVWFDLHNIICNEKAIMPSLESLKFTVHVRFLKDTNLLCFENQLGFRNLGRTSLQRVEADIYCAGAHTKEVEEAEAALAQAAAVHPNHPTLKIVRISEDRLLSPYKELSVANKLLLISYNSSRPRLIPDRNITYKTAFKNVKARVVKDDVGYFDFHWLLHNPNIRKFEVYIDCEDATLEEVEEAEAAAWCAANDHPNRPALEIIRRDEDKMMLFDIHQEKFSVSINYENASLEEVEEAEAAARYAVDVHLNRPTLELKRYGEKKMALSDQDQTEQKPCTTL

SEQ ID NO: 114409 - protein, 39 aa, Oryza sativa
  Clone ID: PAT_MRT4530_18102C.1.pep
PNLAWMGHSIHKGVPSMEPWLHLLMRARLLKIIYLGFHP

SEQ ID NO: 114410 - protein, 146 aa, Oryza sativa
  Clone ID: PAT_MRT4530_18103C.1.pep
MMSMASTTASPFCPSPMPRGRKCTVRVQAGAAGADASDKSLEIMRKFSEQYARRSNTFFCSEKSVTAVVIKGLADHKDQLGAPLCPCRHYDDKAAEVAQGFWNCPCVPMRERKECHCMLFLTPDNDFAGQDQAITLEEIKDATSKI

SEQ ID NO: 114411 - protein, 295 aa, Oryza sativa
  unsure (1)..(295): unsure at all Xaa locations
  Clone ID: PAT_MRT4530_18104C.1.pep
LFLKRKRELLRHRLGFAMDWVHGDGSRKRTTETDPSKNEXRDLSVHDRPTTDGNDDVSGDVTTGGGSGVHARRRMTARQRERREPTRRGRRGELTSDQRRSGGDLRLDDDGGVPAVDSDGGGADEVGDDLVITMAXSRATTTMTGAAAAHGWTNGSDGGARLQGARALPATRGEGEGAGGGKEATAKAHGDRXRDGRFRVRRREIDLNXTRIHGFPNRIXRRFHKRKDRGDPGDHFPSIDFTGKGKARWAPPVSGRTRARAAAAGLGRLGRGREREVLGRLSAQSQKRTFKTFSN

SEQ ID NO: 114412 - protein, 54 aa, Oryza sativa
  unsure (1)..(54): unsure at all Xaa locations
  Clone ID: PAT_MRT4530_18105C.1.pep
PPFFFFFSFRKNKPSCDKLPSIWLKYVLGIIWYETVITTQRXFXXXSKIXLXRG

SEQ ID NO: 114413 - protein, 111 aa, Oryza sativa
  Clone ID: PAT_MRT4530_18106C.1.pep
MGSKRSMARLAEVASTVASGVEDAEHHQQAGVLSGGRGPMTPAEVKRWPSPLPSPPPSGSGEAGLAWPTEIHTSTVARGWPRAGAVRQVVGEIDDDRRRCCCCLIDDNTNA

SEQ ID NO: 114414 - protein, 53 aa, Oryza sativa
  Clone ID: PAT_MRT4530_18107C.1.pep
KHLAGVYMTKVVLSALYFRKNPTQEASYQQAPSIKIKDLLMNWETHTPFHPIS

SEQ ID NO: 114415 - protein, 96 aa, Oryza sativa
  Clone ID: PAT_MRT4530_18108C.1.pep
IDLLSSQDIIKYKQLQITKYGVTQRQLLKTPYSVVTRILAYRSPTDKVVLKHGLHLSYSAAAYDLIKFSALPPTNNRRYSLSRFSATRSSNAYEHL

SEQ ID NO: 114416 - protein, 66 aa, Oryza sativa
  Clone ID: PAT_MRT4530_18109C.1.pep
LVGFAIFRKKINQSDLKNLEDVGGNDLAVALHQKFARRDWRFFTSVDGDHTLGMMMMMMIYSCMYN

SEQ ID NO: 114417 - protein, 50 aa, Oryza sativa
  Clone ID: PAT_MRT4530_1810C.1.pep
VTSPMRPRLRVTCVSSLFCLEMLLSYNNFRRASICTFPCEIDEICNSMYV

SEQ ID NO: 114418 - protein, 405 aa, Oryza sativa
  Clone ID: PAT_MRT4530_18110C.1.pep
MDILLTALASDISSRVISFLVAKYRKQNTMDKMIRLHRLLLRAFTIIEEVDGRYISNQGMLLQLRQLRIVMYKGHYVLDTFKGHAEVSRSFNLNKIQVIIENLESMMEVLPIIGPQEIGKKTLVEHVLNEEMVKRKFSCIICLNSDGLRNLLGDGSPIEQNNLIYSNGKCLIVVELQHDNDLIAWRRFQSSLSMIKFVSKVILISSVQGVSRLGTTQALRLKKMRKDEFWYFFKTLSFGSTNPDEHKELIPIAMKIAVLINRDFIGAHVFSRLLRTNRNAQFWRRMLLFLNKVIECNLHVFGEHVSDIVGSNRPYYVLSNRDDAPHIWCTSSNTIPGHLVDWGSTIITMEGIMSESVALPTEGNFQVIRWQSPIAPYYSYISNCEIRKVSQVVSEEKCPKRNRRL

SEQ ID NO: 114419 - protein, 438 aa, Oryza sativa
  Clone ID: PAT_MRT4530_18111C.1.pep
MESEAGSAPNGCTSTVKGSEERHSLERRHDDGSCISEIKLISNMVVKKKRGRRAPPSSRRLSGNKVISGEDAVQNRNHAKEEDQAGNSSDVALSPSSRKTEGQDQSTNPKDLFEKACHQATEMVTESTTGCKKSFWEEKGSDNRRGRQATLCVKQDGLDIETTGKDVSASEAYEKSSTLEDTSVGHAAAKSVNPEDNSLDPMDNVSDTHVNATSSEDKSSEEVEDVKVCDICGDVGEEERLAVCTTCNDGAEHIYCMRVIIQEVPEGEWLCKKCENELEYEKKKQLEKSQLKVGASKSQFFERKTNIANASKSNSYEDEPSKALEGKISKPDTALKNRSSFENEVENENGDKKELNSTNQCNNSNSKRKEEGAGIISSIKQSITERCGFSMGAESRKRLPLSCESSFRLDVEKGKQAATKVPTSLAFDAAKNLGPPLR

SEQ ID NO: 114420 - protein, 145 aa, Oryza sativa
  Clone ID: PAT_MRT4530_18112C.1.pep
GGTLGENNNGWKGKRRGKKNITKLAKGNPKIRPETPQKKRLPKKPNPQTIGLEGKEKFFRLPKSRGHKKGEQLKKGTTPQKKGGGKSTKGGGENLGGGKPFHPPSRLKFGGAFKPSPRGGPGGGNPKPKPGSQTGINAWRRRGAT

SEQ ID NO: 114421 - protein, 80 aa, Oryza sativa
  Clone ID: PAT_MRT4530_18113C.1.pep
ITLATTTTPLQADLGNNGAAYYSYLALALAVVTFLAGVAQVIAFVWVSDDPRRAGAAGNWFFVYASVASLVVAVSALAVL

SEQ ID NO: 114422 - protein, 146 aa, Oryza sativa
  Clone ID: PAT_MRT4530_18114C.1.pep
MTSARRPARVDELAGVREVGGGNGDHLHVEDNETNPLVLTTTRNDARRRPATRRKTAAARVDGDERAPVVGGRKEGAAELPCTTAHLLAMTASDGDGGDGAAALPKTAGDGGGLGERRGGARRHGRTRERGQTEEEIKGKLYMSSD

SEQ ID NO: 114423 - protein, 183 aa, Oryza sativa
  Clone ID: PAT_MRT4530_18115C.1.pep
MREVADQKHDRATVWGALKRWRFEQGAVMEWDMAACCDDSCSSNIVINMNMLPEIIASNNIFNTAEMTSTNPENTLDPEAMVLVLSPSLSLSLPSPLLPMLSSNAAAPGTGQHVAKGCRCRGSNVESIHAKNVLPKNLIAYLPMQLLRWMVFQGHARPKYPCVQVNISALRKTSQVILRIKAT

SEQ ID NO: 114424 - protein, 275 aa, Oryza sativa
  Clone ID: PAT_MRT4530_18116C.1.pep
MAGSSYGDVHESARKLVGKVALITGGASGIGECTARLFVKHGAQVVVADIQDEAGARLCAELGSATASYVRCDVTSEDDVAAAVDHAVARYGKLDVMFNNAGIGGAACHSILESTKADFDRVLAVNLTGPFLGTKHAARVMVAAGRGGCIIGTASLASAVAGTASHAYTCAKRALVGLTENAAAELGRHGIRVNCVSPAAAATPLATGYVGLEGEAFEAAMEAVANLKGVRLRVEDIAAAVLFLASDDARYVSGHNLLIDGGCSIVNPSFGIFKD

SEQ ID NO: 114425 - protein, 427 aa, Oryza sativa
  Clone ID: PAT_MRT4530_18117C.1.pep
MVREIFLTRAEAFDRYEAHPVVRQLEGDGLVSLHGDKWAHHRRVLTPGFYPDNLNRLVPHVGRSVAALAERWRAMACAGGGEVEVDVAEWFQAVAEEAITRATFGRSYDSGRVVFRLQARLMAFASEAFRKVLVPGYRFLPTKKNRMSWGLDREIRRGLVRLIGRRSGGDGGEEDETTTELKDKQDSGFNDLLGLMINAGVDRTMPVEDMVEECKTFFFAGKQTTTNLLTWATVLLAMHPDWQDRARREVLAVCGDAAGELPTKDHLPKLKTLGMILNETLRLYPPAVATIRRAKFDVTLGGGGDGDAGGIHIPRDTELLVPIMAIHHDARLWGPDAAQFNPARFASGAARAAKHPLAFIPFGLGSRMCIGQSLAILEAKLTMAVLLQRFDLALSPTYVHAPTVLMLLHPQYGAPLIFRPRQSQPSN

SEQ ID NO: 114426 - protein, 537 aa, Oryza sativa
  Clone ID: PAT_MRT4530_18118C.1.pep
MEAVAVAAAVLLLLHVAARVADAVWWRPRRLEAHFAGQGVRGPPYRFLVGCVREMVALMAEATAKPMPPAAPHNALPRVLAFYHYWRKIYGPTFLIWFGPTPRLTVAEPKMVREIFLTRAEAFDRYEAHPVVRQLEGDGLVSLHGDKWAHHRRVLTPGFYPDNLNRLVPHVGRSVAALAERWRAMACAGGGEVEVDVAEWFQAVAEEAITRATFGRSYDSGRVVFRLQARLMAFASEAFRKVLVPGYRYGTRHEQPKKLPNDSPILAEIGLTVGAGIRSNRFLPTKKNRMSWGLYREIRRGLVRLIGRRSGGDGGEKYKTTTELKDKQDSGFNDLLGLMINAGVDRTMPVEDMVEECKTFFFAGKQTTTNLLTWATVLLAMHPDWQDRARREVLAVCGDAAGELPTKDHLPKLKTLGMILNETLRLYPPAVATIRRAKFDVTLGGGGDGDAGGIHIPRDTELLVPIMAIHHDARLWGPDAAQFNPARFASGAARAAKHPLAFIPFGLGSRMCIGQSLAILEAKLTMVFRPRQFQPSN

SEQ ID NO: 114427 - protein, 130 aa, Oryza sativa
  Clone ID: PAT_MRT4530_18119C.1.pep
MYMFCNCFKQLNKCPHLFSSLSGALGSSNSSFNNIDHLRQSSSSGQARSYTSSPLGALRPKMFPSGNRLLHTSRPLSAPVANRPLSPHLPLKKPQLSATFSISHRIFGAALGAVIISIPLATKFSLMFDV

SEQ ID NO: 114428 - protein, 214 aa, Oryza sativa
  Clone ID: PAT_MRT4530_1811C.1.pep
MSLFGLGRNQKTFRPKKSAPSGSKGAQLRKHIDATLGSGNLREAVRLPPGEDINEWLAVNTVDFFNQVNLLYGTLAEFCTPESCPTMTAGPKYEYRWADGVQIKKPIEVSAPKYVEYLMDWIEGQLDDESIFPQKLGTPFPPNFKEVVKTIFKRLFRVYAHIYHSHFQKIVSLKEEAHLNTCFKHFILFTTEFGLIDKKELAPLQELIESIIPY

SEQ ID NO: 114429 - protein, 96 aa, Oryza sativa
  Clone ID: PAT_MRT4530_18120C.1.pep
VQSLPPKEGVSPKKVTPPRQGLAQIFPRIGKNVTPLEVSFPGNMVFDIKAFFFFFSSLIMPLLISFFLGGCTCNFIHLSGCFSVFFYGVISYWWVY

SEQ ID NO: 114430 - protein, 144 aa, Oryza sativa
  unsure (1)..(144): unsure at all Xaa locations
  Clone ID: PAT_MRT4530_18121C.1.pep
SFALLSCICGVYMAVTRASGGGQWSSGEVGRPRRTRCGQCLRWRDPTEEQPVVARHGGGGXPFRRLGEAAAWHSVTTLPRERIGNAAAGQIRGEAAGRCRRAVAGVVGLRRAATTLKISPSTPLPFFIFISFSFLRFLLSFHLP

SEQ ID NO: 114431 - protein, 2241 aa, Oryza sativa
  Clone ID: PAT_MRT4530_18122C.1.pep
MIRYQIRNEYGLSDPELYAPGEKDDPEALLEGVAMAGLVGVLRQLGDLAELFVGETMPLFLFYLRTYVFPSWKQRFAAEIFHDLHEDVMATASRGHGLMLRLRQLEAEFPAVEKAIISQSDHSNYPHDDGVEWHTNLQIDQNMITQGDMPRFILDSYEECRGPPRLFTLDKFDVAGAGASLKRYSDPSFFKTEHSSDMIETDAVIEKKPRKIKKKALRWRKGETLESLLIANSESHTTSKDRSSRKVPPRTTKLKYRYPRESDHKNISRICREHLQEIISSQQKIFSNYSSRYYHPKFRLTESSETASSFGEIDNFSARAQSSAKLELTKVVPINEFDTKGIAPTHINGSDCLEALEADDRQLQATQHEPDKVEDVCKRSLVEQNAMLSNSDRMQSVQEENLLSAMVPADQNDDRCRPDDTGSDQENFVDALNNMESEGEAHAEMKIKKDPGAKMELDELNFHRDEGENERHTEFSELGHVIDSSPWLNDSYNGGEPNHAISSNTNFSGVDCTNDEEPSNDVDLMEMDVSSSSSVFSDDNDVFRTNGNMNGFQQYQEASLSNDHHAVIAHSSDKQSSQKSSGLDGSSIESNDFIEKPFHSLEDDKNFAPDGTSVILGRPNDVSQCEEEIEVGNADDSLLQPTISNQEVHRSNNQLEGVAMHASISSGKVASFPDMDPGMCTKDLELDNVLVPKETVANTPPTGLGTDHIHEHVDELDSGVAPINSSIQSDSTYESDDDDMAEDLNSLPEDDLYKHDVEDLYKHVLEDDGIIALGKGPCSTRANMHQEDPMEVSDVRGDFSNGQELPVLTETASPQGELVGGGELPLLTETASPQGGEEDLADEVVVISSRDLNDEKKPSLAEVPLACGDASLLDSSASCLEHDESTETGEIAKSDEVLVNVEVAEESITGRFTDDMTPFQEDLPDGAKYSEDAEFLANPRVDNSRHDVQLQSSSPCREELETVKAPCENLCALDESREHIFEKSVLQINNLPQHIETKNTGEACSDIDDIQHLSALHCPKNPVCQEELPDETNLSADVQYHCDVEKGGAVILNSKMVEEQPENIDLVREPRAQDSFGTNPFMDPGYKANHALADPCPSYQPCFSEEEQDFISELLIPHGNMGIEDLNPVPVADSLWEPATPPDEVPLPSEVMTEEDFRSFCHEYHEMDLTATPESIDDKPASDSNVVSSSLVTSESEFLYCVSAVRTGVDQEESRDAPDDTLMHFSAKADPDDKAANSDLKSDEPFIDEKIHELGVPSVPMELEVEQHALHEVDSHGDSQLLDNDMIDETCSSPSGNSIAVKDKQETCANLVSRAFINERTDELEVPVSNSVLLEPSEEVHDSDEYNYQDVPWSSTDEGRDEVDAHPLSKRIQTQGSEALVLGELDSRAVPSCSVNEMADHVDAPPLSTVLEAEQEPEDCISGEHNSQVTKSSLVDEKIGELDDASPLSNTLLAEMEREVCVPGKSASQIASCSPTPSNEKIDELNAPPLSSSGLIELESEDSVSGDLDSQIIPCSSPNDKTNEPDGATSTHVLPVELEQEVCSFPELDSLVAPCSLNDDKVCELDEPPCKQLESENGSYCLPQVDCQIEPCYSESVVLSEASTMSSANAMPSTEETYRLSSPVPPPNEPFSNVSYEDPQKPPPLPPLLWRLGKPRLGIASTKGHMLEPERGKGPVLHTSDAGMDNMPGCLSGMTESIEPVSSQEIKERHLDPILDNNERGVEFRRLATPPTANDVAVTEHVQLFSDACENIKHQEHPQKPPPLPPLLWRLGKPRLGIASTKGHMLEPERGKGPVLHTSDAGMDNMPGCLSGMTESIEPVSSQEIKERHLDPILDNNERGVEFRRLATPPTANDVAVTEHVQLFSDACENIKHQERVSSSETEAEEHQNGTGITDVMDSHPPKPLFLVPSISQQGLQGSVFPSDTSDNGEHSSYTSRAVSEDEKTVDDHNAACAMDLHITSSSASSHVSENGCNQQSHGESLPVTSVDKVHTSDASCEDNKLKNHFITSEVCSDATNLSASGLLTEEENIHNVEDQYEGPLPSEESSGCLDYPHDDHNSEKEDIHQPDGYAASPGNNNHFDSSHEGGYLHAEQPPVMGWTVRPQMLHPNYGISMEENQFEPKVEDHLLIKKPVSIRNIPRNPLVDAVAAHDRSTMRKVSELVAPTDKSKPNERNLLLEQIRNKTFNLKPVSSAKQPTIRTPPRASTRNLKVAAIIEKANAIRQAVGSDDEDGDNWSESSDT

SEQ ID NO: 114432 - protein, 408 aa, Oryza sativa
  Clone ID: PAT_MRT4530_18123C.1.pep
MALTGHRRGGHVCGHTGGPDRPEADRTAEGRDGWARYCQDRPSRPWRGGGARSPATATGGGAGSGGAQGRQAAHARERRRGAASARAWRKAGSAERWRAAARPPATSGGAGRREEGGKRERRRRRFSPCPHKRREGDGKAAGGEERRRRAPRKDGSAGLRRLSVKTAARPRPGRAWGSPAEETELTLSQGVSSAIREDGEVAELALSAAKPVMAVAQPEVDGDGGSRRPEATKRRRPRVDSGGGVSDGGEVWLESAVAAERGGARGCGASEVERGNGAVDGVRTVAAVPGRATAQCGVNRSGGAARLEFSGERRRSSGDVGEWGSNGADFWGENGGESGEREGRGVDRAHTRAGTGRRAGRGGDVDGSGGHGSCRPGLEVRGDPDRWVLGVPAQAAYARQNMEVVETA

SEQ ID NO: 114433 - protein, 71 aa, Oryza sativa
  Clone ID: PAT_MRT4530_18124C.1.pep
LLLAPSPAAAAAAARRRKVGGSALRVAARACGNWRDPRTLVRGSGCRRCGRRSGWCWCGTGRAPVTRRGGS

SEQ ID NO: 114434 - protein, 64 aa, Oryza sativa
  Clone ID: PAT_MRT4530_18125C.1.pep
RQCKHLSLCVPDDAQISRSYHFLMSQGDTDQIRQCTISIAYGVNKDIVCWHTPGSHCHGCDLDS

SEQ ID NO: 114435 - protein, 319 aa, Oryza sativa
  unsure (1)..(319): unsure at all Xaa locations
  Clone ID: PAT_MRT4530_18126C.1.pep
MEIRAPPTSLRLAXPPPPASASFRRTALRTSFLNGSVSLRLIQVRQSNVNRFKCNGIRSNLLDRFSRVVKSYANAVLSSFEDPEKILDQAVLEMNXDLTKMRQATXAQVLASQKRLENKYKAAEQASDDWYRRAQLALQKGDEDLAREALKRRKSYADNXSSLKAQLDQQXGVVENLVSNTRVLESKIAEAKQKKDTLKARAQSAKTSTKVSEMLGNVNTSGALSAFEKMEEKVMAMESQAEALGQLATDDLEGKFALLETSSVDDDLAQMKKEISGSSSKGELPPGRTAVSNSGAARPFRDIEIENELNELRKKANEY

SEQ ID NO: 114436 - protein, 657 aa, Oryza sativa
  Clone ID: PAT_MRT4530_18127C.1.pep
MAAAARAAAVAVVVVVVVLGVEVAAALNTDGLALLALKFAVSEDPNGALSTWRDADNDPCGWSGVTCVDGGGGRVAGVELANFSLAGYLPSELSLLSELVTLSLPYNQLAGQIPVAITALQKLAALDLAHNLLSGQVPAGIGRLVSLSRLDLSSNQLNGSLPPAIAGLPRLSGVLNLSYNHFTGGIPPEFGGIPVAVSLDLRGNDLAGEIPQVGSLVNQGPTAFDDNPRLCGFPLKVECAGEKEDPRIPEANGGMNPGAAAAVGRPPRRRSSPTVPVLAAIVVVAIVAGVILQWQCRRRCAAATARDEEKESAKDKSGAVTLAGSEERRNGGEEGEVFVAVDDGFGMELEELLRASAFVVGKSRGGIVYRVVPGHGPAVAVRRLSEPDDGDGGSDSGWRRRRAFETEAAAIGRARHPNVARLRAYYYAPDEKLLIYDYLSNGSLHSALHGGPTASPTPLPWSMRLSIVQGAARGLAYLHECSPRRYVHGCIKSSKILLDDELRAHVSGFGLARLVAGGAHKAAAAQSKKLGGAACALRGGGGALAYVAPELRTPGGAAAAATQKGDVFALGVVLLEAVTGREPTEGEGGLELEAWVRRAFKEERPLSEVVDPTLLGEVHAKKQVLAVFHVALGCTEPDAELRPRMRAVAESLDRINA

SEQ ID NO: 114437 - protein, 712 aa, Oryza sativa
  Clone ID: PAT_MRT4530_18128C.1.pep
MSDPGEPSKHSQWMSHWTKGSSSAEPQVGRSNDSPEDAKYDICEDNSGPSNFEIMKSRLFERLMVGISQERASLEHGQKLNSNMKVVVKDARRHAVQNQIDQGDGPIQKSVMQKDVLYAKAVVSKSLSIQKLSELSVDCQKLAGSDDLSSEWNHFPMLAINRKIDSILNPKRKSAKSTGPNDVFVPKQTLKLNMTTANLMAFSSQEYELHSHRTTDETMDHCKHAGGIVSRLEDHAGVMLNPAEQKLKGQLLPATSCSCSKDDSNSSDSLLDEQHTSRYIADSDQEPTCRSREKRLKSSENNDTNCKIGSCSQNQKSRAPGHHKHKGSAGVMFRTSVPGKEFEAAEINCSDKINQRHLNTQRIVSAANVTGSCIPDPAADISTVNGRGEAVTQPSSISGDSTKRKAPYLFEMLTIPSKAQNMNPEDSLPSGNSTAFGVHMYGTNIGSHLFGANNKSSTETEILSGDSQHVSKSSAGIASLLAQKAKSEQLATLYMKGASGCNVNEHQGVSSKAIVANKQQCYNPRTARMDLDLMQFQLSRMRNQESQARTEPGDRWLKRLQIDSKDPHHLPCSKRSKAGDGSGRPVTGGASSMAPRCDGSNDDDDIVDRDHKEEQGLDEGVEIQGGREASPVPAKSDDRWIGRWCQGGVPVYHEDDHDQRKEVTKPDLAAGDSGGLEGQFPSIKAMAMMGRAMSKVRPCQEERRGSFMVWKA

SEQ ID NO: 114438 - protein, 31 aa, Oryza sativa
  Clone ID: PAT_MRT4530_18129C.1.pep
FLSRAFVLDWTTLTINLIQPLIIVIIIIMIK

SEQ ID NO: 114439 - protein, 48 aa, Oryza sativa
  Clone ID: PAT_MRT4530_1812C.1.pep
VYLLAAVCNFFVTFIKMSLSVIVPSSSCCSVIADSTINKYLLIYGGRL

SEQ ID NO: 114440 - protein, 860 aa, Oryza sativa
  Clone ID: PAT_MRT4530_18130C.1.pep
MAVGLRRSDSIADMMPEALRQSRYQMKRCFQRYVSQGKRLMKRQQLLDELDKSVDDKADKDQLLQGFLGYVISSTQEAAVLPPFVAFAVRMNPGIWEFVKVHSANLSVEQMTPSDYLKNKEALVDDKWGAYDDDSQLEVDFGALDLSTPHLTLPSSIGKGAHLVSRFMSSKLTDNKKPLLDYLLALSHRGDKLMINDILDTVDKLQTALLLAEVYVAGLHPDTNYSEFEQKYMLYYHTWFQEWGLEKGWGDTAETCKETLSSLSEVLQAPDPINMEKFFSTVPCVFTVVIFSIHGYFGQEKVLGMPDTGGQVVYILDQVRALEDELLQRIKQQGLNATPKILVLTRLIPEAKGTKCNVELEPIENTKHSNILRVPFKTEDGKVLPQWVSRFDIYPYLERYAQDSSVKILEILEGKPDLVIGNYTDGNLVASLLTSKLGVTQGTIAHALEKTKYEDSDIKWRELDHKYHFSCQFTADMIAMNTSDFIIASTYQEIAGSKEKPGQYESHYAFTMPGLCRYATGINVFDPKFNIAAPGADQSVYFPFTQKQKRLTDLHPQIEELLYSKEDNNEHIGHLADRSKPIIFSMARLDKIKNITGLVEWYGQNKRLRDLVNLVIVGGLLDPSQSKDREEIEEINKMHSLINKYQLVGQIRWIKGQTDRVRNGELYRCIADTKGAFVQPALYEAFGLTVIEAMNCGLPTFATNQGGPAEIIVDEVSGFHINPLNGKEASDKIADFFQKCKEDLIYWSKMSTAGLQRIYECYTWQIYATKVLNMASIYGFWRTLDKEERQAKQHYLHMFYNLQFRKLAKNVPTLGEQPAQPTESAEPNRIIPRPKERQDCNQLTWTTAPSLQFLNRWSLK

SEQ ID NO: 114441 - protein, 105 aa, Oryza sativa
  Clone ID: PAT_MRT4530_18131C.1.pep
MGDEATQVSASSAVAVHALCFAGIVAAHQLSGRGMLVSNPAYALRLLVVFEAPLVIAVFSLLRRNPKRCSFLKAAARGLLGLPIGAFLNAFGAIVLGAPIGIKYW

SEQ ID NO: 114442 - protein, 218 aa, Oryza sativa
  Clone ID: PAT_MRT4530_18132C.1.pep
MGDEATQVSASSAVAVHALCFAGIVAAHQLSGRGMLVSNPAYALRLLVVFEAPLVIAVFSLLRRNPKRCSFLKAAARGLLGLPIGAFLNAFGAIVLGAPIGIKYWAATTYWSLLMSLFTFVPAACVFGASKVNWQAVLSHSIYCGSTDSVDYMISAPAHGAVIGAWLGAWPMPLDWERPWQEWPISVTYGSVAGHLIGMAISLALVVTHKRRGRAKAD

SEQ ID NO: 114443 - protein, 55 aa, Oryza sativa
  Clone ID: PAT_MRT4530_18133C.1.pep
MAASGGGGDTLADRRGDANQVFDEMTTRDTGLPGVDAPRSDRSMYSGLTGVVPPV

SEQ ID NO: 114444 - protein, 85 aa, Oryza sativa
  Clone ID: PAT_MRT4530_18134C.1.pep
DWGLHFFFFFFFFFFFFRHRGVGLGPTNKALEKKERQKWWIKKVKEGPNLYHHATHCSENKIKKCFFRGRPFYSLFYRGAEGLNK

SEQ ID NO: 114445 - protein, 97 aa, Oryza sativa
  Clone ID: PAT_MRT4530_18135C.1.pep
MGIYQGKGENSPNSEMALTLTTLKVKQEEDILSGVLVPGAIFENGSTRDRESHPEVLSGTSWRQGEVEKFSKCCPEVPSTQARNLLATLQFKYVSNG

SEQ ID NO: 114446 - protein, 73 aa, Oryza sativa
  Clone ID: PAT_MRT4530_18136C.1.pep
CFSSCNYLMIVMQVLIVIIDTCPALNVCAGNIDYLIYWWNPCAIVTSTGPCTKPIENSMVVIMIYGACSHKCN

SEQ ID NO: 114447 - protein, 879 aa, Oryza sativa
  Clone ID: PAT_MRT4530_18137C.1.pep
MGGGGGGESEVATVATGGQEERQPPPVVKAQNKSQLPMRQKRKKVFTRVRVQDQEEDNDFMEPACQVKSKDEVEEEDEDEYEDDVEDEDEEVEEDDDNDFMEPALKVKRKVPQNRKTEAMQGSKKKVASKQKLTKDVPVRKRDHFSVNTRCQPNAILEMVGSLNKPQRDRLHALGFDWVFKFRMNGLRSRELIEYLIDCLDPDSMCLDLGGRGKLPVTPDVVHCVLGLQNGHLDPPVVSDTTPLDPIREELGLGKKEKISSSSILDRIKMGGTDDFTMQCILMILFSKLLAPDSSTDITGNIVNMVSKNLEQYKDMALYKFVVDHLRWSAEKWKSGKRSTVYGCTALLVVYYLDNLLCKAMISNTNTPRSQFFNSSLIDKVGNLTKSTKKDGSTSFGKLNLRCRESTCYFVSKEKVKRKVGAASGSTRKRKHIDELAAQEATVARSKEAPRFGGDFPSLRSKLGPLIESLGSTRKQIGLDALEQYDKEVEQIMGNLHKAQDRLVDVLTSLCSTSDPKIAYTRKSKKRRDGLPPLDSNAVTDKTSGSGNENTTQASIGTPPTQANDVLGDEQSRGNVESSPPMHVEDPKDAEAGQPCEPAKDAHNDSLVDKICTHVESTPMLAIAPSLAANLSPAIMPIEMEKRRPLANPKYISPFKCVSIEPLWDDTGDIAMEVYKIVWNGQLPDVESAYLIDQREGALEVLNSENHNLTFSFDAAVNIISRECKSFNLPNAKLSFLPTINNDHWTIFCFNFNHKRIDILDSLGHDRDEKALKAMKDRVVGRFLDVLDVMFPKKFTDVRKWKCYHACNQKQVLTNDCGFLAMKYIQFWDGKVFVKKVCPKDGTKYRAEVLYYILFHPLNEAKLPAAIERYRPKIRKISK

SEQ ID NO: 114448 - protein, 47 aa, Oryza sativa
  Clone ID: PAT_MRT4530_18138C.1.pep
MARCTRAAVLAPPGVSDGCGAAGPGGSGPSNNVNGRARLAHSGYRQC

SEQ ID NO: 114449 - protein, 157 aa, Oryza sativa
  Clone ID: PAT_MRT4530_18139C.1.pep
MARREREPELAHRELVHRSTTPTEAVLPHNPAVGLSQTCKMGHTLRPTKDPLTNNAVTLGRNKEGNSKLYGYGGLASVDTHAWTVLDADQWKETHAIYQYIEHYHRDTLQQHVYDGNQKTKNSEQLQQKRCMVISGRPEAIFWPLLQDPRAEVAQSP

SEQ ID NO: 114450 - protein, 50 aa, Oryza sativa
  Clone ID: PAT_MRT4530_1813C.1.pep
MAETTKVTEEIVPLIDVFIIRFEEPFFWCNLINLLYLTGHPVTHLCVVHP

SEQ ID NO: 114451 - protein, 494 aa, Oryza sativa
  Clone ID: PAT_MRT4530_18140C.1.pep
MKALSVPEISSSKKLSDEVTQSSEAREEESDEDMKEPITRLFVHGFLSLVISAVGNYIIPLLTSHSEPEQTAKRSAMPIAVFCLGMITPVIGNGMRFRILQPKQQYGSGVALHITTARIVLISYVFLLLINTRYISLAVFPAIMIVFIGALCRKFWVEETCRRQLRHDSPGASKASSVLRKSEEQLTLIVAVLPFWLQLPGVMLARGTWQQDRVLVSHFLVFISSAMVALATLIARTVPAGIYPGVSRVLPVMHRTCIALILVSVHTMAGEWFGTKSMALACTPELVALLIWFSVHLNHAHDARACKIICLFAVSLLWAWAATYDEMTILQGYWRSSFWGISGLSGGLCYFSSWILKQWPKDSFRPTTDHHASLLLQLLRISAEISLFTSVPSIALQLPRWVSRISAQIRLFASVLTTALQLGLLVPIIYVLLKSVAVIMFYVLIYCVCFLPLIGVEYRPGMSVNRRKASISIQLRPIMLLVLLSILISHFTGR

SEQ ID NO: 114452 - protein, 87 aa, Oryza sativa
  unsure (1)..(87): unsure at all Xaa locations
  Clone ID: PAT_MRT4530_18141C.1.pep
ADVGGRGCMSQMXVXGASMLGATFFQASAXXESVTASAGTSAVESALLLRPAAAAXRVVARRRAAWRXXFLFLXFXSLVSPLVAAXR

SEQ ID NO: 114453 - protein, 318 aa, Oryza sativa
  Clone ID: PAT_MRT4530_18142C.1.pep
MDDDGDGSSSPTDDSAAAGLLPLFSRSPAEDLEEKLRRAMEENARLTRALDAILAGHHAHQRALLAPSLSPPPPSATARAPSVSTSCAAREDAAPAVAAAAASTACPSRQQPPTAEPRPKVRTVRVRADAADATDANSMAETVKDGYQWRKYGQKVTRDNPYPRAYFRCAFAPSCPVKKKLQRCAEDRSMLVATYEGEHNHALSTQTTEFVASGCTTSQHAGGSSSSPLPCSISINSSGRTITLDLTNQAGSGSIASCGVEAAAVSGELVTVLSPELRRHLVEEVVQVLKNDAEFVEAVTNAVAARVVDQIPHIPVHL

SEQ ID NO: 114454 - protein, 47 aa, Oryza sativa
  Clone ID: PAT_MRT4530_18143C.1.pep
RSPLGAAGEHLPLSGFLQHSSSQLPRPHTLLLANSGLNPLGLRSQSY

SEQ ID NO: 114455 - protein, 495 aa, Oryza sativa
  Clone ID: PAT_MRT4530_18144C.1.pep
MSKSYITALSNDDDNNDTPIINENPTVCLNFLPGNRCFFDASWKDNLTGFGLFLHNPINHQAIFVQGKSSLYKSPMQAELAAFKLALFICDFLKIANPLFLSDNQELTLLLQNTDYINQNCHWSLLPLLALLKIFAGLANLIYGPSTVFGSRTDRQLANDSGVMSLRRLAASALRRGGANDGGVLAAVRAEIAHELSSSPSSSPPSLQSQDIPDFSTVSDAPRGQEVLLRRRDASEEVLVSAVLAPLRFEGEEPLPRDALMKVFVSKPDVKPVMRFDCRAFAAEGDGGSADYDVTAVCYHPFAGECDAGEDKYEGPEFRILLHPTLDGGILKGTLRNLLVENALCHKGIADLFGAVGKAAIAPPSYPASAFFPEAARVPAAPVPSPPSQVGLVAFKDLFMSINNIVVISTIFDHKWTHLLKYLAACKTPLFFAAEIHMKQFSLKPMKALFNASTVSYDVKEIERPEEKMVKRMTGCHARREYVTCHGGGHSAQRM

SEQ ID NO: 114456 - protein, 68 aa, Oryza sativa
  Clone ID: PAT_MRT4530_18145C.1.pep
RTFCTILRSLNLHVCIVPNTKLSSHPSQKHTFFFNLFMSSNRNHTVGLQNFNSKHLNYIHFHWRGDTP

SEQ ID NO: 114457 - protein, 116 aa, Oryza sativa
  Clone ID: PAT_MRT4530_18146C.1.pep
MAARTHPRGGWKRGGAAASGGGGRERGTAAESERRRGHSRAHGFTNLRYSFCSHKPLAQVRQLPLAMEEEIEEGEEKKKEKMAGPTCQQRWVDEGFMLTFVSFQVELWKHEYISHL

SEQ ID NO: 114458 - protein, 99 aa, Oryza sativa
  Clone ID: PAT_MRT4530_18147C.1.pep
HYSFLPFQLDAKTTYNCLSTSSRVYTGEVKPRRSPDNLCELNCFTVVFGKQLGLDGAVQDDHLFIHLIYYLAHFKCLPFGMAVGHCLANTNHFTLCRKK

SEQ ID NO: 114459 - protein, 68 aa, Oryza sativa
  Clone ID: PAT_MRT4530_18148C.1.pep
MARREKTTAVATQRAVRGRRQGAHRRVGNDVGNEGWTMKEAQARAMALPSAPSSTGATQPRPLPLGAD

SEQ ID NO: 114460 - protein, 76 aa, Oryza sativa
  unsure (1)..(76): unsure at all Xaa locations
  Clone ID: PAT_MRT4530_18149C.1.pep
RDLWQGLQRDSSRRLPHDGVAAAPPPPLSITSSLLPPPTPLLHKYHPVPPPPTPSQXQQPPLPVVGRASSCWDTRR

SEQ ID NO: 114461 - protein, 783 aa, Oryza sativa
  Clone ID: PAT_MRT4530_1814C.1.pep
MASPDTGTTPPATADQQPPKPPSWEYQLREYLLLLSSVVAIATYSAGLAPPGGVRQKDAGGGGQYKAGDPTLQDIASAGGGAAHARYLAFYYCNATAFAASLVVNLLLLVLEEASTVGLAMLRTVMVLDVLALMAAYAAGSCRDLPSTVYVSTLVDDGGPTLRSAGRGQSARLATFFYCNTAAFVASLSIVVPLLSSRLQRMHLELYPPILAALLGLMGAYTAGSSRDLRTIAYVVALVAAVLAYILLAMAIALKKKKHDVDLAGGVEDSETARPPRNEKDGQLEGEKGSKNNEPMKDNDFVLLLATLAASITYQAGLDPPGGVWSEDDKLYGRKAGDPILLSTHVERYKAFFYCNSTAFAASLVVILMVQSKIVKGKALVIATMILDLFGLIGAYAAGSCRDVSTSIYVIALAGAVLVYVVIHVVFWPDDCYVSNQKDKEVEKRRERLLLLAILVATIAYQAGLTPPGGFWDKDDGESGHHAGVPVLLDNYPRRYHAFFYCNATAFMASVALIILLVNPKLYKLGIRCYALYVCMMVGMFGLMGAYAAGSARKVRTSIYVFVLVGVVIAFLLVQLVYFNIQAVWKQLLVFLNVKKEPTSNSDSANTTNGSSSDSKHNIASNTEEESKKKEYLMTLAILAASVTYQAGLNPPGSIWQDGGNVGNPVMRDNNYPRYNAFFYCNSTSFMASIIVIILLLQQYQKKYGGFLLYAMNMVIVVDLLGLLGAYAAGSCRDWETSGYVIALAVVVLACIMIHFMLLYHNGRSKGRVGGVQEINTLPVNHS

SEQ ID NO: 114462 - protein, 56 aa, Oryza sativa
  Clone ID: PAT_MRT4530_18150C.1.pep
MAPPPGGMTKVGTGGVACGGRCKNANAVVKYGTSSDISLGMEVRWFFWQRWHWQRR

SEQ ID NO: 114463 - protein, 115 aa, Oryza sativa
  Clone ID: PAT_MRT4530_18151C.1.pep
GKGKKGVLHNEAVTVICAADHSKWSVQLLITPIYYMSQLTNRVLHVLLFNQLVLGSPIETDANDLEAQAVACLAPSCKFPCLDGYTLLNLCFPCSRQVKRVRLLHVRFTKAVIFG

SEQ ID NO: 114464 - protein, 157 aa, Oryza sativa
  Clone ID: PAT_MRT4530_18152C.1.pep
MAAAARWWVAAVVVAVAAMAGAAKGDFAADKAECADKLMALATCLTYVEEKATARAPTRDCCAGLGQVVAGSKKCLCVLVKDRDEPALGFRINVTRAMDLPSGCSIAATFSDCPKMLNMSPDSKEAEIFKQYAREHESNNATKPAPAAAAAATGNNH

SEQ ID NO: 114465 - protein, 74 aa, Oryza sativa
  Clone ID: PAT_MRT4530_18153C.1.pep
ALTLLWLASTCFICRWLVLWLVLFGHGSLFLLVNVNDFLDRRRHFGPNDVGWILAGDKMLNGRILHLCVLTCFG

SEQ ID NO: 114466 - protein, 131 aa, Oryza sativa
  Clone ID: PAT_MRT4530_18154C.1.pep
MAAAAAVAAAGRAVRYGVLSKALPTRLHINSGRGLDISEAEGPLDRYIQVLMNERNLGKVRSIEKILSKRDMVRESSESLILERMKKIGTHNTKHAWMVAGVTISGYLFGAAFVALLTESQLPKREEEKEA

SEQ ID NO: 114467 - protein, 75 aa, Oryza sativa
  Clone ID: PAT_MRT4530_18155C.1.pep
GWLNNLPLFPQGAQIPVPPPPFWAEKSPQVFSPPADKGFPGAQDLPAIPPEGIAKVFGESSPGAPPFKNESAKTP

SEQ ID NO: 114468 - protein, 55 aa, Oryza sativa
  Clone ID: PAT_MRT4530_18156C.1.pep
HGSASEEGYYGGQQHQPGLPRVGLTRARQYAAQLPSMCRVEPQQCGIFPPPPPWA

SEQ ID NO: 114469 - protein, 50 aa, Oryza sativa
  Clone ID: PAT_MRT4530_18157C.1.pep
SKVAKIPLDNCILGREVESPTGRPAPDRNQSINPYRLQRRRTPRAGSYTA

SEQ ID NO: 114470 - protein, 105 aa, Oryza sativa
  Clone ID: PAT_MRT4530_18158C.1.pep
HISSLGGGGDALGGLKPQPKAQLHVFSSRQVPIPSEYERMHSEKHRWHGTFSIFRPMHSSVFTPPESEGVASAARTTARAKSSASSWLVFISSKRWPSVGSVVAI

SEQ ID NO: 114471 - protein, 62 aa, Oryza sativa
  Clone ID: PAT_MRT4530_18159C.1.pep
SEGGPREIGGPLIHATMMSDPEGHRLLRAQIHPVGISISASLRSHRNIIGIIVRSWLCNCQV

SEQ ID NO: 114472 - protein, 62 aa, Oryza sativa
  Clone ID: PAT_MRT4530_1815C.1.pep
FHHVIHVCCKCNRVTTRCFQQVDSAWYSLFSYIVPLRAALENKHGRPAGWADGLADALAEGL

SEQ ID NO: 114473 - protein, 359 aa, Oryza sativa
  Clone ID: PAT_MRT4530_18160C.1.pep
MGHHSCCNQQKVKRGLWSPEEDEKLIRYITTHGYGCWSEVPEKAGLQRCGKSCRLRWINYLRPDIRRGRFTAEEEKLIISLHAIVGNRWAHIASHLPGRTDNEIKNYWNSWIKKKIRKPAAAAAAATTTSPNNPPPCSTATSDHHHLPPPAFGGADHHLQLDAIINQNLISSLPPKLATGDDSPPAVPGLPHHCPLFMFDTTTTGAGGAISPPPPSSLIPTHLHHHHHPFIASFTAAMAADTPSYLPPLVDGMAAMGAAMDCSLEDGQTAAAMAATNGYYQHHQKHQQLEIELEEEEQRQLGHHHHQHHHEHEHENHQWDEEEAQHLLMWDQEVLTSSNLEAMQSGAHSLLFMGPNDHD

SEQ ID NO: 114474 - protein, 73 aa, Oryza sativa
  Clone ID: PAT_MRT4530_18161C.1.pep
MEKGGAKKRGGNRAGKQQKSKGGKQMTKAPNPAMRRDQLNHACGLGNKNTNRSHPRGITPHTPTGKRGPSRGP

SEQ ID NO: 114475 - protein, 59 aa, Oryza sativa
  unsure (1)..(59): unsure at all Xaa locations
  Clone ID: PAT_MRT4530_18162C.1.pep
PDRAGAAGETRRAQQGRPRATRRXPGEGAARLRCPPAGSHGTGRRGGERRRMAAMAGHG

SEQ ID NO: 114476 - protein, 161 aa, Oryza sativa
  Clone ID: PAT_MRT4530_18163C.1.pep
MARAKGRLVELASNASWGREWGAGPTWEAADTWAPPSSPDTTATNAPVPSNPAAVADAGGPPAVIAGGRDSVLAVATAGAGRDRCDSQHGHYKCELARTRRARLAVASVAAVISMGAYHDLRSAYASMLGVNPDPRNMGTDSMVVLRIDGCRMVVFCRLQT

SEQ ID NO: 114477 - protein, 54 aa, Oryza sativa
  Clone ID: PAT_MRT4530_18164C.1.pep
MLLYMGSIPLDVVPRIVARPAPGSVYRSPQLYARLRADMDADNSTDALQCGTNV

SEQ ID NO: 114478 - protein, 53 aa, Oryza sativa
  unsure (1)..(53): unsure at all Xaa locations
  Clone ID: PAT_MRT4530_18165C.1.pep
SQNQGFRIIGILRSFAKKKKLTNYIQLAIELLIILLAPKTSQPKRQKXKPMKQ

SEQ ID NO: 114479 - protein, 150 aa, Oryza sativa
  Clone ID: PAT_MRT4530_18166C.1.pep
MIILKMIENNMCHDNKTIRDMLDRRHYAKEDDDLTCLLCNAHHRETRLHLFFTCPFSVRCWRHLGIQWNHNLEFFQMITLARLKFAQRGFLEVFFLAAWHIWKQRNGLIFQNIRPSFQAWRSLFVKEVLLHMCRMKDPLKQIVSDWLQTL

SEQ ID NO: 114480 - protein, 41 aa, Oryza sativa
  Clone ID: PAT_MRT4530_18167C.1.pep
ILFALSDGRGVLVKLHDDIQTCGYEDVQVMWDILQRSETAR

SEQ ID NO: 114481 - protein, 41 aa, Oryza sativa
  Clone ID: PAT_MRT4530_18168C.1.pep
MGITPASSVYQAQCRLGATKHGLRFTDSENMDAREIQILHV

SEQ ID NO: 114482 - protein, 299 aa, Oryza sativa
  unsure (1)..(299): unsure at all Xaa locations
  Clone ID: PAT_MRT4530_18169C.1.pep
WRHCLHRRLPSSPPTGFSATMVGVLHYHCXTATSSSXPACLHCHRLVSLPTRXWPIMPPLLGFYDFTVGLPLSLPTXEWISQNITNRLAFAAADWCSLLYGWLVTLPLLGVYVFTTGLPSPPPTGVSACMAGLLCRRCWATTSSPTGCLATVDWHLRLHGWPIMPSLLGVYVFTDRLAFATADWCLRLHDWPIMPLLLGVYVFTDRLAFAAADWCLRLHGWPIMPPLLGVYVFTDRLAFVAADWCLRLHGWPIMPPLLGVYVFTTGSPSPPSTSVSACMAGLLCRRCRTSTSSPAGRLV

SEQ ID NO: 114483 - protein, 142 aa, Oryza sativa
  Clone ID: PAT_MRT4530_1816C.1.pep
VDSISGKIKQQKIDICYLDTTYLNPKYSFPPQNDVIKACADLCGSMSPDPNCKDDIWEKAGGQGTLAVSKFFPNTKYDENDKLDTKKKPPQRLLVICGTYSIGKERICISIAKALKSKIFATPGKIKICKQLDDPELSALLT

SEQ ID NO: 114484 - protein, 55 aa, Oryza sativa
  Clone ID: PAT_MRT4530_18170C.1.pep
VLYVYYECNHSLMPMTAKLGTKIGSTLTYGDVCNNVGIVQGSSCVTCLILLNCYS

SEQ ID NO: 114485 - protein, 493 aa, Oryza sativa
  Clone ID: PAT_MRT4530_18171C.1.pep
MESMLVAGAGAAAVAAVGGLVAAAALADKLVAAPPPRKNRANPPPAVPGLPIIGNLHQLKEKKPHQTFAKWSETYGPIYTIKTGASPVVVLNSTEVAMGAMIDKFSSISTRKLPKALSVLTRKSMVAISDYGDFHKMAKRNIMLAMLGFNAQKHFRGTRERMVSNVLSTLHKLVALDPHSPLNFRDVYTTELFGLSLIQSLGEDVCSVYVEEFGREISKDEIFHVLVHEMLSCAVEPDWRDYFPYLSWLPNKSFDTIVSTTEFRRDAVMNALIKRQKERIARGEARASYIDFLLEAESSAQLTDHQLMLLLAESIPAAADTVLERLYREIREACGGEAVTEDDLPRLPYLDAVLHETLRLHSPVPVLPPRFVHDDTTLAGYDVPAGTQVMINVFACHMDEEAWESPGEWSPERFLGEGFEVADRYKTLAFGAGRRTCAGSLQAVSIACVAVARLVQELQWTLREGDGDKEDTMQFTALKLHPLHVHLKPRGSL

SEQ ID NO: 114486 - protein, 246 aa, Oryza sativa
  unsure (1)..(246): unsure at all Xaa locations
  Clone ID: PAT_MRT4530_18172C.1.pep
RDAIMNALIKKQKERIARGEARASYIDFLLEAERSAQLTDDQLMLLLSESILAAADTVLVTTEWTMYEIAKNPDKQELLYQEIREACGGEAVTEDDLPRLPYLNAVFHETLRLHSPVPVLPPRFVHDDTTLAGYDIAAGTQMMINVYACHMDEKVWESPGEWSPERFLGEGFEVADRYKTMAFGAGRRTCAGSLQAIXIACVAVARLVQELEWRLREGDGDKEDTMQFTGXKLDPLHVHLKPRGRM

SEQ ID NO: 114487 - protein, 83 aa, Oryza sativa
  unsure (1)..(83): unsure at all Xaa locations
  Clone ID: PAT_MRT4530_18173C.1.pep
RRLVSPNKARFRSKPEVRRKEVRPQNASGRPARPRPPVGPASAATSRKSLLKERTGTAGAPIAPSRSRQPVQPGADPEQPXNP

SEQ ID NO: 114488 - protein, 82 aa, Oryza sativa
  Clone ID: PAT_MRT4530_18174C.1.pep
MGPTCHLSLSLLPPLTSISLYDRAVVGDGAEDGSLERRRRASMAEAARSGGWEAEDDNGGGDDGGAPKKPSQIEPTSGREIF

SEQ ID NO: 114489 - protein, 68 aa, Oryza sativa
  Clone ID: PAT_MRT4530_18175C.1.pep
HQKSLSSRHISNDTPPNTGSKAAHMLSHGIPVEIVGIVPRHPYIPSYTSGGRLPCKVDSEWPSPVKGT

SEQ ID NO: 114490 - protein, 178 aa, Oryza sativa
  Clone ID: PAT_MRT4530_18176C.1.pep
MSTDQPHLPPPAPPPGAAAADPPESTPAPPPPPPLEPPEVMHKTRAVDFLGRRTPIVYQNDNGPCPLLAICNVMLLKNVISLNPDAGEVSQQKLLSLVAERLIDSNSNVQGKDEEYVRNREQNISDAIDLLPRLATGIDVNVMFRKIDDFEFTRERGTWQQPCFERWPYVTGQHKCCS

SEQ ID NO: 114491 - protein, 79 aa, Oryza sativa
  Clone ID: PAT_MRT4530_18177C.1.pep
MGGKVALLVVLVAMSVVLLETQAKTKPKAEEKPPKTKEHRLPSHPDKPPPYRERRAAGYRFVASCSTDFKTQCVYDRWD

SEQ ID NO: 114492 - protein, 172 aa, Oryza sativa
  Clone ID: PAT_MRT4530_18178C.1.pep
MVGGRRGSDGSNGGEVLGGGEKCSGGGSHYGEWGSNGSSGEAHRCRILLALPRGNGNDNEPPGRRMMRTVAVALSDDEDGGINFEQRHKHPHAKSNLWMPARKHMQVPAYLGMLDVGGSLVPGCATASVGRCESAADGVSSDDGEGRDDVGGEASRRVSGGARGRWLGFRRW

SEQ ID NO: 114493 - protein, 1726 aa, Oryza sativa
  unsure (1)..(1726): unsure at all Xaa locations
  Clone ID: PAT_MRT4530_18179C.1.pep
MDEVLEVEEEAVAFTPTPSGSGDSGESRDPRHHRHGSPTPPRREPSRREDPTHSGGSALSPPPGGGRPRCVGARRRLDYGDGGSPQGALQAASALLRHPPVNPESETPVQHWLDDVANLVTTAQRQLATGGRSTATGTSRTSVTLSSSARRRAHRSATISRRSTVPTSSGASGSRRHHDGLYGAQDARINIERRRDERRAARMGEGAFSFRVPRSPSRGGPPPTLTPGGTGGDDRVMANYFPMTLKGQARGWLMTQPPDSIHSWEDLCQQFITNFQGTYPRPGEETDLHAVQRKDDESLRSYIQRFCQVRNTIPCIPAHAVVYAFRNGVRHNCMLEKIASKEPKTTAELFELADKVAQKEEAWAWNSPSTGAAAAATPESAXRSKRRDRRGKRKPACFDDEGHVLAADGPAWAPCKGKATGDKPSPTVPSGEGRSADKWCSVHNTYRHSLADCRSVKNLAKRFXKADEEKQQGRREGKAPATSTGDRREEAKNNAPADDXETGRGACAHTFCQGFKAMRRELLAAVPMHEAVRKARWSEVKLTFDQSDHSTVLARGGKLALVVSPTIHNVKMKRVLVDGGASLSIISPAAFDALKAPGMKLQPSLPIIGVTPGHTWPLGHVELPITFGDSKNFRTERIDFDVADLNLPYNAVLGRAALVKFMVATHYAYLQMKMPGPAGPITVFGEVKVALTCAEQRADNLVVATEPQAPEASASHTSKKRLTSADEESALISFLRANSDVFAWKPSDMPGVPREVIEHRLAMRPDARPVRQKVRRQAPERHAFIREDVARLLEADFIREVIHPEWLANPVVVPKANGKLRMCIDYTDLNKACPKDPFPLPRIDQIVDSTAGCDLLCFLDAYSGYHQIRMAREDEEKTAFITPVGTFCFTTMPFGLKNAGPTFQRMTRITLSNQVGRNVEAFVDDLVVKTRHQDTLLQDLAETFDSLRSTRVKLNPDKCVFGVPAGKLLGFLVSSRGIEANPEKIRVIERMCPPSKLRDVQCVTGCMAALSRFISRLGERALPLFKLLKSSGPFIWTEEAEQALNQLKAYLTSPLVLVAPGPEEPLLLYLAATPHVVSAALIVEREEGEREAPPARNGPSSPEGLAPKAPSPREDPEAPEGGGEALAGGPEPYDPEAIRDPPGTSEQARPGSSTPDNTNRPRRKVQRPVYFVSEALRDAKTRYPQAQKMLYAVLMASRKLRHYFQAHQVSVVTSYPLGQILHNREGTGRVRGRGSKRRHSRRALDYAFRWLPQPSGAGARVTLTSPSGDVLKYVVRLDFRATNNMAEYEGLLAGLRAAARMGIRHLLVLGDSQLVVNQVSKEYQCTDPQMEAYVYEVRRMERHFDGLELQHVPRRGNTVADELLRVASARAPLPPGTFEERLAQPSARPNPLRDPNNTPSNPRMDDRHPGYLDGNTLPKDRAEAEKVARISKRYVLIEGTLYRRAANGILLKCISREQGIELIADAHQGECGAHSSSETLVGKAFRQGFYWPAALQDAQEWVQRCKACQFHAKQTHQPAQALQVIPLSWPFAVWGLDILGPFKAARGGYLHLYVAIDTFTKWPEAYPVVKIDKHSALKFIRGITSRFGLPNRIITDNGTQFTSELFGDYCDDMGIKLCFASPAHPQSNGQVERANAEILKGLKTKTYNVLKKHGDSWLEELPTVLWANRTTPSRATGETPFFLMYGAEAVLPSELSLGSPCVTLYNEANMDDLHRDDLDYLEERRR

SEQ ID NO: 114494 - protein, 211 aa, Oryza sativa
  unsure (1)..(211): unsure at all Xaa locations
  Clone ID: PAT_MRT4530_1817C.1.pep
LDSIDSSRELVQCHDITMATMDTTDINIKSSKYYNPIRPPATLLTSNCRQICIRALFLACDPVVFPNSIITAIKETICCVAYNGPHGIVTSSGTPAQVGXCGVPRYRTPTYHLYSIYICNSDCFFXILTCLFDLLVGIRLICISKINNAWRGVSIGKAQHNNVLYGRSRVVNVSPKSXLSSTHQKIGPIMAVSISXNSGFIMSRQTYEANN

SEQ ID NO: 114495 - protein, 729 aa, Oryza sativa
  Clone ID: PAT_MRT4530_18180C.1.pep
MRNLSGRRCGIKPRSGRPSSGRKWRGSWRLISFASRAPPSLRSSSLLGEVTVVVTKSSPTSSAPPPSLSTAGTSPSSSSRRSPPLLPRRCHRPLIFRRCFGHRPREGPEAPKGGAKALASGPELDDPEAVRDPPGTTEQVRPESPAPDSTNRPRRKVQRPVYFVSEALRDAKTRYPQAQKMLYAVLMASRKLRHYFQAHRVSVVTSYPLGQILYNREGTGRVVKWAIELAEFDLHFEPRHAIKSQILADFIAEWTPATNNMAEYEGLLAGLRAAARMGIRHLLVLGDSQLVVNQVPKEYQCTDQQMEAYVREVRRMERNFDGLELRHVPQRDNTVADELSRVASARAPLPPGTFEERLAQPSARPSPLRDPNDAPFGPTPGDPRPSGPEEVNPDPSRQVVWMTDIRAYLDGNTLPEERAEAEKLARISKRYILVEGALYRRAANGILLKCISREQGIELIADAHQGEYRAHSASRTLVGKAFRQGFYWPTALQDAQEWVQRCRACQFHAKQTHQPAQALQVIPLSWLFAVWGLDILGPFKAARGGYQHLYVAIDKFTKWPEAYPVVKIDKHSALKFIRGITSRFRVPNRVITDNGTQFTSELFGDYCDDMGIKLCFASPAHPKSNGQVERANAEILKGLKTKTYNVLKKHGDSWLEELPAVLWANRTTPSRATGETPFFLVYCAEANGEGERPSAPRATNKACDATINATSGPDHYKLATSSYATFSRA

SEQ ID NO: 114496 - protein, 362 aa, Oryza sativa
  Clone ID: PAT_MRT4530_18181C.1.pep
MANVNPNPHRFLRQGHIVHLGVPTCYMCSLKLPLTIIKAIDTTRKDCLWRGNDPTSTRKSLASWELVCRPKDKGGLGVINLRTQNIALLLKHLDKFYRNVDLPWVDLIWKSYYTSKPPHSIANKAYNKEEYVGMACSRPLEDAFMLPFNTEAYGEFLVLKSDLDSVHLNEGFGDHWSYIWNIDKYSAQRLYKMNYSCLQPSRLLVWIWKTKCVIKIKVFAWLLSLDRFNTRDMLDRRHCAKENDDLTCVLCYGDLRETKLHIFFACPYSLRCWQLLGFHWFLNLNFFQMVVLARNRFGMKGFLEIFFIAAWYIWKQRNGMIFQNVPLTFHGWKVQFRKELLLHMCRMKEPLKQLVFDWLQTM

SEQ ID NO: 114497 - protein, 1053 aa, Oryza sativa
  unsure (1)..(1053): unsure at all Xaa locations
  Clone ID: PAT_MRT4530_18182C.1.pep
FSGESRGPRHRRHGSATPPCREPSRREDPTRSGDSALSPPPGGGRPRRVGARRRLDYGDGGSPQGALQVVGTLLRHPPVNPGPETPIQRWLDDVANLVTTAQRQLATGGRSTAAGTSRTSVTLSSSARRRARRSAMISRRSTVPTSSGASGSRRRHDGLYGTQDARINIERRRDERRAARMGEGASSSGAPCSSSRGGPPPTLTPGRTGCRAFVASLRNVRWPPKFRPNLTEKYDGSINPSEFLQIYTTVIVAAGGDDRVMANYIPMALKGQARRWLMTQPPGSIHSWEDLCQQFITNFQGTYPCPGEEADLHAVRREDDESLRSYIQRFCQVRNTIPCIQAHAVVYAFRNGVRHNRMLEKIASKEPKTTIELFELADKVARKEEAWAWNSPGTGAAAAATPESAPHSKRRDRRGKRKPARSDDEGHVLAADEPTRAPRKGKATGDKPSPTVPSGEGRSADKWCSVHNTYRHSLVDCCSVKNLAERFRKADEEKRQGRREGKAPATSTGDRREEAKDKAPADDGGDGEDLDFQIPQGTVATLDRGXGGACAHTSRRSFKAMRRELLAVVPTHEAVRKARWSEVKLTFDQSDHPTVLARGGGGGKLALVVSPTIHNVKMKSVQVDGGASLSIISPAAFDALKAPGMKLQPSLPIIGVTPGHTWPLGHVELPVTFGDSTNFRTKRIDFDVADLNLPYNAVLGRPALVKFMVATHYAYLQMKMPGPASPITIFGDVKVALACAEQRADNLVVATEPQAPEAFASRASKKRLTSADKKVRRQTSERQAFIREEVARLLEADFIREGIHPEWLANPVVVPKANGKLRMCIDYTDLNXACPKDPFPLPCIDQIVDSTAGCDLLCFLDAYSGYHQIRMAREDEEKTTFITPVGTFCYTTMPFGLKNAGPTFQCMTRITLSNQIGCNVEAYVDDLVVKTHHQDTLLQDLAETFDSLRSMRVKLNPDKCVFGVPTGKLLGFLISSRGIEANPEKIRAIERMRPPSKLRDVQCITGCMAALSRFISRLGERALCHAKKFPNRIPSRICIKPLSRTGQGAQTTM

SEQ ID NO: 114498 - protein, 127 aa, Oryza sativa
  unsure (1)..(127): unsure at all Xaa locations
  Clone ID: PAT_MRT4530_18183C.1.pep
YWPTALQDVQEXVQRCKACQFHAKQTHQPAQAQHLYVAIDKXTKWPEAYPVVKIDKHSALKFIRGITSRFGVPSELSLGSPRVALYNEANQDDFRRDDLDSLEERRRRVALRAARYQQSLRRYHQRH

SEQ ID NO: 114499 - protein, 685 aa, Oryza sativa
  Clone ID: PAT_MRT4530_18184C.1.pep
LWVPRVSFFTLLLHPPLSLSLFFFLFFFFFFFSSHLRRLNPCGGGGAVEPPAPTPDCNGILLTYNFEGRAKIRPYVADRNKQPYSFRANATVLNSGTRPLKSWAMLVTFGYGEILVGVDGAVLTGGGEMPYNTTQDAGNATSFSGYPQTDLLTPIATAGDISQIQAKVGIVGTLFAGPGPFVPLPTALSLDDPAYRCPQETNVSSGVLSTCCVLTPEAEANATVINANATDPTKNFLPRGTGDLVITYDVLQAYPSSYLALVTLDNNAKLGRLDNWRLSWEWRRGEFIYSMKGAYPSEKDTTGCIYGAAGQYYQSLDFSQVLNCDKKPVILDLPLSRYNDTQIGKIDHCCRNGTILPKSMDETQSKSAFQLQVFKMPPDLNRTKLFPPANFKIAGASSLNPDYTCGQPVPVSPTEFPDPSGLDSTTLAIATWQVVCNITTSKGAKPKCCVTFSAYYNDSVIPCNTCACGCPSNQRGPTCSTTAQSMLLPPEALLVPFDNRTQKALAWAELKHYNVPKPMPCGDYCGVSINWHISTDYNKGWSARMTLFNWDNVDLANWFAAIVMDKAYDGFEKAYSFNSTSVGKNTIFMQGLEGLNYLVKQTNMSGSDYLVPGKQQSVLSFTKKLTPGINVVAGDGFPSKVFFNGDECAMPQRIPMSNSGFRTHLSSVLSLVLVLAASAFVLLQQ

SEQ ID NO: 114500 - protein, 79 aa, Oryza sativa
  Clone ID: PAT_MRT4530_18185C.1.pep
PHMFPNGDKNVLSVSVETENLYPQAYKIKGDFKDPPKFAVVAPVAPHRGGAAPTAPKEEKKKEKPQEESHGDLGISLFE

SEQ ID NO: 114501 - protein, 282 aa, Oryza sativa
  unsure (1)..(282): unsure at all Xaa locations
  Clone ID: PAT_MRT4530_18186C.1.pep
LAEFDLHFKPRHVIKSQILADFIAEWTPVDEPVPSNVPFSLPGEEEDPNADIRGGHWVMHFNGSLNLQGAGAGVTLTSPNGDVLKYVVRLDFRATNNMAEYEGLLAGLRAATGMGIHRLLVLGDSQLVVNQVSKEYQCTDPXMEAYVREVRRMKRHFDGLELRHVPRRDNTIADELSRVASARAPLPPGTFEERLAQPSARPSPLRDPNDTPTDPTPGDPRPSGPEGVNPDPPRQVVWMTDIRAYLEGNTHHAANGILLKCISREQGIELIADAHQGECGAH

SEQ ID NO: 114502 - protein, 91 aa, Oryza sativa
  Clone ID: PAT_MRT4530_18187C.1.pep
MSYGYRDVRPVLVDKGRDRGVHTERDRGVHTERDRGGGAASYVEIIVCGPTRRSSMAKATAGRRRSRTYVVDTVVLRVKFEFKDCTFAPFD

SEQ ID NO: 114503 - protein, 1219 aa, Oryza sativa
  unsure (1)..(1219): unsure at all Xaa locations
  Clone ID: PAT_MRT4530_18188C.1.pep
GSPTPPRCEPSRREDLTRSGDSALSPPPGGGRPRRXGHARRLDYGDGGSPQGALQAAGALLRHPPVNLEPETPVQRWLDDVANLVTTTQRQLAMSGRSAAAGTSRTSVTLSSSARRRARRSATISRWSTVLTSSGASESRRRHDGLYGTQDARINIERRRDERRAAHVGEGASSSGAPRSSSRGGPPPTLTPGGTGCRAFVASLRNVRWPLKFRPNLTEKYDGSINPSEFLQIYTTVIVAARGDDRVMANYFPMALKGQARGWLMTQPLGSIHSWEDLCQQFITNFQGTYPRTGEEADLHDVRRKDDESLRSYIQRFCQVRNTIPCIPAHAVVYAFRNGVRHNRILEKIASKEPKTTAELFELADKRRDRRGKRKPARSDDEGHVLAADGPTRAPRKGKATGDRPSPTVPSSEGRSADKWCSVHNTYRHSLADCRSVKNLAEWFRKANEEKRQGRREGKAPTTSTGGGELALVVSPTIHNVKMKCVLVDGGASLSIISSAAFDALKAPGMKLQPSLPIIGITPGHTWPLGHVELPVTFGDSTNFRTERIDFDVTDLNLPYNAVLGRPALVKFMVATHYAYLQMKMPGLAGPITVLGDVKIALAYAEQHADNLVVATEPQALEAPASRASKKRLTSVDEVPVKEIPLGDPSGVAGEPVVIPKANGKLRMCIDYTDLNKACPKDPFPLPRIDQIVDSTAGCDLLCFLDAYSGYHQIRMAREDEEKTAFITPVGTFCYTTMPFGLKNAGPTFQRMTRITLSNQIGHNVEAYVDDLVVKTHHQDTLLQDLAETFDSLRSTRVKLNPDKCVFSVPVGKLLGFLVSSRGIEANPEKIRAIERMRPPSKLRDVQCVTGCMAALSRFISRLGERALPLFKLLKRSGPFEPLLLYLAATPHVVSAALVVEREEGEREAPSACNGPSSPEGLAPKVSSPREDPEAPKGGAEALAGGPEPYDPEAVRDPPETSEQARSESSAPDNTNWPRRKVQRPIYFVSEALRDAKTRYSQAQKMLYAVLMVSRKLRHYFQAHRVSVVTTYPLGQILHNREGTGRVVKWAIELAEFDLHFEPRHAIKSQILADFIAEWTPVDEPVPSNVPFSLPGEEEDPNANIRGGHWVMHFDGSLNLQGAGAGVTLTSPNGDVLKYVVRLNFRATNNMAEYEGLLAGLRAAAGMGIRRLLVLGDSQLVVNQVSKEYQCTDPQMEAYVREVRRMERHFDGLELRYVP

SEQ ID NO: 114504 - protein, 141 aa, Oryza sativa
  Clone ID: PAT_MRT4530_18189C.1.pep
NSPSYSELEPSPRRPRRRHHPAGDDHRPPSPPHRRLRRRCHLFPNPSSASAPSAPTSPAILHAGSSSPSSQQRRPAVRSPASPAATTRTTTPHAKNQLSSSPTRRRRRTAWWESERTSPWPSSSSGRRRRRRCSGEKTMTC

SEQ ID NO: 114505 - protein, 675 aa, Oryza sativa
  Clone ID: PAT_MRT4530_1818C.1.pep
MNAMIANSGCRAILVPDAAMTMTMMEIGAGTTTVYDERIPENPGVILGIELATRWITTTRRLFEIVDRCIHADDALRRKNDKPKTGGEKKPAKDTPESSKKKSSKSGKRKAQAEVLASEYERPPKHPDTQGNVTKRIWCPIHKSVRNSLKDCLVFQKSLEKQLALEKGKRVRVVEKAVEATTQDSDSAHPDSDLHVSHMFEGSTMYSSKREYKKVEREDCSTWQGAAPKMKWSEQKIEFSDEDHPKAAVIPGRYPIMVHKDYKCSSPELFKYLAEVRKLEKRFDGIEVRHVYRKDNIEPDDLARRASRREPLEPSTFLDVLTKPSVKESNDENNIVAFDISLGATEGGYKFLFVAIDKFTKWIEATLTGEIKADNAIKFIKGIFCRYGLPHRIITDNGTQFISADFQDYCIGLGVKICFASVSHPQSNGQVERANGIVLQGIKTRVYDRLMSHDKKWVEELPSVLWDVRITPTTSNKETHFFLVYGSEAMLPTELQYQSTRVQKYSDEDQEEQRNDDVNLLKEHQERVAVRAASYQQALRQYHKKRIRAHGDGRELANSWNIDQLHYGHGFATTPEVRVEPHLATSECFQGPVLLDFQHSPLEFGDLKLHPPVLDATITIGKRTHKILVHVVLRHIWLERKCRNDYRQLRLPALLDILDIYICTNNNTKYPESKC

SEQ ID NO: 114506 - protein, 208 aa, Oryza sativa
  unsure (1)..(208): unsure at all Xaa locations
  Clone ID: PAT_MRT4530_18190C.1.pep
SDHPTVLSRGGGGELALLVSPTIYNVKIKRVLVDGGASLSIISPAAFDALKAPGMKLQPSLPIIGVTPGHTWPLGHVELPVTFGDSTNFRTERIDFDVADLNHPYNAVLGRPALVKFMAATHYAYXQMKMPGPAGPITIFGDVKVALACAEQRADNLAVATEPQAPEASASRASKKRLTSADEVPVKEIPLGNDPSKTAKIGGTLDAK

SEQ ID NO: 114507 - protein, 1748 aa, Oryza sativa
  unsure (1)..(1748): unsure at all Xaa locations
  Clone ID: PAT_MRT4530_18191C.1.pep
MVKVLEVEEEAVAFTPTSSGSGDSGASRGPRDRRHDSPTPPRREPSRREDLTRSGDSALSPPPGGGRPRRAGTRRRLDYGDGSSPQGALXAVGALLRHPPVNPEPETPVQRWLDDVANLVTTAQRXLAMSGRSAAAGTSRTSVTLSSSARRRACRSATISRRSTVLTSSGASESRRRHDGLYGTQDARINIERRRDERRAARIGEGASSSGAPRSSSRGGPPPTLTPGGTGCRAFVVSLRNVRWPPKFRPNLTEKYDGSINPSEFLQIYTTVIVAAGGDDRVMANYFPMALKGQAHGWLMTQPPSSIHSWEDLCQQFITNFQGTYPRPGEEADLHAVRRKDDESLRSYIQRFCQVGNTIPCIPAHAVVYAFRNGVRHNRMLEKIASKEPKTTAELFELADKVARKEEAWAWNSPGTSAAAAATPESAPRSKRRDRRGKRKPARSDDEGHVLAADGPTRAPRKGKATGDRPSPTVPSGKGRSADKWCSVHNTYRHSLADCRSVKNLAESFRKADKEKRXGRREGKAPATSTGDRRGEAKDKAPADDGGDGTVATLDGGVCAHASRRSFKAMRRELLAVVPTHEAVRKARWSGVKLTFDQSDHPTTPGMKLQPSLPIIGVTLGHTWPLGHVELPVTFGDSTNFRTERINFDVADLNLPYNAVLGRPALVKFMVATHYAYLQLKMLGPAGPITVLGDVKVALACAEQRADNLAVAMEPQAPEASASRASKKRLTSADEEDALVSFLRANSDVFAWKPSDMPGVPREVIEHRLAVRPDARPIRKKVRRQAPERQAFIREEVAWLLEANFIRKVIHPEWLANPVVVPKANGKLRMCIDYTDINKACPKDPFPLPRIDQIVDSTAGCDLLCFLDAYSGYHQIRMAREDEEKTAFITPVGTFCYTTMPFGLKNAGPTFQRMTRITLSNQIGHNVEAYVDDLVVKTHHQDTLLQDLAKTFDSLRSTCVKLNPDKCVFVVEREKGEREAPSACNGPSSPEGLAPKVSSPREDPEAPKGGAEALAGGPEPYDPEAVRDPPXTSEQARSEASAPDNTNWPRRRVQRPVYFVSEALRDAKTRYPQAQKMLYAVLMASRKLRHYFQVHRVSVVTAYPXLGQMLHNREGTGRVVKWAIELAEFDLHFKPRHVIKSQILADFIAEWTPVDEPVPSNVPFSLPGEEEDPNADIRGGHWVMHFNGSLNLQGAGAGVTLTSPNGDVLKYVVRLDFRATNNMAEYEGLLAGLRAATGMGIHRLLVLGDSQLVVNQVSKEYQCTDPXMEAYVREVRRMKRHFDGLELRHVPRRDNTIADELSRVASARAPLPPGTFEERLAQPSARPSPLRDPNDTPTDPTPGDPRPSGPEGVNPDPPRQVVWMTDIRAYLEGNTHPEDHAEAEKLARISKRYVLIEGTLYRHAANGILLKCISREQGIELIADAHQDILGPFKAARGGYQHLYVSIDKFTKWPEAYPVVKIDKHSALKFIRGITSRFGVPNRIITDNGTQFTSELFGDYCDDMGIKLCFASPAHPKSNGQVKRANAEILKGLKTKTYNVLKKHGDSWLEELPAVLWANRTTPSRATGETPFFLVYGAEAVLPSELSLGSPRVALYNEANQDDLRRDDLDYLEERRRRAALRAARYQQSLRRYHQRHVRARSLQVGDLVLRRVQSLLGLSKLSPMWEGPYKVIEVPRPGSVRLTMEDGTELPNPWNIEHLRRFYPXHRDFLLSWSTGQPPHNPSVCAGLAGGYHCVSFXQAMNFSTFS

SEQ ID NO: 114508 - protein, 297 aa, Oryza sativa
  unsure (1)..(297): unsure at all Xaa locations
  Clone ID: PAT_MRT4530_18192C.1.pep
RWGLLKFGAFAAVCGALGAAGYSSYAYTLEEVDQKTREFRKAMTTPRPVAEDASEFEVVPALVFPAAISAPVAAMVAYLAVGPTLELGIRGSPGPASDGPLPARAPLFRLFPSLVLDLNETLVYSDWLRERGWRTFKRPGVDAFIEHMGKFYEVVVYSDQMPMYVDPVLERLDTKGFITGRLSRPATKYQDGKHYRDLSKLNRNPAQVIYISSHALESCLQPENCVQIKPWKLETDDTQLLDLIPFLEYVAHGXPSDIRTVLASYQGRDVAAEFIERSKEXQRRMQEQKQHGRIWRQ

SEQ ID NO: 114509 - protein, 268 aa, Oryza sativa
  Clone ID: PAT_MRT4530_18193C.1.pep
MSYPLGQILHNREGTGRVVKWAIELAKFDLHFEPRHAINSQILADFIAEWTPVDEPVPSNVPFSPVEEENPNADIRGRHRIMHFDGSLNLQGAGAGVTLTSPNGDVLKYVVRLNFRATNNMAEYEGLLAGLRAAAGMDIRRLLVLGDSQLVVNQVSKEYQCTDPQMEAYVCEVRRMERHFDGLELQHVPRRDNTVADELSRVASARAPLPPGTFKERLAQPSARPSPLKDPNDAPSDPTSGDPRPSGPEGVNPDPPRQGIELIADAHQ

SEQ ID NO: 114510 - protein, 403 aa, Oryza sativa
  Clone ID: PAT_MRT4530_18194C.1.pep
MNTSMIHWHGCTCKKLLKKQNLPAITDAIFQLSVAAVQGSHVKVIAATSSVTAFVVLLSMVAIALYLSLKTRYNEEIHMKVEMFLKTYGTSKPTRYTFSEVKKIARRFKVKVGQGGFGSVYRGELPNGVPVAVKMLENPKGEGDEFINEVATIGRIHHANIVRLLGFCSEGTRRALIYEYIPNDSLEKYIFSHDSNTSQELLVPSKMLDIALGIARGMEYLHQGCNQRILHFDIKPNNILLDYNFSPKISDFGLAKLCARDQSIVTLTAARGTMGYIAPELYSRNFGEISYKSDVYSFGMLVLEMVSGRRNSDPSVESQNEVYFPECIYEQVTTGRDLELGREMTQEEKETMRQLAIVALWCIQWNPKNRPSMTKVVNMLTGRLQNLHVPPKPFFSADSHPIM

SEQ ID NO: 114511 - protein, 948 aa, Oryza sativa
  Clone ID: PAT_MRT4530_18195C.1.pep
MVEVLKVEEEAVAFTPTLSGSGDSGESRGPRHRRHGSPTPPRREPSRREDPTRSGDSALSPPPGGGRPRRAGARCRLDYGDGGLPQGTLQVAGALLRHPPVNPELETPVQRWLDDVANLVTTTQWQLATSGRSAAAGTSRTSVTLSSSARRRARRSATISRRSTVPTSSGASESRRCHDGLYGTQDARINIERRRDERRATRMGEGASSSGAPRSSSRGGPPPTLTPGGTGCRAFVASLRNVRWPPKFRPNLTEKYDGSINPSEFLQIYTTVIVAAGSDDRVMANYFPMALKGQARGWLMTQPPGSIHSWEDLCQQFITNFQGTYPRPGEEVDLHAVRRKDDESLRSYIQHFCQVRNTIPCIPAHAVVYAFRNSVRHNRMLEKIASKELKTTAELFELADKVAQKKEAWAWNSPSTADGPTRAPRKENATVDRPSPTIPSGEGRSADKWCSVHNTYRHSLADCRSVKNLAERFRKADEEKRQGRREGKAPATSTGDQRGEAKDKAPADDGGDGEDLDFQIPQGTVATLDRGGGACAHTSRRSFKAMKWELLAIVPTHEVVRKMKMPGPAGPITVLGDVKVALACAEQRADNLAVATEPQAPEASASHASKKRLPSADEPSDMPGVLREVIEHRLAVRPDARPVRQKVRRQAPERQAFIREEVARLLEADFIREVIHPEWLANPVVVPKANGKLRMCIDYTDLNKACPKDPFPLPHIDQIVDSTAGCDLLCFLDAYSGYHQIRMARKDEEKTAFITPVGTFCYTTMPFGLKNAGPTFQRMTRITLSNQIGHNVEAYVDDLVVKTHHQDTLLQDLAETFDSLRSTRVKLNPDKCVFGVPAGKLLGFLVSSRGIEANPEKICAIERMRPPSKLRDVQCVTGCMAALSRFISRLGERALPLFKLLKRSGPFVWTEEAEQALNQLKAYLTSLPSWWPRDRRNHCYSTWPRPPM

SEQ ID NO: 114512 - protein, 663 aa, Oryza sativa
  Clone ID: PAT_MRT4530_18196C.1.pep
MRGFLAATLLVLSLLLNLHTAASVSAWEDKDFFSYCPPSRCGEHGPEIRFPFKLESKNTPSSCGVPCMKLSCSGQYTILHNKYLGRPYKLTAIDYKHALLTAVPLADEDNYSSPSPCPLLKSISIRPNLITGPGYGYYNTGYQNPCQTYDTYYAALVSCSTEFALASVPGTATDNDYIAGPISCLSNQTHFSYLVAYRVTMSLLPLDCEVISDGPIPIPAFYYSGYIPSMFTTSADRILDYPSGYVLSTFRESAERILNSSETMIWWYFYKYDGRHCEQQGRRCAFSSQRNQTFCMGRGSHVKVIAATSSVAAFVILLLMVATALYLSLRTRYNEEIHLKVEMFLKTYGTSKPTRYTFSEVKKIASRFKVKVGQGGFGSVYRGELPNGVPVVVKMLENSKGEGDEFINEVATIGRIHHANIVRLLGFCLEGTRRALIYEYMPNDSLEKYIFSHDSDTSQEVLVPNKMLDIALGIARGMEYLHQGCNQRILHFDIKPHNILLDYNFSPKISDFGLAKLCARDQSIVTLTAARGTMGYIAPELYSRNFGEISYKSDVYSFGMLVLEMVSGRRNSDPSVESQNMVYFPEWIYEQVTAGQDLALGREMTEEEKATTRQLAIVALWCIQWNPNNRPSMTKVVNMLTGRLQNLQVPPKQFFSADSHPTL

SEQ ID NO: 114513 - protein, 143 aa, Oryza sativa
  Clone ID: PAT_MRT4530_18197C.1.pep
VAATSPPPPPAAFLPPPGGTTTAAPCPSPPCSSSSSSCSRRTPTRFFFSLFCLLSWYGGGGGADGQPLLQGQRRRGAHAAAAACCGSGGGARGEAAEDGEPVVEAAHHAHRQGGRRGGRPRRARRHHPGGVQRQGQVQRQGQV

SEQ ID NO: 114514 - protein, 641 aa, Oryza sativa
  Clone ID: PAT_MRT4530_18198C.1.pep
MHTENRMRGFLAAALLVFGILLNLDTAASAWEDKDFFSYCPPSRCSEHGPEVRFPFQLESNNTTQSSCGLPFMKLSCSGQDTILDNKCLGRPYKVTAIDYKHPVLTAVPLADEGNSSSPCPLLKSISIRPSLKADNGYHYMMYQKPSETYVEHYYAALVSCSTEFAPASIPDATDDIVGPISCLSNQTHLSYLVEVHASMSLLTLDCEVISDGPIPIPVFHYSIYDLPTFRGSAERILNFSDTTVWWYRYDCPQCEQLGGRCAFSSQRNQTFCMRRGSHVKVIAATSSVAAFVVLLLMVATALYLSLKTRYNEEIHLKVEMFLKTYGTSKPTRYTFSEVKKIARRFKVKVGQGGFGSVYRGELPNGVPVAVKMLENSEGEGDEFINEVATIGRIHHANIVRLLGFCSEGTRRALIYEYMPNDSLEKYVFSHDSDTSQEVLVPSKMLDIAIGIARGMEYLHQGCNQRILHFDIKPNNILLDYNFSPKISDFGLAKLCARDQSIVTLTAARGTMGYIAPELYSRNFGEISYKSDVYSFGMLVLEMVSGRRNSDPSVESQNVVYFPEWIYEQVNSGQDLALGREMTQEEKETVRQLAIVALWCIQWNPKNRPSMTKVVNMLTGRLQNLQVPPKPFLSTDSYPVL

SEQ ID NO: 114515 - protein, 90 aa, Oryza sativa
  unsure (1)..(90): unsure at all Xaa locations
  Clone ID: PAT_MRT4530_18199C.1.pep
FAPAGRSRGRFARPCRLRASXPPPSGFAVALAMVLLSGVPPGVFXLVPFAGVRRRPPVCPLGACRSSASLRLPPCCPLVLRAKSLAXAGS

SEQ ID NO: 114516 - protein, 160 aa, Oryza sativa
  Clone ID: PAT_MRT4530_1819C.1.pep
RHRRRHRRPLPSRRRSLSLRRRRRAPVHRHRHPGPPPASASPPSASPRPRRPRPPFRFARRPPERRRPRQPEPRRRLPPLRSPFPSSPSTRGEPWTAHFVSPFPPLSRAPLRRAGGRRRRPSGRGRAASRRLCRRGRLRARPAAAMWGPAVSRPRPRVRL

SEQ ID NO: 114517 - protein, 42 aa, Oryza sativa
  Clone ID: PAT_MRT4530_181C.1.pep
MGGSVPVPRPVSGSVGARDVSRVRRETALGPTSEQAATLLPV

SEQ ID NO: 114518 - protein, 636 aa, Oryza sativa
  Clone ID: PAT_MRT4530_18200C.1.pep
MGGFLAAAIVVFSLRLNLDTTASAWEDKDFFKSFQLESNNTTPSSCGLPCMKLSCSGQDTILLDTNKYYLGRPYKVTAIDYKQGLLTVIPLADEENSSSSPCPLLKSIRPSVITGNPYYDIGFENPCRLYDAPYYAALVSCSTEFALASVPGPATDNDCIAGPISCLSNQTHFSYLVAVYVTMSFLPLDCEVISDGLIPIPRFYYSDYSSSTFRKSAERILNFSDTTIWWFNDDCSHPAQCEEQGGRCAFSSQRNQTFCMRPGSHAKVIAATSSVAAFVVLLLMVATALYLSLKTKYNEEIHLKVEMFLKTYGTSKPTRYTFSEVKKISRRFKVKVGQGGFGSVYRGELPNGVPVAVKMLENSEGEGDEFINEVATIGRIHHANIVRLLGFCSEGTRRALIYEYMPNDSLEKYIFSQDSDTSQELLVPSKMLDIALGIARGMEYLHQGCNQRILHFDIKPNNILLDYNFSPKISDFGLAKLCARDQSIITLTAARGTMGYIAPELYSRNFGEISYKSDVYSFGMLVLEMVSGRRNSDPSVESQNVVYFPEWIYEQVTIGQDLELGREMTEEEKAIMRQLAIVALWCIQWNPKNRPSMTKVVNMLTGRLQNLQVPPKPFFSADSHPVLQDSGHAGII

SEQ ID NO: 114519 - protein, 116 aa, Oryza sativa
  unsure (1)..(116): unsure at all Xaa locations
  Clone ID: PAT_MRT4530_18201C.1.pep
FWGXHQNYQITVLNXQIXKEINQNFKQKVIMVQLAASSVVGVGFRNPKPASVACLPPAHQLAQPSSFADDCSTPRGRASKATNCGWPSLSLRRFLPHPSDPRFMASWALGSGAIEA

SEQ ID NO: 114520 - protein, 487 aa, Oryza sativa
  Clone ID: PAT_MRT4530_18202C.1.pep
MRGFVGAAVLLVCNLATASAWKDKDFFSACPAKQCGKVEIRYPFRFEPSNTSSSCGLPCMKLTCSDRQETILDIKNYLGRPYKVTAIDYKRATLTIVPLADDSSLPPTPGCPLPNLISEGALDHRCEPYAMWLLKSINIEFPFRRAVHVSESLQTRYNEEIHLKVEMFLKTYGTSKPTRYSFSEIKKIARRFKIKLGQGGFGSVYRGELPNGVPVAVKMLENSKGEGEEFINEVSTIGRIHHANIVRLLGFCSEGTRRALIYEFMPNESLEKYIFSDGYNILQELLVPNKMLDIALGIARGMEYLHQGCNQRILHFDIKPHNILLDYNFSPKISDFGLAKLCARDQSIVTLTAARGTMGYIAPELYSRNFGEISYKSDVYSFGMLVLEMVSGRRNSDPSVESQNVVYFPEWIYEQVNSGQDLALGREMTQEEKETVRQLAIVALWCIQWNPKNRPSMTKVVNMLTGRLQNLQVPPKPFLSADSYPVL

SEQ ID NO: 114521 - protein, 69 aa, Oryza sativa
  unsure (1)..(69): unsure at all Xaa locations
  Clone ID: PAT_MRT4530_18203C.1.pep
TPERPRREAXRRCFTTHARCSMANQAKGCPGVAFQCQISSFATPFSAFPLFPELGVAFLGEPHHEMCPA

SEQ ID NO: 114522 - protein, 226 aa, Oryza sativa
  Clone ID: PAT_MRT4530_18204C.1.pep
MAIVYAVVARGTVVLAEFSAVSGNAGAVARRILEKLPPDAESRLCFAQDRYIFHVLRSPPPAAADGLTFLCMANDTFGRRIPFLYLEDIQMRFIKNYGRIAHNALAYAMNDEFSRVLHQQMEYFSSNPSADTLNRLRGEVSEIHTVMVDNIEKILDRGERISLLVDKTSTMQDSAFHFRKQSRRLRRALWMKNAKLLAVLTAVIVLLLYLIIAAFCGGLSLPSCRS

SEQ ID NO: 114523 - protein, 28 aa, Oryza sativa
  Clone ID: PAT_MRT4530_18205C.1.pep
AAIPCVFPMLTKGHTRSLSSLDASASDV

SEQ ID NO: 114524 - protein, 53 aa, Oryza sativa
  Clone ID: PAT_MRT4530_18206C.1.pep
MWAAPPFFFFFFFFFFFFFFFFFFFFWVLILLSRFGCFKPKFTDIPNRGKYLS

SEQ ID NO: 114525 - protein, 63 aa, Oryza sativa
  Clone ID: PAT_MRT4530_18207C.1.pep
CLKTWGGQPENVKAAQDALLLRAKANSLAQLGKYTSDGEAAGQGACSQTTSIVNHKTDLCVCR

SEQ ID NO: 114526 - protein, 339 aa, Oryza sativa
  Clone ID: PAT_MRT4530_18208C.1.pep
MATTQLLSTVEHRETLPEGYARPESDRPRLAEVATDSNIPLIDLASPDKPRVIAEIAQACRTYGFFQVTNHGIAEELLEKVMAVALEFFRLPPEEKEKLYSDEPSKKIRLSTSFNVRKETVHNWRDYLRLHCHPLEEFVPEWPSNPAQFKEIMSTYCREVRQLGLRLLGAISVSLGLEEDYIEKVLGEQEQHMAVNYYPRCPEPDLTYGLPKHTDPNALTILLPDPHVAGLQVLRDGDQWIVVNPRPNALVVNLGDQIQALSNDAYKSVWHRAVVNAVQERMSVASFMCPCNSAVISPARKLVADGDAPVYRSFTYDEYYKKFWSRNLDQEHCLELFKG

SEQ ID NO: 114527 - protein, 128 aa, Oryza sativa
  Clone ID: PAT_MRT4530_18209C.1.pep
PQRPHTQFFRCLYYNENGFGHFGKDDDSLNDTDRVDYLSSYMGSTLAALRNGANVKGYFVWSFLDVFELLAGYHSPFGLHYVDFEDPNLPRQPKLSAHWYSKFLRGEIGINIESTISPDEHEHEHADQ

SEQ ID NO: 114528 - protein, 97 aa, Oryza sativa
  Clone ID: PAT_MRT4530_1820C.1.pep
MRIPIAICARILALIEQPKKGQIREKKSHDKSIAKSHTVWFGLGQPVRKIVKHRKCPWKTDEAAVCMLLCGCLFSGVSGARELSVFASFLTWINGHT

SEQ ID NO: 114529 - protein, 140 aa, Oryza sativa
  Clone ID: PAT_MRT4530_18210C.1.pep
MGILVILVDLQCCRCDAKIRKVLGCLEEEYCIEKVEYDVKNNRVIVRGKFDPEKLCKKIWCKAGKIIKEILIVDVWPPSPPPPCKPPPCEKPPEDCKPKPCHCCSCEKPKPKPKPCHCCSCEKPKPKPKPCHWEKPSPVT

SEQ ID NO: 114530 - protein, 53 aa, Oryza sativa
  Clone ID: PAT_MRT4530_18211C.1.pep
INNAYASKMNKTGDNIQMPYIHVLTLHIINLSTDKNYRLTRLTIKRGRNGREK

SEQ ID NO: 114531 - protein, 587 aa, Oryza sativa
  Clone ID: PAT_MRT4530_18212C.1.pep
MSTAASASAPPASSAASDYHCRTKHSLTAGYARGPGRLDWANQPNPFLRFSPPSQIPLPNPPPGIAGIPYPSLFHSPPPPPSPQPLSVDSLSALLFHSLALSAWKSAGVSTWSLRVNPSSGNLHPTEAHLLFEHPRDPGRLVVSHYAPRDHLLEVRSAAPLADFPALLPPPATAVLALSSIFWRESWKYGERALRYCNHDVGHALAAVAVAAAALGWDVRLLDGLSDEDLGYLVGVEKGAPPPPDGLPDKMVRGKAPWVERQHPDCAVLLFPAGSEPKVDYGVMSAALRGLDRLEWVGKANALSKDHVVWDVIYHTAEAVKKHGPAPGESFSVNPWRRNAALSDDLYKELTVQEVVRRRRSAVDMDGVHVMGRDTFYQIMLHCLPSGDVSPEELQGPPSALPFRVLPWDAEVHATLFVHRVSELPKGLYFLVRNEEHFDMLRRAMRQDFEWERPEGCPDGLPLYRLMKGDCQQIAMQISCFQDIASHGCFSLGMIARFELVLHEKGEWMYPRLFWETGVLGQVLYLEAHAVGISATGIGCYFDDAVHEVLGLKDLEFQSLYHFTVGAPVLDKRIMSLPAYPGPGIDA

SEQ ID NO: 114532 - protein, 331 aa, Oryza sativa
  Clone ID: PAT_MRT4530_18213C.1.pep
MVYISNAQDASKLIVTAKGGGGEADDAAASSAAVVLDLWRQPAKIPAPFVWPRADVALPPSSPPTGELDVPVVDLAAALRDAAGMRRAVAQVAAACASHGFFQVSGHGVPPSLARAALDGAAGFFRLPPAAKQRARRAPGTVTGYTAAHADRFVDNLPWKETLSFGHRHANAAGNNSSTVADYFSTLGDDFKHLGEVYQEYCEAMEEVTKAIMAVLGESLGVGGGYYRNSAPSSTTTRTHGRSPLDHTTRCSHRVHLERAGCQQAHRDGEGTTRRGPRPRPRLRCRPPAPLAAAGQDPGARGLAARRRRAAGLAPALFMLRFSMLSSTAHW

SEQ ID NO: 114533 - protein, 58 aa, Oryza sativa
  Clone ID: PAT_MRT4530_18214C.1.pep
FFFKHTYIRAWMLLTCTYEKLQSTDKFEMCLNSHYKIAVNSRESSDALSRFIVTDLTS

SEQ ID NO: 114534 - protein, 75 aa, Oryza sativa
  Clone ID: PAT_MRT4530_18215C.1.pep
STLRGLEDWDLSNNNLSGPIPDFLGNFQATVAMKVLDLRQKGQTQGFFAECDALRRIQHRKLVKVVTVCDSLDYN

SEQ ID NO: 114535 - protein, 59 aa, Oryza sativa
  unsure (1)..(59): unsure at all Xaa locations
  Clone ID: PAT_MRT4530_18216C.1.pep
FFFFFFFFFXXXPWXXSWXTSSFITXHCITAXTQLLLXFTSLDXSXNPSGXCMXMTKLS

SEQ ID NO: 114536 - protein, 183 aa, Oryza sativa
  Clone ID: PAT_MRT4530_18217C.1.pep
AYIASLRNVQKTPKFRPNLTKKYDGSINPSEFLQIYTTVIVAAGGDDRVMANYFPMALKAHAVVYAFRNGVRHNRMLEKIASKEPKTTAKLFELADKVARKEEAWAWNSPGTGAAAAATPESVPRSKRPDRRGKRKPARSDDEGHVLAADRPTRAPCKGKAPGDKPSPTVPSGEGQSADKWCS

SEQ ID NO: 114537 - protein, 176 aa, Oryza sativa
  Clone ID: PAT_MRT4530_18218C.1.pep
RIRARYPTEKRVEAEKLARISKRYVLVEGALYRRAANGILLKCISREQGIELIADAHQGECGAHSASRTLVGKAFRQGFYWPTALQDAQEWVQRCKACQFHAKQTHHPAQILQVIALSWPFAVWGLDILRPFRRLKAGASRLDSECPTRIITYDGTYFTSELSPAVAAEGKNPIKD

SEQ ID NO: 114538 - protein, 91 aa, Oryza sativa
  Clone ID: PAT_MRT4530_18219C.1.pep
MEVGAGVDGGEINQPCKYVSPRPESPTGLNRSELSHGSCGSGGQVFRPVPRPGGFNAISAASTGAVTGRREGVGIGGGGHVGEGEGDFVRA

SEQ ID NO: 114539 - protein, 412 aa, Oryza sativa
  unsure (1)..(412): unsure at all Xaa locations
  Clone ID: PAT_MRT4530_1821C.1.pep
MDLQADTVRKLATKRRNSRVLRRVGREHHSTGILDGTDKAYSSENPPSDTYSSSGIGENRARLSTTHCTQQVIPERGYDAGIPQGIAKQEKRVADVIKGEGRRRQAGPTGQRDKGAGPPWTGTTKAVHRRSTGTDGPDRPKPXSSGQGRRGWGTARHKASWPNDGARRRGHPRRRPATARGGEEGCSPRAATARLQRGSRRRAPRGGNGGXPVAGVRLLISDPKEETAQSGVDRGGEATQMEIQTRRRSRVGGEVGARPARGDNRAAAELDFEAAKLAVAAARRSDGCGGGKRRPEFAGVWQRVGAAWGERGRVCRAREKWGNGRGEHGDAFYGLGKAGSRPDVAESAGEVGRRCGVVEGLTGADFRGESGGNGGGRGEDRSHVVGCELGCGRAPDFAAMWTAMAVGVGRRE

SEQ ID NO: 114540 - protein, 1377 aa, Oryza sativa
  Clone ID: PAT_MRT4530_18220C.1.pep
MVEVLEMEEEVVAFTPTPSGSEDSGESRGPRHRRHGSPTPPRREPSRRENAARSGGSAPSPLQGGVRPRRAGVRRCLDYGDGDSPQGALQAVGALLRHPPVNPELETPVQRWLDDVTNLVTAAQRQLAIGGRSAAAGTSRTSVTLSSSARRRAHRSATISRRSMVPTSSGASGSRRRHKGLYGTQDARINIERRRDERRAARMGEGASSSGAPHSSSRGGPPPTLTPGGTGCRAFVASLWNVRWPLKFRPNLTEKYDGNINPSEFLQIYTTVIVAAGGDDRVMANYFPMALKGQACGWLMTQPPDSIHSWEDLSQQFITNFQGTYPRPGEEADLHAVRQKDDESLRSYIQRFCQVRNTIPCIPAHAVVYAFRNSVRHNRMLEKITSKEPKTTTELFELADKVARKEEAWAWNSPGTGAAAAATPESAPRSKRGGELALVVSPTIHNVKMKRVLVDGWASLSIISPAAFDALKAPGMKLQPSLPIIGVTPGHTWPLGHVEFPVTFGDSANFRTERIDFNVADLNPPYNAVLGRPALLKFMAATHYAYLQMKMPGPAGPITIFGDVKVALTYAEQRADNLAVATGPQAPEASASHASKKRITSADEEGAFVSFLRANSVVFAWKPSDMPGVPREVIEHRLAVWPDVRPVRQKVRCQAPERQAFIREEVARLLEADFIREVIHPEWLANPVVVPKANGKLRMCIDYTDLSKACPKDPFPLPRIDQIVDSTAGCDLLCFLDAYSGYHQIRMAREDEEKTAFITPVGAFCYTTMPFGLKNAGPTFQRMTRITLSNQIGRNVEAYVDDLVIKTCHQNTLLQDLAETFDSLRSTHVKLNPDKCVFGVPAGKLLSFLVSSQGIEANSEKIRAIERMRPPSKLRDVQCVTGCMAALSRFILRLGERALPLFKLLKRSEPFVAPGLEEPLLLYLAATPHVVSAALVVERREGEQEGPPTCDGPLTLEEIATELSCIREGPEAPKGGVQTLIDGLRLDDPEAVRGPLGTSEQVRPESPAPDSTIRPHRKVQRPIYFVSEALRDAKTRYPQAQKMLYAVLMASRKLRHYFQAHRVSVVTSYPLGQILRNREGTGRVVKWAIELAEFDLHFEPWHAIKSQILADFIAEWTPVDESIPSNTLFFPGEEEDPNADIRGGHWVMHFDGSLNLQGVGAGVTLTSPNGDVLKYVVRLDFRATNNMAKYEGLLAGLRAAAGMGIRRLLVLGDSQLVVNQVSKEYQCTDPQMEAYVREVRRMERHFNGVELQHVPRRNNTVANELSRVASARTPLPPGTFEERLAQPSARPSPLKDPNDAPFDPTSGDPRQVTWMTDIRAYLDGNTLPEDRAEAEKLARISKRYILVEGALYRRAANGILLKCIPRERGIELIADAH

SEQ ID NO: 114541 - protein, 35 aa, Oryza sativa
  Clone ID: PAT_MRT4530_18221C.1.pep
LQTERRCVAAENLAATTTHTAPADRSTLTWKRRAA

SEQ ID NO: 114542 - protein, 250 aa, Oryza sativa
  Clone ID: PAT_MRT4530_18222C.1.pep
ESRHPAAMAKRPMTGHIETAKCGGVAARSIRFLLHHSLSSESEATVTLVSTLLVGLYWLLKSIYFSRLTASKFFTQIYLLGCACSLAIMKGRTFKGAVQIVMSLGDEGETGGQGTGSSCRQDHAMAGGLAGGVRYGANGTTWRAEAAADTIGGEGDCDGGARAGATADRVRGEGAGRGGRRLQARSRAWAGEGVADSRVGVGKEGLCADHQSLPKIAAITIHRRQYLHSHRRRQSTIPIHCRCNLQSIHH

SEQ ID NO: 114543 - protein, 171 aa, Oryza sativa
  unsure (1)..(171): unsure at all Xaa locations
  Clone ID: PAT_MRT4530_18223C.1.pep
SVRSDDKRHVLAADGPTWAPRKGKAAGDKPNPTVPSGEARSADKWCSVHNTDRHSLADCRSVKNLAERFXKADEEKRQGRREGKAPTTSTGDRQEEAKNKAPADDGGDSEDLDFQIPQGVVATLDEGACPHTSRRSFKAMRRELLAAVPTHEVVRKARWSEVKLTFDQNDH

SEQ ID NO: 114544 - protein, 101 aa, Oryza sativa
  unsure (1)..(101): unsure at all Xaa locations
  Clone ID: PAT_MRT4530_18224C.1.pep
RENSLGSTXDRPRMCTIRKKNKLEQNYKPGARKITGXIMYTQQQHPGPGGQEEDRGLLRAQQQQHPGQQSPARPVRLRVPREPSTLRRSVQHPAPAGVGHP

SEQ ID NO: 114545 - protein, 1747 aa, Oryza sativa
  unsure (1)..(1747): unsure at all Xaa locations
  Clone ID: PAT_MRT4530_18225C.1.pep
MVEVLEVEEEAVAFTPTPSGSGNSGASRGPRHHRHGSPTPPRREPSRREDLTRSGDSALSPPPGGGRPRRAGTRRRLDYGDGGSPQGALQAAGALLRHPPVNPEPETPVLRWLDDVANLVTTAQRQLATSGRSAAAGTSRTSVTLSSSARRRACQSATISRRSTVLTSSGASESRRHHDGLYGTQDARINIERRRDERRAARIGEGASSSGAPRSSSWGGPPPTLTPGGTGCRAFVASLRNVRWPPKFRPNLTEKYDGSINPSEFLQIYTTVIVAEGGDDRVMANYFPIALKGQARGWLMTQPPGSIHSWEDLCQQFITNFQGTYPRPGEEADLHAVRQKDDESLRSYIQRFCQVRNTIPCILAHAVVYAFRNGVXHNRMLEKIASKEPKTTAELFELADKVARKEEAWAWNSPGTGAAAAATPESAPRSKRRDRRGKRKPARSDDEDHVLAADGPTRAPRKGKATGDKPSPAVPSGEGRSADKWCSVHNTYRHSLADCRSVKNLAERFRKADEENWQGRREGKAPATSTGDRRGEAKDKGPADDGGDGTVATLDGGACAHASRRSFKAMKRELLAVVPTHEAVRKARWSEVKLTFDQSDHPTAPGMKLQPSLPINGVTLRHTWPLGHVELPVTFGDSTNFHTERIDFDVADLNLPYNAVLGRPALVKFMVATHYAYLQMKMLGPAGPITVLSDVKVALACAEQRADNLAVATEPQXPEASASRASKKRLTSADEEGALVSFLRANSDVFAWKPSDMPGVPREVIEHRLAVRPDARPVRQKVRRQAPERQAFIREEVARLLEADFIREVIHPEWLANPVVVPKTNGKLRMCIDYTDLNKACPKDPFPLPRIDQIIDSTAGCNLLCFLEAYSGYHQIRMARKDEEXTAFITPVGTFCYTTMPFRLKNAGPTFQRMTRITLSNQIGHNVEAYVDDLVVKTHHQDTLLQDLAETFDSLRSTRVKLNPDKCVFVVEREEGERVAPSACNGLSSPEGLAPKVSSPREDPEAPKGGAVALAGGPEPHHPEAVRDPPETSEQARSESSAPDNTNWSRRKVQRPVYFVSKALRDAKTRYSQAQKMLYAVLMASRKLRHYFQAHRVSVVTTYPVGQILHNREGIGRVVKWAIELAEFGLQFEPRHAIKSQILADFIAEWTPMDEPVPSNVPFSLPGEEEDPNADIRGGHXVMHFDGSLNFQGAGAGVTLTSPNGDVLKYVVCLDFRATNNMAEYEGLLAGLRATAGMGIRRLLVLGDSQLVINQVSKEYQCTDSQMEAYVHEVRRMERHFDGLELRHVPRRDNTIADELSRVASARAPLPPGTFEERLAQPSARPSPLRDPNDTPTDPTPGDPRPSGPEGVNPDPPHQVVWMTDIRAYLEGNTHPEDRAEAEKLARISKQYVLIEGTLYQRAANGILLKCISREQGIELIADSHQDILGPFKAAXGRYQHLYVAIDKFTKWPVAYPVVKIDKHSALKFIKGITSRFGVPNCIITDNGTQFTSELFGDYCDDMGIKLCFASPAHPKSNGQVERANAEILKGLKTKTYNVLKKHGDSWLEELPTVLWENRTTPSRATGETPFFLVYGAEAVLPSELSLGSPRVVLYNEANQDDLCRDDLDYLEEQRRGAALRAARYQQSLRRYHQRHVRARSLQVGDLVLRRVQSRLGLSKLSPMWEGPYKVIKVPRPGSVRLTMEDGTELPNPWNIEHLRRFYPXHRDFLLSWSTGQPPHNPSVCAGLAGGYHCVSFXQAMNFSTFL

SEQ ID NO: 114546 - protein, 222 aa, Oryza sativa
  unsure (1)..(222): unsure at all Xaa locations
  Clone ID: PAT_MRT4530_18226C.1.pep
VPPKELRNVQCVTECMPALSRFISRLGERALPLFKLLKSSGPFIWTEXAEQALNQLKRFLPPPGSLVAPGPKEPLLLYLAATPHVVSAALIVEREEGEREAPPARNGPSSPEGLAPKAPSPREDPEAPEGGGEALAGGPEPYDPEAIRDPPGTSEQARPGSSTPDNTNRPRRKVQRPVYFVSEALRDAKTRYPQAQKMLYAVLMASRKLYXLLQQSESPSRG

SEQ ID NO: 114547 - protein, 984 aa, Oryza sativa
  unsure (1)..(984): unsure at all Xaa locations
  Clone ID: PAT_MRT4530_18227C.1.pep
MVEVLEVEEEAVAFTPTQSGSGDSGESRGPRLCRHGSPTPLRREPSRREDPTRSGGSALSPPPGGGRLRRIGARRCLDYGDGGSPQGALQAAGALLRHPPVNPQPETPVQRWLDDVANLVTAAQRQLATGGRSTATGTSRTSVTLSSSARRRARRSATILRRSTVPTSSGASGSRRRHDGLYGTQDARINIERRRDERRAARMGEGASSSGAPRSSSQGGPPPXTLTPGGMGCRAFVASLRNVRWPPKFRPNLTEKYDGSINPSEFLQIYTTIIVAARGDDRVMANYFPMALKGQARSWLMTQPPDSIHSXEDLCQQFITNFQGTYPRPGEEADLRAVQRKDDESLCSYIQRFYQVRNTIPCIPAHAVVYAFRNGVRHNHMLEKIASKEPKTTVELFELADKVARKEEAWAWNSPGTGAAAAATPEFAPRSKRRDRRGKRKPARSDDEGHVLAADGPTRAPRKGKATGDKPSPTVPSGEGRSADKWCSVHNTYRHSLADCRSVKNLAERFRKADEEKRQGRQESKAPATSTSDRREEAKNKPPXPDDGGDGTVATLDGEGXCAHTSHRGFKTMRRELLAVVPTHEAVRKARWSEVKLTFDQSXHSTAPGMKLQSSLPIIGVTPGHTWPLGHVELPVAFGDSTNFRTERIDFDVADLNLPYNTVLGRPALVKFMAATHYAYLQMKMSGPAGPITVFGDVKVAIACAEQRADNLAVATGPQAAEASASHASKKRLTSADEEGALVSFLRANSDVFAWKPSDMPGVPREVIEHRLAVRPDARPVRQKVRRQAQERQAFIREEVARLLEADFIHEVIYPEWLANPVVVPKANGKLRMCIDYTDLNKACPKDPFPLPRIDQIVDSTALCDLLCFLDAYSGYHQIRMAREDEEKTAFITPVGTFCYTTMPFGLKNAGPTFXAHDSITLSNQIGRNVEAYVDDPVVKTRHQDMLLQDLAETFDSLMSTRVKLNPDKCVFGVPAEDSESFPS

SEQ ID NO: 114548 - protein, 365 aa, Oryza sativa
  Clone ID: PAT_MRT4530_18228C.1.pep
MIVDIDVSTRSACGLFSGGGGGSLLGGGGLFSGGSTHGGGLLTGGSLLDSSSSLLGGSARSARGLLGGGGGARSTCGLFRGRWRARPARQRRWPRTTPVRGSLPPVHHGSLGVDNGDNDDFKCPLYREVTEGGVGRMCLPQYGSATASPLRERQRHRRMTTTHHGHVVLIVGDDGAPAAVRGRAAGRRRHFGSGSERTGSRPATAQLGDAWAGSSRSAPAASRGRVAGRRRCSNGGYTNWSHHGEIPASFQVPNQEIVQDEVFNDWNFMVVEEESVDDDGYDTANDVDDGHVTVDDANGSDGTAFDLEEMLRHAEPETIFTGGSLEKAASENRSSLVVGLRQRKLYIFTGLYSLAAPSTASENLF

SEQ ID NO: 114549 - protein, 106 aa, Oryza sativa
  Clone ID: PAT_MRT4530_18229C.1.pep
MATDAGRAAAVVTSTVGAGAAGAGGAAGSRRKGAAAAGARRRRRRQEPVTAGARSRRRPGIGTDEQSLHSVSSSLSYFLGHYGRAATVQTPVINQAIELGHPTCQF

SEQ ID NO: 114550 - protein, 109 aa, Oryza sativa
  unsure (1)..(109): unsure at all Xaa locations
  Clone ID: PAT_MRT4530_1822C.1.pep
YFPFLSARRRARRKVDVCFTVNGHSYFNLMLGTNGDEGKHHPVLVLTXSCSCCRTLTWTRGRRWTSSPMLYGAEPLLARDALWTSRIRASGDLAHPAWLFGQTFEGGQV

SEQ ID NO: 114551 - protein, 108 aa, Oryza sativa
  Clone ID: PAT_MRT4530_18230C.1.pep
MADPRLFSSGSGTRDDRTDASGRRLNGRRMGNTLGVIGLLYAGIESGMVAVRDRDDWINSVTAGLGTGALFRAANGPRSAAVAGAIGGVLAGAAMAGKQAAKRYVPAL

SEQ ID NO: 114552 - protein, 233 aa, Oryza sativa
  unsure (1)..(233): unsure at all Xaa locations
  Clone ID: PAT_MRT4530_18231C.1.pep
MTSHARVRKLGSSRAAAGAGGRGASRFPVDHEINSKICLWRGHPWNLEVDAVVNSRNENLDEAHSSPGXLHAAAGPGLAEECTTLGGCRTGMAKMTNAYDLPARKVIHTVGPKYAVKYHTAAENALSHCYRSCLELLIENGLESIASGXIYPGAKNYPREPGWLHGLANXRNLVRRFPGGSRKGKITGVEFCTTTSSDTEIYKRLLPLYFPRDKKEEEIASLKLPADVGDENG

SEQ ID NO: 114553 - protein, 194 aa, Oryza sativa
  Clone ID: PAT_MRT4530_18232C.1.pep
MADPRLFSSGSGTRDDRTDASGRRLYNPYQDLNIPYKQLYDLPTSPEFLFQEESLAQRRSWGENLTYYTGIGYLSGAVAGAAVGLRDAARNAEPGDTAKIRANRVLNSCGSNGRRMGNTLGVIGLLYAGIESGMVAVRDRDDWINSVTAGLGTGALFRAANGPRSAAVAGAIGGVLAGAAMAGKQAAKRYVPAL

SEQ ID NO: 114554 - protein, 145 aa, Oryza sativa
  Clone ID: PAT_MRT4530_18233C.1.pep
MGIQEMVRQMGIQEMAQRATVARCVGGIGDDWGEDGDFVSDFRVGGVRGGAGGRGSGSSLRSRGLEQLARKVRSMAFSAFEDVSRPQRQGTRLTMAENGRVWIAESDSTEAVEVILARPAPKGVRSLRWHCHQGDGFGRDILVLS

SEQ ID NO: 114555 - protein, 206 aa, Oryza sativa
  Clone ID: PAT_MRT4530_18234C.1.pep
MGWWPVAEAGEASLRIEVAEAARGGVRDRDNGWWQRHATRGGTREGGSSAGDGDVWRLGSTPSLQRLEWRRWLVAEAVFRMRAAAGSRLGMGAATSGGGEGGEVVDPVAAVSFARLSCRCHYHPPLLLRVLRCGGGGGGKLCDGWLRVCCGGGEVNSELHNLSTAATTDPVLSRRALLGASRGERGHPPLAMQACSTRLRTAAAGC

SEQ ID NO: 114556 - protein, 133 aa, Oryza sativa
  unsure (1)..(133): unsure at all Xaa locations
  Clone ID: PAT_MRT4530_18235C.1.pep
AADRLRARGLPHPDRCVLCYQHEXVDHILVMCPESRQLXWLVLTTNGXPGCLPMNEDSFHLWICNSRKKIDKAHXXGFNTIATLVVWTIDLXKERNNRVFSQQQKSLSKVTXAIAADAALWRLANAVAPAIGL

SEQ ID NO: 114557 - protein, 95 aa, Oryza sativa
  Clone ID: PAT_MRT4530_18236C.1.pep
HRRSLNLTARFFEVLKPFTGGPSAVFLSRFADVASLLLCRGSGSGGGGSVADLIAWSSRTPSSRSCSRSVSTLGVPSASWTVVGTGAVTLVVFAD

SEQ ID NO: 114558 - protein, 83 aa, Oryza sativa
  Clone ID: PAT_MRT4530_18237C.1.pep
GTIQSVFPLFQIVMTFSRVSLFPGALSFRLILGFWEFCSGIFPLLWNLPPGFLRDITCGMDGFGSPLWPPPFKYPLLWRHNPG

SEQ ID NO: 114559 - protein, 76 aa, Oryza sativa
  unsure (1)..(76): unsure at all Xaa locations
  Clone ID: PAT_MRT4530_18238C.1.pep
RQTFTRVXFFFGKEHPYKLGPGGIRFPAGVENGEVLPFIGLYWLETGVPFFYTSQYPNPGFGGRGFNTTNTRFHAR

SEQ ID NO: 114560 - protein, 59 aa, Oryza sativa
  Clone ID: PAT_MRT4530_18239C.1.pep
VLAKTFCECDDDDDDDFTKQFFTPTEKETSMTSFLILNCPLNSLDIYWPLAGLFLPPPK

SEQ ID NO: 114561 - protein, 837 aa, Oryza sativa
  Clone ID: PAT_MRT4530_1823C.1.pep
MVELFAFQCRQAKGARPGLVLDEAGPPATLADGWGPPVIPDLAPRPPPARALAPPPPPIPPPPAVPARIKVGGITPRDSLSLFPLFSLSLSLGSVWNRSRNLRRRLQWRPRSPRPFPPSPAALSPSRRYISVPRALLLRFRHSPPLLPVGIEPAPSHLLSAVATELRFAAVVAPDLLPTRRHLLRLRRVPVDLGHPSASLADRRSTVVLAVPNRAAAFLRFGRRSRRRRRPGVSRRPPFRFPLLSALSGAAPPRRWSPAVTIGARSCRLPSAVPARPPSGAPSRLPSGPGRQPPAPAGAADAWDPRRRPPPAACSRSTVDREADAWAPLPWTRANEGYTSCGPVVEMSWHRAVEALCDPDWMNAMHEELNNFARNKVWTLVERPRGHNVIGTKWVYRNKQDENGEFGDMMSREFEMSMIGELSFFLGLQIKQLKDGTFVSQTKYIKDLLKRFGLDDAKPIKTPMATNGHLDLDEGVMPPRTRHGHRTPTPDPVSETEESSGEDYAQSDEEVEANIEGASEVASGDDVSGSGEDEDEGNDDMHIDPFIQFVVNMRNPSQYTILRHHDQFLRPRDTLDPRFHTAFQKTVYEQVYAGKAFAKHKWISWRDINETPEFESLQDLFKTVGIDRIVTLKQDYNEYLIRQFYATVWVAGDYSEMKWMSNTLQIVRATILPRLGNNDDIRGVAWHVIDAIIQGRQFDIVSLMMQEIAISKGTFTQGIYYAPYIMRLIQDKLGAAGQNLKKHKQYKPRLQLGAPRAPRTVPSSHPGASSSSAPPPPPEYDPNAFFHPQFAYFGTQPNEYFNPSSPWAGSRLAHPLTKGACGGFEVEHWSWDRLNGE

SEQ ID NO: 114562 - protein, 345 aa, Oryza sativa
  Clone ID: PAT_MRT4530_18240C.1.pep
MATRIAQARKRQGRDRRSSTRTPLNRGQPDKATLLQLQPGLALQRSAQPKRGIIIGNDSGSLVRRASDEQPVEYSLSSPAKRKKKHDDICGSRRFIFTCMMYHTEYDSIYRFDSPVKILAAATEKSAQKSGPRKRPTREAAHQARRRRAAAAMKDPFEAAVEEQESPPESPAANEEDAAGAPEGYDGASGSRGPPLRLPPSRAAPSGSGGAAAAAARGKVVRVQKEQQEEEDDEEDHMEVDLDKLPSGTSDPDKLAKMNAILSQFTEDQMNRYESFRRSGFQKSNMKKLLASITGSQKISLPTTIVVSGIAKMFVARIVMTERKDSGPQGNQSKQYVQAEVLRYY

SEQ ID NO: 114563 - protein, 481 aa, Oryza sativa
  Clone ID: PAT_MRT4530_18241C.1.pep
MPHSSYLALALAVAAVLAMAAVEVSGLGFDLHHRYSPIVQRWAEERGHAGVSWPAGAEVIGSPEYYSALSRHDHALFARRGLAQGDGLVTFADGNITLRLDGSNLCDQPNACATATSSCPYAVRYAMANTSSSGELVEDVLYLTREKGAAAAAAGAAVRTPVVFGCGQVQTGSFLDGAAADGLMGLGMEKVSVPSILASTGVVKSNSFSMCFSKDGLGRINFGDTGSADQSETPFIVKSTHSYYNISITSMSVGDKNLPLGFYAIADSGTSFTYLNDPAYTAYTTNFNAQISERRANFSGSTRSGPFPFEYCYSLSPDQTTVELPVVSLTTNGGAVFPVTSPVYPIAAQMTNGEIRIIGYCLAVIKSDLPIDIIGQNFMTGLKVVFNREKSVLGWQKFDCYKDEKMTDDGSSVGSPSPSPGPTTHVFPQPQESDSPAGRTPIPGAAPVPRSSSAAAGGRAGFRLLSSMALLLLAAAAAAVF

SEQ ID NO: 114564 - protein, 74 aa, Oryza sativa
  Clone ID: PAT_MRT4530_18242C.1.pep
MEAILPHIGWGWCSELRNGGIAGSDGQKGARAAGDGGEHLCSAGCGRVASYGGGQLWSGAGRRQWQAVVGRQRN

SEQ ID NO: 114565 - protein, 83 aa, Oryza sativa
  Clone ID: PAT_MRT4530_18243C.1.pep
MDPHLFVPTPATAALLTSSSPSWEGQPAPDLCGCPRSLQLPEPATTAPVVLHIGFIAELLATDRRPACRSSSLPTALVHCQPL

SEQ ID NO: 114566 - protein, 87 aa, Oryza sativa
  Clone ID: PAT_MRT4530_18244C.1.pep
SRSRTSGEGGAQAPRTRGRAQPPPRVLARRRQRRGVGGRHGNPGLQGRLRVRRAGLPRRGEQLPRGRRRRGRPRPGSRPAGQRQRPL

SEQ ID NO: 114567 - protein, 179 aa, Oryza sativa
  Clone ID: PAT_MRT4530_18245C.1.pep
RKQGNFAGAVEEYSRALSLTPSHFKALFNRGFSYDKLGKYDLAIQDYTKALEVDPANSFAYYNRGITKDRMGDFEGAVADFSSAISLDPGNADFYHNRGFSLRKQGRFESAIRDYTQAIQLNPGHCRAYYNRAFSHDRLGQFEDAVADYSRALQIEPANATALHNRGSLFERMGRWRML

SEQ ID NO: 114568 - protein, 420 aa, Oryza sativa
  Clone ID: PAT_MRT4530_18246C.1.pep
MVFDHGARVYVDPDAEVVALSPRTLLESDRYVCEICGQGFQREQNLQMHRRRHKVPWRLVKRPAAATAAEDGGAAGGGGGAGGGAGGGGARKRVFVCPEPSCLHHDPAHALGDLVGIKKHFRRKHGGRRQWVCARCAKGYAVQSDYKAHLKTCGTRGHSCDCGRVFSRKITRSLNLYSDIANYLRMKYIISLSNIAIKVESFIEHQDACNSGRVRGEVVPVATTLPVIRPAALRHHHHHPPPPPPELQLLPASTTAPLAAAFSSNSTTTGSSSHEQHATTMTTTKLQLSIGPAAVVAAASGGGGACAAAAGGEEEQQREEVRRALEEKTAADAARERAREEAAAAERALEDARRARHRARGELEKALALRDHAARLIAQVTCHACRQRSLAVMSMAAIDGHGASAVAREHLRGGGVGAGI

SEQ ID NO: 114569 - protein, 104 aa, Oryza sativa
  Clone ID: PAT_MRT4530_18247C.1.pep
FLVFFFFLFLFYFFFFMFFFFFGKRGEGKLPPNCPRGNFRRAPGQGLSLNTQTGVDQPGTKERGRACPKILPTKRAKETPNYTKMGYTKTKYLETGNRRIGPCN

SEQ ID NO: 114570 - protein, 69 aa, Oryza sativa
  Clone ID: PAT_MRT4530_18248C.1.pep
MEGRTENDSATYADSGKWQTGNPCLDFFFHVAVIHGARVSVSEVEALFELFKSINGSVIDDGLINKVII

SEQ ID NO: 114571 - protein, 113 aa, Oryza sativa
  Clone ID: PAT_MRT4530_18249C.1.pep
RLGGGGGGDGDCGDRACLTPHEVIKAMWKDVPARTNDYITRPKGNGYRSLHVAVDMSEPGPEGKKRPLMEIQVRTREMDMAVVGGQALHALYMGGLTEKCSRFNNISGNPYLM

SEQ ID NO: 114572 - protein, 84 aa, Oryza sativa
  Clone ID: PAT_MRT4530_1824C.1.pep
LAELYFARIVSLHGVPKKIVSDQGSQFTSHFWGKSLPYAEFSYNNSYQASIQMAPYEARCMAANAGHRYCGTKLGKAKCSGPIY

SEQ ID NO: 114573 - protein, 100 aa, Oryza sativa
  Clone ID: PAT_MRT4530_18250C.1.pep
EIQLKQTYLRSKTHTWSAGRATVLVAIDPLGVEKAQEWFIQRPLLQLQHFRDMSIDPKVRPRIGISSSQLRRPFQPSNLLAHPDIRHDPPLPHLSPLAPN

SEQ ID NO: 114574 - protein, 735 aa, Oryza sativa
  unsure (1)..(735): unsure at all Xaa locations
  Clone ID: PAT_MRT4530_18251C.1.pep
MEIDGQEPGHEHDGMMEPQVVDLEEEEEDDSINFWASLGVHAVDQMPLHPRVGMEFESGEAAKTFYIAYAGRVGFSVRIARSRRSKCNESIIMLRFVCSKEGFSKEKHVVAGKKTRKRPASIREGCNAMLEVLRRGDSKWIVTKLVKEHNHEVGMPSRVHXLPWRVIRWSTLTLVWSLKVRCIRSQGEVLVIAKNFSDTRNLLLNGLDFQHPREFQYNDLGPEDAQSLLRYLKNTQSEDPAFFYAVQLNSNGHTANIFWADAKTRMAYYHFGDVVRLGTLCRNSKYIPIAIFSGVNHHLQPVVFGCALIVDDSEASFAWLFEKWLEAMPVGPPVSLVLEFNQEMAAAATKILPDTHCTFCEKHILGTVREELGSLYPEPELDHFITDLRKCIDCCRLEESFESCWDSVIRKYGFRNNELLQSLYEIRRQWAPAYTRKVFCARNLLPQSCQNLENVIEKHFSSKTQLWVAVQQLGQAVCNFYEKETQADYLTTFQMATVRTASPLEKQASSIFTRSIFEKFQDQFAESFGYHADRLEDDMLHKYRVTVSEGDEEAHTVSFNPEKKTVGCSCCLFESCGILCRHALRVFIIEGVRALPKAYILKRWTKHAKSIATVDDYIDLRGCRDDPSTTMYNDLHCDAIKCAKEGSASSELYSVAKEALHKARQTCNLGLFLLARGLMGCQSFLKLISCQDISQTNPVKASNQTHISLKQIQKIHNKPNLVVKSCMIYKSNLIS

SEQ ID NO: 114575 - protein, 212 aa, Oryza sativa
  unsure (1)..(212): unsure at all Xaa locations
  Clone ID: PAT_MRT4530_18252C.1.pep
RRPRRAPLFAVPTTPPSPLHRRRCARRTPPHPPRRRAVWSQRARCGPPPCPSAWEPTPAEARTGDGSQLRRARRRATKAMAERGSSGDDSXRARGREPTPAGARTGDDSGRRAGTGMASSASSQSAAQPGRRRGGPIRERERQAAGPTYPRWWRRRSRRLSSLPSPTKLRPSAXARRPPPRPPRAHRQPPRPPRPVRHSSPCPRCGVAGATP

SEQ ID NO: 114576 - protein, 392 aa, Oryza sativa
  Clone ID: PAT_MRT4530_18253C.1.pep
MEIDGQEPGHEHDGMMEPQVVDLEEEEEDDSINFWASLGVHAVDQMPLHGGVQIVDQPSPPPQEQAQSQSQSVRKDLFPVDSDPCLEPRVGMEFESGEAAKTFYIAYAGRVGFSVRIARSRRSKCNESIIMLRFVCSKEGFSKEKHVVAGKKTRKRPASIREGCNAMLEVLRRGDSKWIVTKLVKEHNHEVGMPSRVHYIAMEGDTVVDPYIGMEFESLEAAKTFYYSYATRVGFEARVRQSRKSQDESLKMLKLVCSRHRYHSGRETNGGDPKRVQALDPSRDGCDALFEIIRKDRDAWTGEVLVIAKNFSDTRNLLLNGLDFQHPREFQYNDLGPEDAQSLLRYLKNTQSEDPAFFYAVQLNSNGHTANIFWADAKTRMAYYHFGDVVRL

SEQ ID NO: 114577 - protein, 36 aa, Oryza sativa
  Clone ID: PAT_MRT4530_18254C.1.pep
FTRKDFIGIIQIDMLLWCMKLYFYLEILLECTAFLG

SEQ ID NO: 114578 - protein, 232 aa, Oryza sativa
  Clone ID: PAT_MRT4530_18255C.1.pep
MGIEEIKMKTQGYIRDDVKFRGEGQLLRGGEEGDVPRLRQGLENGFISNASPAMLCPMHQERLTNKEVDEMIHETGGGRWINYKEFEVHNGRNAFFWKDVWCDRVPLKVLFPDLYEISYDQGATVNDLYEGGGWKLDFRRNLNPMKERVKDTDMWEIWKSKLPLKVKHFLYLVGRGRLPCAEQLVKRKWKVVMNSKWCALLKEEDWELLGRWCEAIRMQLIQVRPQVLPTSL

SEQ ID NO: 114579 - protein, 52 aa, Oryza sativa
  Clone ID: PAT_MRT4530_18256C.1.pep
LLSHAQPLIDKVQVNLQRGSDPTMTTVQYTSTCFLDDGCTYSLSMHHRNRGV

SEQ ID NO: 114580 - protein, 156 aa, Oryza sativa
  unsure (1)..(156): unsure at all Xaa locations
  Clone ID: PAT_MRT4530_18257C.1.pep
SFVNLPSVVTSLLPAPSEGSNLYPNASRAAAMLSAGSRSLHELAVKDVATYMGRSDRSLFGTHLICAGQGYQEAGPQLEDAGCSREAXTAAARTVHGSEYAGILQRRRDDILRSVHIRGRALVLYVAAXALPEAIETLRTTSDQTCEALLLLACHE

SEQ ID NO: 114581 - protein, 104 aa, Oryza sativa
  unsure (1)..(104): unsure at all Xaa locations
  Clone ID: PAT_MRT4530_18258C.1.pep
HPSPQAIQKACWAGPWLSRLSPTSAPXALMCPGPAPLWLALTSQPASHPEGLLGWAMAEPAKSNLSARCPGADVPRASAIMAGADVPARKPSRRLAGLSHGQAC

SEQ ID NO: 114582 - protein, 62 aa, Oryza sativa
  Clone ID: PAT_MRT4530_18259C.1.pep
PVVGEGRHQKVGVRNGGGGSQGRELRSRCRDDPAGVVFVRLWFACAYGAIVQTSILVSDRSI

SEQ ID NO: 114583 - protein, 668 aa, Oryza sativa
  Clone ID: PAT_MRT4530_1825C.1.pep
MDLGKSASTSATLKKLQEDGALPGRGTMEREAGGTNPQLILGRMVAIEDCVLCGFLPPSSEFLLLVLNFYGLSLLHLNPNSIAFFSIFVHLCEAYIGVEPFLDLFRFYYELRWMESNRVSGCVGFRLRDGLKSRYIPFQCPSSRSKWRNRWFYLEIKNSNPVFVVPEDQPDKIPSWTAKPPLTPSLQSFIDIIDDLRAQGLSGYEVVADFVGLSSEIVERRVGQVMISGPTTASDIPVPLYEKGAAERDEAINALPLTDIIGPLADHQVATSLKVKVVKEASDAATTSGGNVPTKPRKFSSGLEDRMSELGNNLSEIRGSLRVTYTGLHQLAGECGVKSTIPVNPDEFSLTSSLAELVTAMGEIPSKHAARIAEETSNRIYTGACHVLACVRLSRPELDLREILDQRAASDTRKEVMEEVGDLGESVLPLFEEDADDEDVQQRGQPESLAIIPVLEFEPHVSPDHVDQPLDIEGMATTSSVDLEGALASQDRHIQYWKTKFEVAELERTMLAVKKEQAVETLRGREVWFNSYLKSCCTSMARVCKELRVVRGDPEESAAGYISWLNGACAQLDGIGKRIDEALKQECRRSSRYAGGHVLACLRNHRPRLDLEYLREGFARSRRTPAEIDHLARSMSPLADVDPRFYNRNQSCKQYHFPGSSSLVHTNS

SEQ ID NO: 114584 - protein, 99 aa, Oryza sativa
  Clone ID: PAT_MRT4530_18260C.1.pep
MGDSSDALEVGEMRRRVVVAVGEGKGSHHKFVLRGQRYACREEIRHLFITAGRYRHISSIPSTFLALLVTPPVSLQQPARPLPHPSSQPQPRDDQLPIQ

SEQ ID NO: 114585 - protein, 994 aa, Oryza sativa
  Clone ID: PAT_MRT4530_18261C.1.pep
MKIGLLMLLVLFLVMSPDGIRRSLAARPSIVNIGAILRFNSTIGGVSMIAIQAALEDINSDSTILNGTTLKVDMRDTNCDDGFLGMVEALQFMETDVIAIIGPQCSTIAHIVSYVANELRVPLMSFASDATLSSIQFPFFVRTAPSDLYQMDAVAAIVDYYRWKIVTAIYIDDDYGRNGIATLDDALTQRRCKISYKIAFPANARKSDLINLLVSVSYMESRVIILHTGAGPGLKIFSLANQLSMMGNGYVWIATDWLSAYLDANSSVPDETMYGMQGVLTLRPHIPESKMKSNLISKWSRLSKKYSYSYLRTSSYAFYVYDSVWAVARALDAFFDDGGKISFSNDSRLRDETGGTLHLEAMSIFDMGNNLLEKIRKANFTGVSGQVQFDATGDLIHPAYDVINIIGNGMRTVGYWSNYSSLLSTVLPEVLYSEPPNNSLANQHLYDVIWPGQTAQTPRGWVFPSNAKELKIGVPNRFSFREFVTKDNVTGSMKGYCIDVFTQALALLPYPVTYKFIPFGGGNENPHYDKLVQMVEDNEFDAAIGDIAITMSRTVTTDFTQPFIESGLVILAPVKKHIVNSWAFLQPFTLQMCYTASLTSILTVQQLDTSIRGIDDLKNSDGPIGFQVGSFAEEYMVRELNISRSRLRALGSPEEYAEALKHGPKRGGVMAIVDERPYVELFLSTYCKIAVAGSDFTSRGWGFAFPRDSPLQIDLSTAILSLSENGELQRIHDKWLKTSECSADNTEFVDSDQLRLESFWGLFLICGIACVIALLIYFFTTVRKFLRHEPPEDPTPRPGGSTTLPDERTPPKNGQEKCNCRNFISFLDHKEPPKKKRTFYRHSLPSSAPPPPSRGACAAACCCLRAAVSRRRAAAQLLSAAGFLIAVSPPSLAARRGRMVVSLEDYVTSPDGLKYYDLVEGKGPTAEKGSTVQASPKPPAAMYTITEGMKVGGKRRVIVPPELGYGKKGMNEIPPDAPFELDIELLEVVPPAEK

SEQ ID NO: 114586 - protein, 137 aa, Oryza sativa
  Clone ID: PAT_MRT4530_18262C.1.pep
SFKRMELLVLRGGMFKMHAVTALPFVEYFLHKLRDHGAPSLLARSRSSDLVLSTAKGAEFVVFRPSEIAASVALAAIGECSSSVIERGATSCNYLDKERVLRRHEMIQEEIAVGSIVLKAAGTSISSVPRKPHSVLD

SEQ ID NO: 114587 - protein, 641 aa, Oryza sativa
  Clone ID: PAT_MRT4530_18263C.1.pep
MACLAISLQPVNGPDILLQTRSWFPVSRALAAVSSFRLARLHLARGKQQQLSSSSSAAAAAATLEAIGDDPLAAGSGQLVVGVESQYRVVYRLVNSIYVLGVTTSSDHASPAVHAFAVADAVNQAVSVVVAACRGVDVTPEKVHRKYPEVYLALDLVLHGVGSVRLSQILATIHGDNLARMVNSSPDAEAKARGADPWPAVEHLAHDRHAARDGFTGASFELPQETLAAGDEFSASNIAPAAAAATGDEPPPEEAAPVEKDPFAASELVNNSEEALVGGFKKNKETAIVVADPAAALAGLEVTTLPPAEATKPTFIGVEGFEGDYGGIEFGNEEASLAEAFEGFNAPFGGGLDASEFVTTTKKDHKDKSITGLELLATSAGQGPNAPGGTPLENLLVTKSTEMTAPELYIVEEVNAEFKESILARVGLKGTIFLRTLPPKKAAGKETEFSFRLEGTSGMKKAALQSTVLSNLENGMFHVRTPSKEEPIPIMKYSFLPKHSPLPLRMRLVKRHSGTLLSVMIQYASNPMLPQPLSNVTFIVKLPVDPTLLNVSPKAVLNRAERELRWHIPDIPLKGPAGRLRARMPVDQDSKDGELEVVGMVKFAYQGPFTLSGIKLCPATDGTAQFNEAGHTFSSGSYLCI

SEQ ID NO: 114588 - protein, 85 aa, Oryza sativa
  Clone ID: PAT_MRT4530_18264C.1.pep
DSEQREEQLNRTEEMARRKSNPHKGRGDEEEYPMVAYACCPCYVLSSVIRGIGRCLFVACYPAIQCCGLDECRHHHTTTQLSHFR

SEQ ID NO: 114589 - protein, 72 aa, Oryza sativa
  unsure (1)..(72): unsure at all Xaa locations
  Clone ID: PAT_MRT4530_18265C.1.pep
FXVGWTGAFVNVQWLIHASXIDLWPYPFLDVAFPXAPVWYLVVAVMHFPCYAVIRPGYEAKPSLLERWFPHS

SEQ ID NO: 114590 - protein, 115 aa, Oryza sativa
  Clone ID: PAT_MRT4530_18266C.1.pep
SPPKKGLSPRFWPLFFFGGGKRRPQKLPLEISRANKGWFWGSKKKGVNQGRVQKVFLGPKKPPFFKGKKFFPKSKRGPPLFLKKKKKKKKKKKKKKKKKKKKKKKKKKKKKKRRE

SEQ ID NO: 114591 - protein, 96 aa, Oryza sativa
  unsure (1)..(96): unsure at all Xaa locations
  Clone ID: PAT_MRT4530_18267C.1.pep
MAIYELMCDTTQCTGHQAHYXTIHKTHLHDLIHDVERCKAVTAECEGIYVDYCRQEACGXTTEKLIKLHEAAYMIGTTEKMFSCDKITLTENRSEL

SEQ ID NO: 114592 - protein, 101 aa, Oryza sativa
  unsure (1)..(101): unsure at all Xaa locations
  Clone ID: PAT_MRT4530_18268C.1.pep
VILSFWLNRXPGASSGGEVSLYFGGMDPKHYKRDHAYVPVSRXGYXQLNTGDLLIDGHSTGFYAKGCAAIVDSGTSLLAGPIVLVAQVNHAIEAEGIISTE

SEQ ID NO: 114593 - protein, 301 aa, Oryza sativa
  Clone ID: PAT_MRT4530_18269C.1.pep
MASSFAAVFFSSAFAACFAEVCTIPLDTAKVRLQLQKKAALATGGGGGTTGGMLGTIMCIAREEGVAALWNGIIPGLHRQCVYGGLRIALYEPVKAFFIRDGDTVAGGVSLFAKILAALMTGVIAIVVANPTDLVKVRLQADGKATTVKRHYSGALNAYATIIRQEGIGALWTGLGPNIARNAIINATELASYDQLKQMFLKLPGFTDNVFTHLLAGLGAGFFAVCIGSPVDVVKSRMMGDATYKSTLDCFAKTLKNDGLPAFYKGFIANFCRIGSWNVIMFLTLEQGKNGKKKEVLVSSL

SEQ ID NO: 114594 - protein, 84 aa, Oryza sativa
  Clone ID: PAT_MRT4530_1826C.1.pep
MAMDNQKSYRALLGLDDAGAGWTLDSEEEHTGDKWVWTNRSINRPICRVAVMIRIIISIDMISLSVWVKDYTLDPHSQSTPLCV

SEQ ID NO: 114595 - protein, 263 aa, Oryza sativa
  unsure (1)..(263): unsure at all Xaa locations
  Clone ID: PAT_MRT4530_18270C.1.pep
MASSFAAVFXSSAFAACFAEVCTIPLDTAKVRLQLQKKAALATGGGGGTTGGMLGTIMCIAREEGVAALWNGIIPGLHRQCVYGGLRIALYEPVKAFFIRDGDTVAGGVSLFAKILAALMTXTSVIAIVVANPTDLVKVRLQADGKATTVKRHYSGALNAYATIIRQEGIGALWTGLGPNIARNAIINATELASYDQLKQXGLGAGFFAVCIGSPVDVVKSRMMGDATYKSTLDCFAKTLKNDVRQTLLQNFHSSSVVYNQIF

SEQ ID NO: 114596 - protein, 71 aa, Oryza sativa
  unsure (1)..(71): unsure at all Xaa locations
  Clone ID: PAT_MRT4530_18271C.1.pep
VPHDTQSCCWPDLSMSXDNYDLGETLTTRLQPYKTLCCALAIDTPLRRLLILPVQSNPIPASKSKKQARTR

SEQ ID NO: 114597 - protein, 33 aa, Oryza sativa
  Clone ID: PAT_MRT4530_18272C.1.pep
MGKMVASIGKEVLAWVGENTGEMMGTLRQMKGF

SEQ ID NO: 114598 - protein, 80 aa, Oryza sativa
  Clone ID: PAT_MRT4530_18273C.1.pep
PMASFLLEKSWQINAIRLLLISSFLQELLMEGCASSKNKLNGADHEHDYMNGVRGGDTAWQPRAATWAYRQTHNRILSLS

SEQ ID NO: 114599 - protein, 73 aa, Oryza sativa
  Clone ID: PAT_MRT4530_18274C.1.pep
MVFKHVVINIIRIQERDPDALLQVCNNVSSPYVFISPKNCCQILLHKNHYAFSKPPKTKRFFTNVISQSAHHC

SEQ ID NO: 114600 - protein, 339 aa, Oryza sativa
  Clone ID: PAT_MRT4530_18275C.1.pep
MGSGNKLAATVVVVTFAVLMAAVTTTCQAAYGPPNPASCGLKVGYYYAKCPHAEEIVKNVVGAAILHNPGVGAGLIRMLFHDCFVEGCDASVLLDPTPANPQPEKLSPPNMPSLRGYEVIDAAKAAVEAACPGVVSCADIVAFAARDASFFLSNSRVAFQMPAGRLDGRYSNASRALDFLPPPKFNLGQLVANFATKGLGMEDMVVLSGAHTVGDSHCSSFVPDRLAVPSDMEPPLAAMLRTQCPAKPSSGNDPTVVQDVVTPNKLDNQYYKNVLAHRVLFTSDASLLASPATAKMVSDNANIPGWWEDRFTKALVKMASVDVKTGYKGEIRKNCRVVN

SEQ ID NO: 114601 - protein, 55 aa, Oryza sativa
  Clone ID: PAT_MRT4530_18276C.1.pep
ALVHVGALEVRAVSASRAQQMTHLPHRVVGVGGCARKTVKGKGGPPVICAFVPRD

SEQ ID NO: 114602 - protein, 150 aa, Oryza sativa
  Clone ID: PAT_MRT4530_18277C.1.pep
MEEEDDIVVVDGGGRRAMMDGCYCATSSPTLYHAATPFYDSIVDYCSPPGCPLHYLVPRTAPLRLRAQVSTTELDAGWEAHTPRVEREHVDANYPPIANGIRDEVGSKGLCHAGSSDDGGSCIRTAPGDQQQPPRALVHLRYTFEGLFRL

SEQ ID NO: 114603 - protein, 1279 aa, Oryza sativa
  Clone ID: PAT_MRT4530_18278C.1.pep
MGDKEKPSFLRLVRYADAHDRCLMALGVLGSFGDGMMQPLSMLVLGDIVNSYGGAGGAGSARSAFSSGAVDKGLCWTRTAERQASKMRRLYLEAVLSQEVAFFDAAPSSPSSPQAQAQATTFRVISTVSDDADAIQDFLGEKLPMVLANATLFFGALAVSFVFAWRLALAGLPFTLLLFVTPSVLLAGRMAAAAGEARAAYEEAGGIAQQAVSSIRTVASYTAERRTVERFRGAVARSAALGVRQGLIKGAVIGSMGVIYAVWSFLSWIGSLLVIHLHAQGGHVFVASICIVLAGMSIMMALPNLRYFIDATAAASRMQEMIEMLPPLEGAEKKGATMERIRGEIVFKDVHFSYPSRPDTLVLNGFNLTISEGATVGLVGGSGSGKSTVISLLQRFYSPDSGEISMDDHGIDTLNVEWLRSQIGLVSQEPVLFATSIRENILFGDETASLKQVVAAAKMANAHEFIVKLPHGYETHVHKQQQFLQCMLQHAESYGVFFFSPVQVGQFGTQLSGGQKQRIAIARALVRDPRILLLDEATSALDAESERTVQDALDRASVGRTTVIVAHRLSTLRKADTIAVLDAGRVVEAGTHDELLGMDDGGEGGVYARMVHLQKAPPVAAREERHRAVDVVESEMVSFRSVEIMSAVSATEHRPSPAPSFCSVEHSTEIGRKLVDHGVARSRKPSKLRLLKMNRPEWKQALLGCVGAVVFGAVLPLYSYSLGSLPEVYFLADDGQIRSKTRLYYFLFLGIAVVCITANIVQHYNFAVMGERLTERVRGQMLAKILSFEVGWFDEDENSSAAVCARLATQSSKVRSLVGDRMCLLVQAGATASLGFSLALAVSWRLATVMMAMQPLIIASFYFKKVLMAAMSKKAKKAQVQGSQLASEAVVNHRTITAFSSQRRMLRLYEAAQQGPKKDNVAHSWFSGFCLCLCQFSNTGSMAVALWYGGKLMAKGLITPTHLFQVFFMLMTMGRVIADAGSLTSDLAQGGDAVRSVLDTLDREPTIKDDDNDNERKKKKRKEIKGAIEFKNVHFSYPTRPEVAVLAGFSLEIGAGKTVALVGPSGSGKSTVIGLIERFYDAQRGSVLVDGEDIRSYSLARLRSQVALVSQEPTLFSGTIRDNIAYGAAEEHATEDEVARAAALANAHGFISAMERGYDTRVGERGAQLSGGQRQRIALARAVLKDARILLLDEATSALDAASERLVQDAVDRMLRGRTCVVVAHRLSTVEKSDTIAVVKDGRVAERGRHHELLAVGRAGTYYNLIKLQHGRSPCLSPM

SEQ ID NO: 114604 - protein, 48 aa, Oryza sativa
  unsure (1)..(48): unsure at all Xaa locations
  Clone ID: PAT_MRT4530_18279C.1.pep
MVGPGKEGLVTRPKTTFKNTFAKKGLKRGAHVHEDNVRGSXRXXXXXX

SEQ ID NO: 114605 - protein, 1156 aa, Oryza sativa
  Clone ID: PAT_MRT4530_1827C.1.pep
MVTTRRSAATGEGSHPEGSNYNNHGSPPPPPHPPPPPPPDTNSILTQILAQQANMMAAFLHHIQNPPQHNAPPPPPPPQHSKLAEFLRIRPPTFSSSNNPVDALDWLHAVGKKLDTVQCNDEEKATQPEGQPITWARFTAAFRRTHVPAGVMTLKKREFRELKQGNCSVMEYLHEFNNLARYAPEDVREDEEKQEKFLAGMDPELSVHMQQQQPRSALRPQFVVRVPQPQQQQSQQGTRAPRPPTPAVQPGQGRRDVHGQQRLCFNYFEPGHFADKCPKPRRQQGQAPPRPNNGGKDVIRGRVNHVTAEDMLTTPGVIVGTFLIHSIPATILFDSGASHSFISVPFVGRNQLGVERLRNPLLITTPGGVMTAKYYSPAVPIEIQGILFPSDLILLDTKNLDVILGMKWLAQFQGVVDCARRTVTLYRGPEQPVVFFAPPTSASSSELHQIGLSEIPIVREFGDVFPEELLGMPPKREIEFRIDLAPGTTPLYKRPYRMAANELAEKKDKTKRMCVDYRALNEVTIKNKYPLPRIDDLFDQLKGATVFSKIDLRSGYHQLRIREEDIPKTAFTSRYGLYEFTVMSFGLTNAPAFFMNLMDKVFMENLDKFVVVFIDDILMYSQSEEDHQQHLRLVLGKLREHQLYAKLSKCEFWLSEVKFLGHVISAKGVAVDPETVTAVTNWKQPKTVTQVRSFLSMAGYYRRFIENFSKIARPVTQLLKKEEKFVWSPQCEKAFQTLKEKLVSSPVLILPDTRKDFLVYCDASRRGLGCVLMQEGHVVAYASRQLRPHEGNYPTHDLELSAVRRWLELIKDYDVGIHYHPSKANVVADALSRKSHCNTLGVRGIPPKLNQQMEALNLSIVGRGFLATLEAKPTLLDQIHEAQKNDPDMRGLLKNMKQGKATGFTEDEHGTQWNGNRVCVPDDRELKTVDTSGSSRKSLFHPSWQYEDVLRLERKILHVKAEHQRPAGLLQPLQVPEWKWDEIGMDFITGLPKTQGGYDSMWVVVDRLTKVARFIPMKTTYGGNKLAELYFARIVSLHGVPKKIVSDQGSQFTSHFWKKLQEELGTRLNFSTAYHPQTDGQTERLNQILEDMLHACVLDFGKTWGKSLPYAEFSYNNSYQASIQMAPYEARCMAANAGHRYCGTKLGKAKCSGPIY

SEQ ID NO: 114606 - protein, 81 aa, Oryza sativa
  unsure (1)..(81): unsure at all Xaa locations
  Clone ID: PAT_MRT4530_18280C.1.pep
MPVIPKIPKAEELPRNATAGFLGIMGIVSEDVDTNKVSITQLSRNSKHINDTVFQTPNXSAQQPQAMPTRSWPRTAGALML

SEQ ID NO: 114607 - protein, 138 aa, Oryza sativa
  unsure (1)..(138): unsure at all Xaa locations
  Clone ID: PAT_MRT4530_18281C.1.pep
KVLEYSEGPTVXVAQKIGEVIPKSCLEKEITKVVFARGGFLYHGGIKTLAYSAKKNGFNFLNPQMFVKISKIPCYFFFRPPVEKSFFLEKFNLPGRVGHSLFVNPPPIGSPKKKKKKKKKKKKKKKKKPKPKKKKKKK

SEQ ID NO: 114608 - protein, 1367 aa, Oryza sativa
  Clone ID: PAT_MRT4530_18282C.1.pep
LIGKIFCFPNLEFLSVAQNRLKSLCMASQPRLQVLAASRNKISVLKGFPHLPSLEHLRVEDNPLLEMPHLEAASILLVGPTLKKFNDRDLNPGEAEVAKQYPAHTAICIRDGWEFCSPELAADSTFSFLLEQWKNKLPQDLIVKKAHVDHPFEEDPCHCHFSFTNQCDEGELVLKYQWFIGDKTPTDFVPLPEELSEVYWPKREDVGRCLKVECTPILNDAEFPPIFAVSLPVSPGTGCPKVINLTVHGDLVEGNVLRGVPEIAWCGGMPGKVNTIDFVKPSFEASWLRRRWNGNAVVIDGADRMEYQLTLDDIDSSLVFMYTPVTEDGVKGEPQCTMTDFVKAATPSVSSVHVVGDIVEDNTIKGNGKYFGGKEGLSKFLWFREKENGYDRMSHTAISLSSLSIDKTPLCEFLLVLSNSTEYTLTKEDVGRPLKFVYVPINLEGQEGEAAYAMTDAVKKAPPKVLDLKIVGEAREGSKVSATATVKGGTEGFSRVQWFIGSSSKFLNENELRVLTTSKVSKTFRIPLSAVGYYIVAKFTPMAPDGETGEPAYAVSADVVEMLPPSLNFLTVTGEFSEGQMLTASYGYIGGHEGNSLFSWHLHETEDDEGSLVSEASGLLQYQVTKEAVGKFLSFKCVPIRNDGILGRPTILSLELTGEAIEGTTMVASRRYWGGEEGETIFRWILTSSDGSQKQIEGAASSSYTLNCNDIGFYISVLCEPVRSDGVHGSLVSTEESGPILPGPPTCLSLELAGPMVEGGCLTFHAEYTGGFKGDCIQEWFRLHSDGSKEKLSTDECLDLTLDDVDSRIELIFTPVRDDGSQGSPKSVLSDTILPGDPKGVDLVLPECFQDNEISPIKTYFGGKEGTGKYTWYRTKEKLDNLEADLVASCSEVGVNLMYKPSLDDVGFYLILHWVPARYDGEIGDPLVAVTSDPVMAAFPSVSDVHLKQKSSLLYSGTGVYYGGYEGSSLYKWYRESSDGTRHCIDGADLIIYEVTDADYSRRLLFGYIPVRSDGIIGEERLSEPSDIILPERLKIEALSFKGNQVERETLTVLEQIPSTAVQQHLWSNYKKEITYQWFASSGSEVDQTFEPLANQCSRSYKVRFEDIGRCLKCECSVSDVFGRSSELISIVTAPILPGKPKIEKLEIEGRGFHTNLYAVRGTYSGGKEGKSKIQWLRSMVGSPDLISIPGEIGRTYEANVDDVGYRLVIIYTPVREDGVEGQPISASTEPIAVEPEIYKEVKQKLDDGSVKFEVLCDKDRTPKKAQVMGHLERRILEVNRKRIKVVKPGSKASFPTTEVRGTYVPPFHVELYRNDQHRFKIVVDGESEVDLMVQTRHMRDVIILVIRGLAQKFNSTSLNSLLKIEA

SEQ ID NO: 114609 - protein, 135 aa, Oryza sativa
  Clone ID: PAT_MRT4530_18283C.1.pep
MKDLGVIDVILDIKLLRGDEDETTIVQSHYVDKVLSQFGYSDCKPAPTLYDPSAVLRKNHRIARNQLRYSQIIGSLIYLPSVTRPHISFAVSKLSRLVSNSGEDHRYALERVMCYLKGTMSHGIHYAGYTKVPEG

SEQ ID NO: 114610 - protein, 106 aa, Oryza sativa
  Clone ID: PAT_MRT4530_18284C.1.pep
MDNGNYRVKKNVVWNFKWDYGRTRRRRQREELALGGAGYAWDEAAELNEAQEDTPPREEAALPSSMELKKRASEAAWDLEPQLGALLEDGDDHQDGESQGLPDLAT

SEQ ID NO: 114611 - protein, 34 aa, Oryza sativa
  Clone ID: PAT_MRT4530_18285C.1.pep
CGHQSCVLCVITNYLNKRKRSSIFLILNECHVSL

SEQ ID NO: 114612 - protein, 114 aa, Oryza sativa
  Clone ID: PAT_MRT4530_18286C.1.pep
MDNGNYRVKKNVVWNFKWDYGRTRRRRQREELALGGAGYAWDEAAELNEAQEDTPPREEAALVGVRRQQTEEPELGGAGNARDEAAKLNGAQETRLRGGMGPRASARCSARRWR

SEQ ID NO: 114613 - protein, 264 aa, Oryza sativa
  unsure (1)..(264): unsure at all Xaa locations
  Clone ID: PAT_MRT4530_18287C.1.pep
ETILGSGMSTKMWEVXVEHSKTCILPDKVHLYYPDSLSKTAVVFNVVGEVRGLISEKFVCADDLREKEKAEAYAAVKQAYENWKNVFTCDNETLLANPSQLLDVRTTSLHENDYDQFSTQVFTDGFGLSQSSIPSPDIFSIDPSSALDPCPLETAENNENQYQSELPPLGGHAPPQVSQTVDKFSNSLVYEDCTSHPSFSEDYYRCSDPSVSFDTQDLGAALKGFIATISKPKAYRGWRTLSYVIGWIFYTKKIVAMKRNEHGK

SEQ ID NO: 114614 - protein, 89 aa, Oryza sativa
  Clone ID: PAT_MRT4530_18288C.1.pep
LSPEAGESRELSKSWQQRFAQLNTNTLFTSVLLHRQNTMTYAFHTGTSEKRAERVIRCFDLSFYGWFLTSIEIQHSVGLQDMLNSTEGR

SEQ ID NO: 114615 - protein, 380 aa, Oryza sativa
  Clone ID: PAT_MRT4530_18289C.1.pep
MNSKRRRSHSPVEHLEGNNKEIEISGRKDDLRDLENDSSNARSGRGHEYVRHSDRHSSGAPRDSRRHDDYRRYHDKRGDDNDRGHRISRSERESRSDTYYDRTKRDGTSDRSRGDWRNDDKSLRREHRSKNQDKQEPSREYPRYDGEHDKYSDGKKQGHTSRRYPEEKESKYKETAKQEEALKKRTGKEIEKMSSVAEPEVGTREKRSLFSSVGPDFENAQLNDNADTSGKKPSLDCSNGVVLDNPTSGFTVNSVDAAKVAAMKAAELVNKNLVGFGVGAGRLSTDQKKKLLWGNKKSNPPESSAHWDSNLFPDRERQEKFNKLMGVKSSSSSSAQESKVDGKDGSSSDAKKQEELDTDLEKHYIAGLRRRDGRTVGLGL

SEQ ID NO: 114616 - protein, 727 aa, Oryza sativa
  Clone ID: PAT_MRT4530_1828C.1.pep
MDLRKSSSTSASLKKLQEDGALPGRGTMEREAGGTNPQPVLGRMVAIEDYILCGFLPPPSEFLLLVLNFYGLSLLHLNPNSIAFLSIFAHLCEAYIGVEPFLDLFRFYYELRWMESNRCPSSHSKWRNRWLYLEIKDSDPVFVVPKEQPDKISSWTAKPPLTPSLQSFIDIIDDFRVRGLSGYEVIADFVGLNSETMERRVDQVMISGLTTASDIPVPLCEKGAAERNDAINASDASPPPPRRQRIVTIGEKEARAKAVQAKFGGTSSASPAVASTDVALTAGSREATPSGPVSDPAAGRGPPIAGLTLEELQVEMRRLLEAGARGIDREIAEARSEAALANARADRLVRELAEAREDLTKMRELVSGNERQRKGLEDRLSELGNNLSEIRGSLWVTYTGLHQLSGECGIKSTIPVNPDEFSLTSSLAELATTMGEIPPKHAARIAEETSSGIYTGECHVLACVKQSRPELDLREILDQGAASDTREEVMEEVGDLGESILPLFEEDADDEDIQQCGQPESLAIISVLEFEPHVSPDNVDQTLDTETGMTTTSSEDLEGALAGQDHRIQYWKMKFEVAELERTMLAVKKEQAVETLQGREVWFNSYLKSCCTSMARVCRELRVVRGDPEESAAGYISWLNGACAQLNGIGKRIDEALKQECRRSSRYAGGHVLACPRDHRPRLDLDFLHEGFARSQRTPAEIDHLARSMSPLAEKIFQSMDWRWPSW

SEQ ID NO: 114617 - protein, 848 aa, Oryza sativa
  Clone ID: PAT_MRT4530_18290C.1.pep
MEDGAAGGDVSADRVIAELLDMGFEFDEISRAIGAVGTRCADVLEFMLGGSGNGKMKKASRETRSRSCVSSNAEARPSDDGNKLVNPRKRLKQSSITDHLASNTGCRRGSCGEKASTSYPCLAASDDPRAPVAVSADVCSALKPESQFLLANSRSESDLGHKISAVLRKHFGFSCVKGFQKEALDAWFAHKDSLVLAATGSGQPDSRVEGKAMSGMYKIIYVCPETVLRLMEPLKKLAEKPGIALFAIDEVHCVSKWGHDFRPDYRRLSVLRENFSASKLKFLEHDIPLMALTATATIPVRADIIKSLKMSEDTVVVLTSFFRPNLRFRVKHSRTSVSAYKKDFRELVVTYNDSRNFRGKGQKALSEINPDSESSSYESPDDAMSDDEDANVDSMSHEDNSFGKTKVGMPLINENAENELDVYPGVDDFDVTCGEFLECSWPENSASSSQCNKTGSSSSEIADQGPTIIYVPTRKQTVELANYLCKTGLKAAAYNAKMPKSHLRQVHQQFHCNALEVVVATIAFGMGIDKSNVRRIIHYGFPQSLEAYYQEAGRAGRDGKLADCTLYCNLLRAPTLLPNKRSKEQTKVAYRMLRDCFHYALNTSICRAKILVKYFGEEFGPDGCRMCDICINGPPQMHDFKEDAVMFMSVLQAQNGQATEDMGCSNIPRYISGRQRFGEVPNFRGVVSYIREKFPRFATTDKVWWEGLARILEGRGYIQEAAEIGLFGGLHLPSFFYFSSEIEILKPRVLIQYPEVTEAGLNFLSMQSEEEGLYEYLNAAMLLVMNDPKPISTSSEWGRGWADPAIRRQRLAGKKMGRRKGKRHSRSHSTGFTTARQRLAEILSKRRR

SEQ ID NO: 114618 - protein, 82 aa, Oryza sativa
  Clone ID: PAT_MRT4530_18291C.1.pep
LKLSTQNLKSCPSTFENFRLTQEPANLRAAKESTLALGSLGRLLPIGYCRVILLPGTKLWGFTFSPSPVKKWGSKQKLLESV

SEQ ID NO: 114619 - protein, 237 aa, Oryza sativa
  Clone ID: PAT_MRT4530_18292C.1.pep
MGEMEERLLAVVEKLAEKVEKVELIQEKLEAMDMKLEKQGERLDQVQAKANRANNAGDSNQDNGGNLFYDKRTTSDAVVNEFDSGTHHIKANAMFELKQTGSVDEYKSQFDDLMYNIKLYDNTELGTVWEVGHFVAGLKDALKTHVLSKLPETISQAYHLAKAKERVMGEVMQGKKKWGMKIGRSKGGDKSKISTGDLWKAQQLKEYRRIHGLCFRCGEKYSPNHQCAQIPAAQVNV

SEQ ID NO: 114620 - protein, 408 aa, Oryza sativa
  unsure (1)..(408): unsure at all Xaa locations
  Clone ID: PAT_MRT4530_18293C.1.pep
MGEMEERLLAVVEKLAEKVEKVELIQEKLEAMDMKLEKQGERLDQVQAKVDLSVESLGQVHQEXIHVTQTVRRTAPTTLVIPTRTMEATSSMTREQPQVTFPTSTPTPPPRVETDENHFRRNMPKMDFLKFDGTDASVWVDNCETYFAMYQIPAGFKVSVASLNMLGKASXWDEFTDAVVNEFDSGTHHIKANAMFELKQTGSVDEYKSQFDDLMYNIKLYDNTELGTVWEVGHFVAGLKDALKTHVLSKLPETISQAYHLAKAKERVMGEVMQGKKKWGMKIGRSKGGDKSKISTGDLWKAQQLKEYRRIHGLCFRCGEKYSPNHQCAQIPAAQVNVVETIDHTDVLSDDILEAVMEVEDLGQNPDMFLSLNAVAGWGNTGTIHLRAMVHNQVLLIPVCHGPSHQTL

SEQ ID NO: 114621 - protein, 420 aa, Oryza sativa
  Clone ID: PAT_MRT4530_18294C.1.pep
MEEDEEEDDELLMEMTSDDELLFLNGIHVRLDLERTLTTAPIKLSAPLCQSLESMEGKLLEKLELLTQKMEAMDDKMTKHGGRLDQAVVKVDLALEAVGKLQQDQLQAARLQKSLASSDQGVQESDSQTELCAISYPQILKWQKGCDIWAAVLLEPTDNADSQSISEVVAPLLSEFADVFQEPKCLPPHRTFDHAIFLYPDDAPVNSKPYRYSPLQKDEIECQVKDMIDSGLKSDVANFVKQCQICQQAKSEHCKLPGLLTPLPIPKEAWVDISMDFIEGLPKSDGFTVILVVLIKWSSLPAHQATWEDYEVLKTRFPSAPAWGQAVSPAGGRLETISCQPRLVDVPLPNNALSAVQATTSEVSKLIIPTNQSLQLHDPPSPNERTKKTLLDSQKSCRMRHIPCVMRMAKLAHQDFRGST

SEQ ID NO: 114622 - protein, 1029 aa, Oryza sativa
  Clone ID: PAT_MRT4530_18295C.1.pep
MEYAILFATSLVITVLAASGFAPAHGWNKGTATFYGGADASGTMGGACGYGNLYTAGYGTNTAALSSVLFNDGWSCGQCYLIMCDAAATPQWCRAGAAVTITATNLMEGKLLEKLELLTQKMEAMDDKMTKHGGRLDHAVVKVDLALEAVGKLQQDQLQAAQLQKSLASSNQFESTAQCEKVQALQTLRQTGSVADYKSQFDSLVYQVRVFDPSVGGMMLLYRFILGLKEEIRSVLLVQLPDTVQQAAAIALVQESVLLDSGQKPLKKLTYKGVGTKVDTSVPISEPSAIKPERAELWKAKQLKEYRRANGICFKCGDKYSPDHQCVITVVAEEDSDAEEQYHISLNALSGASRHNAIRLRALVQNKVANGDFLSCQYVVPNFTWWIQGQTFSYDLKVVQLGGHDAILGMDWLAQWGDMSCNWATKTLKFFYQDQWIALQGVQESDSQTELCAISYPQILKWQKGCDIWDAVLLEPTDNADSQSISEVVAPLLSEFADVFQEPKCLPPHRTFDYAISLYPDAAPVNSKPYRYSPLQKDEIERQVKDMIDSGLITPSMSPFASPVLLVKKKDGTWRFCVDYRKLNSVTVKSKFPMPVVDELLDELAGTQYFSKLDLRAGYHQIRMVEQDEFKTAFKTHHGQFQFSVMPFGLINAPSTFQCLMNSVFASLICKCVLVFMDDILVYNPNLDSHLHHLRQVFMLLRQNQLYAKMSKCSFACAQLEYLGHIISAKGVSTDPAKTAAMLAWPVPQTATELRGFLGLTGYYRKFVPNYSIIAKPLTVLLKKKAFLWSDAAQQAFQQLKLAMSSTPEVLNSYSVDPAAQTLLTELAVQSTNTQGFSLHDRLIRHHGRVWIGANIGLQTKLITAFHSSPVGGHSGTTATYQRMKKLFSWVGLKSDVANFVKQCQICQQAKSEHCKLPGLLTPLPIPKEAWVDISMDFIEGLPKSDGFTVILVVVDRFTKFAHFIPLRHPFTASQVANAVDKTVFKTHGIPHSISDRDKIFTSRFWSDLFKVWDTTLSMSFAYHPQTDG

SEQ ID NO: 114623 - protein, 294 aa, Oryza sativa
  unsure (1)..(294): unsure at all Xaa locations
  Clone ID: PAT_MRT4530_18296C.1.pep
LFLKRKRELLRQRLGFAVDRVHGGGSRKRTAEIDSSKTDDRDRPVHGRTTGDDDDDVSGDVTTGGGSGVHARRHTTARQRERRAPTGSGRHGELTGDQRKGGGDDQVDGGDGAPVVDNDGEGADEDGDETATTTVTSRMTATTGATAVHGWSGGDDGGARLHGARALRAAADEDEGGDGGWKAAAKAHGDRRREGKIRVRRREIDPNRTRIHGFXNDFSRRFQKRKGRGDPGDHFPSIDFTGNGKGRWAPPVSGRMRAREQAARLRAGLGQEREKVLGRLSAQSQKRILKTFSI

SEQ ID NO: 114624 - protein, 98 aa, Oryza sativa
  Clone ID: PAT_MRT4530_18297C.1.pep
RLKKGLSSFGQRPDRSLQPNHWLAFNYLSIPYSEGHPKRFRPIINRLGTFGLEWKEWPQPHFLYKAGPLNLFFWKSNILCLNHHLGKPRKRNLFLARG

SEQ ID NO: 114625 - protein, 80 aa, Oryza sativa
  Clone ID: PAT_MRT4530_18298C.1.pep
MAVDLKQIKNNRGTLMTHMSGGVRRRLGMTSAQAGQWRLVTTLTPTGEAAAGDGLDSGGGSGVVRLRRGHAWRRGARRSE

SEQ ID NO: 114626 - protein, 137 aa, Oryza sativa
  Clone ID: PAT_MRT4530_18299C.1.pep
MARWWWWRAGDIQVGGIESSRVEGRNLLVGVGGDGAGGQEEIRVEGSSPGASTSRMRARPRIPRYVGVGYTPLHLHGGGGGLGAELRRRRTVTRRRRLRAVAEGGSLGTELRRRRTVTRRRRLRAVDEGNTLFFVFF

SEQ ID NO: 114627 - protein, 185 aa, Oryza sativa
  unsure (1)..(185): unsure at all Xaa locations
  Clone ID: PAT_MRT4530_1829C.1.pep
LPPRDEAWERQRRTGAAEAVGNDGDERRGDDFGGDPWTKARHGRRRAXRRGGEDEDDDGAAAAHLTDADDGRERLDGGTNATTTGNDERTTTMTTGAGEEATRAAGNGGDAAEVAGGSTVAATPLFCRRGHVSGDFPAKRRADRGRGGGCEAEAATARPDGARARRKGGWMLAGAGEREGEGGER

SEQ ID NO: 114628 - protein, 65 aa, Oryza sativa
  Clone ID: PAT_MRT4530_182C.1.pep
DTTLVPGKTHHIPEPSLAGEKKQPNPRQLPNRPNRCRKAKLSHPPSPTTTRTEKTRSITRLIYPA

SEQ ID NO: 114629 - protein, 60 aa, Oryza sativa
  Clone ID: PAT_MRT4530_18300C.1.pep
GVPAGGWVAIRFFADNPGVWFMHCHLEVHTTWGLKMAWVVNDGPLPEQKLMPPPSDLPMC

SEQ ID NO: 114630 - protein, 181 aa, Oryza sativa
  unsure (1)..(181): unsure at all Xaa locations
  Clone ID: PAT_MRT4530_18301C.1.pep
QEAAPCLSLLYLVLRRLSLTCLDTSLLGRFDDLDQRGKISAEYIWIGGTGQDLRSKTRVLSKVPKSPSDLPXWNYDGSSTGQAPGEDSEVYLVPRAVYKDPFRRGDNILVLCDAYEPPRVQPDGTVSGIKAIPTNTRAACADVMEKVKDQEPWFGIEQEYTVLNATTKWPLGWPTCGYPGP

SEQ ID NO: 114631 - protein, 34 aa, Oryza sativa
  Clone ID: PAT_MRT4530_18302C.1.pep
MALDEGYVDWRGNAVDARKHGGTKATVFLYGRCI

SEQ ID NO: 114632 - protein, 369 aa, Oryza sativa
  Clone ID: PAT_MRT4530_18303C.1.pep
MASSLSLLLAGVKAALVVLAGVALYSPEGFSPAPMPPEYSYGAPVSAPRHEPRALAASERVGEGRLPAPEDLAYDAAGGWLYTGCGDGWVRRVSVSSGDVEDWARTGGRPLGVALTADGGLVVADADIGLLKVSPDKAVELLTDEAEGVKFALTDGVDVAGDGVIYFTDASHKHSLAEFMVDVLEARPHGRLMSFDPSTRRTTVLARGLYFANGVAVSPDQDSLVFCETVMRRCSRYHINGDKAGTVDKFIGDLPGFPDNIRYDGEGRYWIAISAGRTLQWDVLTRSPFVRKLVYMVDRFVVAVPHNLKNAGAMSVTLAGEPVSMYSDPGLALTTGWLKVGDYLYYGSLTKPYLSRIDLAKSPAEKAQE

SEQ ID NO: 114633 - protein, 111 aa, Oryza sativa
  Clone ID: PAT_MRT4530_18304C.1.pep
MASTKVQRIMTQPIKARIQIWLFEQKDLRIEGRIIGFDEYMNLVLDDAEEINVKKDTRKSLGRILLKGDNITLMMNTSIRDMALLPYCLKRKSHGDLVDVFCLYTVLLEIW

SEQ ID NO: 114634 - protein, 76 aa, Oryza sativa
  unsure (1)..(76): unsure at all Xaa locations
  Clone ID: PAT_MRT4530_18305C.1.pep
CTPWRSSXPSPRRRRRAXRKPXSLQAPFLTTXRRXNLSSPPLAAPFLLXHPXSSSPRXRPATSDSXSRLXAAAASG

SEQ ID NO: 114635 - protein, 96 aa, Oryza sativa
  unsure (1)..(96): unsure at all Xaa locations
  Clone ID: PAT_MRT4530_18306C.1.pep
GLMGKKRLLLSSPPVWMPPRGPTKWAPFRSRAPRSLLGPGPPVIGVLGLLPHPQPPGLGFPHFWAPPPKSNINPRXHGGPFSQNDTPHPLKPTPPH

SEQ ID NO: 114636 - protein, 87 aa, Oryza sativa
  Clone ID: PAT_MRT4530_18307C.1.pep
LSSEPGDLAGNPATPATRNITVDTVAPAVNELDITDNTDTGADDLITSNGNPVLTFTGEPGLTITLTGPDGALAPSAAYTVAETPSA

SEQ ID NO: 114637 - protein, 62 aa, Oryza sativa
  Clone ID: PAT_MRT4530_18308C.1.pep
GLQPLQRFHVSSAQSTEPVGASSAVEDLARRHCHALASALEESSLSNTSNAFSAPTTVLSVT

SEQ ID NO: 114638 - protein, 85 aa, Oryza sativa
  Clone ID: PAT_MRT4530_18309C.1.pep
KVGQPILLRINFFCGGGGGRERRPQPLHRLPKLGDKEENLKQLQSNPTISCYSRYIQGSCYFILYVMRSIRERARPLSSAHFILD

SEQ ID NO: 114639 - protein, 567 aa, Oryza sativa
  unsure (1)..(567): unsure at all Xaa locations
  Clone ID: PAT_MRT4530_1830C.1.pep
MDLSKSSSTSASLKKLQEDGVLPGRGTMEREAGEQPDKISSWTAKPPLTPSLQPFIDIIDDLRVRGLSGYEVIADFVGLNSEAVERRVGQVMISGPTTASNIPTPLCEKGAAERDDAINALPLTDIIGPLTDHQVAASLKEKVAKEAYDAAAATTSGGNVATKGRKFSSASDASPPPPRRQRIVTIGEKEARAKAAQAKSGGTSSASPAAASTDVVPAAGSWKATPSGPVSDPAMGRLLEAGARGIGREIAEARSEAALANARADRLVRELAGAREDLTKMRELVAGNERQRKRLEDRMSELGNNLSEIQGSLRVTYTGLHQLAGECGIKFTILVNPDEFSLTSSLAELATAMGEIPSKHAARIAKETSNGIYTGACHVLACVKLSRPELDLREILDQGAASDTRRETLDTETGITTTSSDLEGALASQDRHIQYWKMKFEVAELERTMLAVKKEQAVETLRGREVWFNSYLKSCCTSIARVCKELRVVRGDPEESAAGYISWLNGACAQLDGIGKRIDEALKQECRRSSRYAGGHVLACLRXVIARAWTSNFSVRVLLVLGGLRRR

SEQ ID NO: 114640 - protein, 187 aa, Oryza sativa
  Clone ID: PAT_MRT4530_18310C.1.pep
LEQILSCAQNEKLLPEIRTRAEAEAPTAPKNNQTIAVLTTSLSSWYSDQIQKKYSEHPTVDGTRVEVYQPSHEEYQRSKNKKHNMKALAEIYLLSMTDVLITSGFSTFGYAAQGLSGLTPWIMFRSENHAMPDPPCRRAMSIEPCFHQAPFYDCKAKRNADLGKMVPFVRHCEDVSWGLKVVNQTQW

SEQ ID NO: 114641 - protein, 214 aa, Oryza sativa
  unsure (1)..(214): unsure at all Xaa locations
  Clone ID: PAT_MRT4530_18311C.1.pep
MEVKLWNDKRERELLXESLADLYAIIKATEKLERAYVRDLVSAADYEAECLKLISQFNSLSSSLAGVVTIPRFVEAYRLDCPAALNRLVQSGVPATVELRAAASSSAPASSAASAAAIAQCVQSFITAMDAVKLNMLANDQVRPLLHDLSTSMGKLGPVLPPDFEGKVKVSEWLAKLNKMGAGDELTEQQARQLNFDLDSAYSAFMASLPSTGL

SEQ ID NO: 114642 - protein, 391 aa, Oryza sativa
  Clone ID: PAT_MRT4530_18312C.1.pep
MGNGLSSGRHLVKLPLRLVAPMISATIVDGIHDEHMITDNPPPLAAVLYAAGVDDNTLANYLPAVLKGSARTYKCHAIKDDLHVLTQNPGESLRDYIRRFNECQNTILEITDASVIRAFKICGPTKHPDPQGDDTKKIWCPIHKSDKHSLETCFVFKKALTKQLALEKGKRVRVVEKAAEAATQDSDSAYPDSDLHISHIFGGSTTYSSKREYKKVEHEVCLTWQGAASKMKWSERKIKFSEADYPKTAVTLGRYPIVVEPTVRNIKVARVLIDGGSSINLLFASTLDAMGIPRSELTPTDQPFHGITPQSSSKPLGKITLPGNAKLVVQCDKQSLDMVEHTPNPPATAEPPKKLSKTNKTPKPDGAIKIVPLSSANPDKIVKIGAPLDEK

SEQ ID NO: 114643 - protein, 1275 aa, Oryza sativa
  Clone ID: PAT_MRT4530_18313C.1.pep
MEFEADGARWPEPRGDAAGAPPLERGDAPSPRFDSSRALRLLRELGSNVTEDLVVLMPNLLSFLKHDDPVVVNQSIASGTNLFAAVLEEMTLQINKCGRVDAWLEEMWAWTKQFKDAVHNLIHESVPVATKLFAVKFIETWILCFAPQSKSDRMQPTEGRNRRLFDSSRLSQFHPSLNPAVLEADANRALILLVDILQSACAHQGSFLVGTINSLAAIAKNRPVYYERILPVLLGFDPSLEVAKGAHPASLRYSLKTAFLGFLRSPCQAMIESKDTLVRQLRVLSPGEATEQIIRQVEKMTRNIERASRASKDEPSTLDMPYGDVSRKYPAARSSDAFATADGVAKRARFDTSAALNPPFQGASDYSNMQVDNEANVDHSSDPALLNCDMSPVEKMIEMIGALLAEGERGAESLGILISTVEADVMADIVIETMKHLPETSILLATSNNGQQKKIQSSSSPLTENLPANSHSMPYSTQFALPADGVSMSMSDVPVVSGVHDSKRDPRRDPRRLDPRRTVAPAATSSIHVKGETTGVHQTNNLSNVPYPVSGKVENSLDYSGDLSKNEDVQQTSCQPNQSLPKENSEILDDALELEPKFEVQALADVGFHSSGVDKEMVNPLSPEATSNNELDSVELEVDPFSPVLKASTLEDTTNHDLPVLPSHLELSDDEKILLHKLAIRRIIDDYKKNSVNTRFSLLAHLIAQRHIIYHYHDQGHELAMHVLYQLHSVSVADSPESTLPASKNYENFFISLARSLIHSLPASDKSFSKFLCDAPYLPESMLKLLEDICVSQGNSQQTKDSDGDRVTQGLGTVWSLILARPPLRQDCLDIALKCAIHSQDEVRGKAVRLVTKKLYELTYASERVEQFAIDSLLAIANKHGVETDINFTSLKESSPEFEAGSQETSVSGSHISDAEPSESTCNKTDLVSPKQSAVSVSEAKRHTSLFFALCTKVVKPFSFFQRPILLQHLFNVYGRSPKVVKQVLLSTSKVLNFDYWITTTVCSLRRKIMQCIHWHIPNLILQTLTEDSTPSAELVAAVKHLYKTKLKDASILIPLLSSFPKEEVLPIFPRLVDLPPDRFQDALARILQGSAHTGPALTPAEVLIAIHDINPEKDRVALKKVTDACTACFEQRTVDNVPIPLLFMRTVIQALDAFPALVDFVMEILSRLVNKQIWKMPKLWVGFLKLAYQTQPRSFDVILQLPPPQLEIALNKYPNLRTPLCSFVNQRNMHSILPRQILKVLGFINEPHQAPIPFVPAAMQTADATSSLPGATLM

SEQ ID NO: 114644 - protein, 145 aa, Oryza sativa
  unsure (1)..(145): unsure at all Xaa locations
  Clone ID: PAT_MRT4530_18314C.1.pep
PGLIKVKNKFLGFESFVLNXRFWEDKWIGNSSFKGWYLSLYNIVRRKSASVATIMNTVPLNVSFHRELVGQNIVNWQNFVARIVRINLNDNKYMFRWNLHQNGIFSVXSMYLAMINSGYIDRNKVLRKLKIPIKLKIFMCYLAKG

SEQ ID NO: 114645 - protein, 149 aa, Oryza sativa
  Clone ID: PAT_MRT4530_18315C.1.pep
AIANKHGVETGSGFIYLKESSPEFEAGSQETSVSGSHISDAEPSESTCNKTDLVSPKQSAVSVSEAKRHTSLFFALCTKRPILLQHLFNVYGRSPKVVKQCIHWHIPNLVRNLGSSCSEMLAIIHNPPEGSEELVTLILQTLTEDSTPS

SEQ ID NO: 114646 - protein, 187 aa, Oryza sativa
  Clone ID: PAT_MRT4530_18316C.1.pep
GSAHTGPALTPAEVLIAIHDINPEKDRVALKKVTDACTACFEQRTVFTQQVLEKSLNKLVDNVPIPLLFMRTVIQALDAFPALVDFVMEILSRLVNKQIWKMPKLWVGFLKLAYQTQPRSFDVILQLPPPQLEIALNKYPNLRTPLCSFVNQRNMHSILPRQILKVLGFNHEPDQAPIPFVPAAMQT

SEQ ID NO: 114647 - protein, 79 aa, Oryza sativa
  unsure (1)..(79): unsure at all Xaa locations
  Clone ID: PAT_MRT4530_18317C.1.pep
NGKNFFFLKTFFYYWGGGGPVVLNNNLCPRGGEKLLRWLVVFSSWPGFGANSSLDFPXXLSSEENLXFXNFXKILFFLP

SEQ ID NO: 114648 - protein, 70 aa, Oryza sativa
  Clone ID: PAT_MRT4530_18318C.1.pep
MAITAQTPDILGERQSGQDVRTQNVVACQAVANIVKSSLGPVGLDKMLVDDIGDVTITNDGATILRMLEV

SEQ ID NO: 114649 - protein, 74 aa, Oryza sativa
  Clone ID: PAT_MRT4530_18319C.1.pep
LVRAERPVHGLRRHAPVRTMVSSLMDATEKYVLSLETSMDLHFTGCNAQFIAACKIATNADPPDVQEVSQPPHS

SEQ ID NO: 114650 - protein, 451 aa, Oryza sativa
  unsure (1)..(451): unsure at all Xaa locations
  Clone ID: PAT_MRT4530_1831C.1.pep
LGFYFPRVNKTGYTETVHGSTEADPVCQPRRVADKQTPLDTTRAAHVETTRLPSGHTNXSPHAQANDCRHRYTGTGADNRTIGXGRHRKDEDGAARERDPYHHATRRGNDNDERARRRRXGEGTTSAAILGRRRDAAGTRLDDAEARTKTTTGLXGTLDGRGRRRRTAXWRDKRHDDRERREDDDDRGRRGGNEGSRQQLHGCEDGVEHAAAMPTTEAAPRDDEPARRNGEDDDGHRRRSVEGGDVDEEEGEASAAAAVCGGFRAKPGSSRRRGRRCDVDGGDGDVGCHTDDGQXPAGGSTVAPMPLVAGGGTVPASFRRGDGETGEGDGVAEPREATARPDGARARRERRLEAAGGTGERGRRRGEVVRRRGGAVGRAVSARAARVRTAGSARPGLGRADGPRQAGRKEEEGEEAREREGRGGSWAGRGREREGGEGDFGLGLAQRRKED

SEQ ID NO: 114651 - protein, 45 aa, Oryza sativa
  unsure (1)..(45): unsure at all Xaa locations
  Clone ID: PAT_MRT4530_18320C.1.pep
PLPNVFIRKMKILXAPKFDLRKFLQVLGXHSEXVGMKLDRPAKTG

SEQ ID NO: 114652 - protein, 68 aa, Oryza sativa
  Clone ID: PAT_MRT4530_18321C.1.pep
TQERLGERGNVRMESVSTIVNKKNLKGARFIGSMIAYRDIRLNIYIILWNKETTMDYCTDIDDCENRD

SEQ ID NO: 114653 - protein, 87 aa, Oryza sativa
  unsure (1)..(87): unsure at all Xaa locations
  Clone ID: PAT_MRT4530_18322C.1.pep
KGASTAXFWLGETDPASESVKFGLSLGQKQAGSPLQGQFDARTTAFILLAKICFKILAEKFIASFLLKNIAPVFLCPRIQALQKHIF

SEQ ID NO: 114654 - protein, 259 aa, Oryza sativa
  unsure (1)..(259): unsure at all Xaa locations
  Clone ID: PAT_MRT4530_18323C.1.pep
KKYRLARWSVLCKPKKCGGLGIQDLETQNKCMLSKWIFKLINEXGVWQNLLRKKYLVRKSIFQVQKQPGDSHFWASLMAAKEPFQTLGHFTVNNGKQVRFWEDRWLGNQPLHLEFPTLYSLVRNKNLVVADVLGRVPLNVSFRRAIVGKNLEDWLEIVSKVVSINLNDKQDQFFCKSNKKKGXFYVNSMYKTLMLNGVIPGKSLIWKLRIPLKIKIFLWYIEKGVILTKDNLAKRRWKGSLLCSFCNSNESIQPLFFDC

SEQ ID NO: 114655 - protein, 181 aa, Oryza sativa
  unsure (1)..(181): unsure at all Xaa locations
  Clone ID: PAT_MRT4530_18324C.1.pep
AALATVVSFLLVVLVSVAHGWNKDCPPPGSGSSGGGHHGKPPGSGSGGGGHHGKPPEHHHHHKPSPSSRCPSCHPAYTPATPRAAATSAYVSFSPPYLPTYIPAATPAYVSTFIPAATPAYVPPAKPAFSSAYVAAAKPALAAAYVPAANPAANKNCPIDALKLNACVDLLGGXLIHLVIG

SEQ ID NO: 114656 - protein, 585 aa, Oryza sativa
  Clone ID: PAT_MRT4530_18325C.1.pep
MEGLRGGGHGEAAVDGGDERWVEDSSVDYQGRPPLRAATGSWKAAMFIILIEFSERLSYFGLATSLMIYLTKVLQEEMKFAAKNVNYWTSVTTLMPLVGGFLADGYLGRFSTVLFSTLIYLSGLILLAISQLSPRLKPERNLHLHETLFFVAIYLVSVGTGGHKPALESFGADQFDDGHAAERVQKMSYFNWWNCALCAGVLLGVTVIVYLQEKVGWGAAAVVLAAVMAASLAVFLAGWRHYRYRVPEGSPLTPLVRVLVAAARKRHLHLPADANELYEVKPQNIKRRLLCHTDQLRFLDKAAVVEHDGGEERRGAWRLATVTQVEETKLVLAMVPIWVATLPFGITAAQVSTFFIKQGSVMDRRMGPHFTLPPASTFAMAAIGMIVAVAVYDKVLEPYLRRLTGGERGLSILKRIGVGIAFTIVAMAVAATVERQRLRSASPASMSVFWLVPQFLLMGIGDGFALVGLQEYFYDQVPDSMRSLGIGLYLSVIGAGSFLSSQLITAVDRVTSHGGAAAGWFGKDLNSSRLDLFYWLLACIGVANLVFYVVIATRYSYKTVMAGGKVVDDKAGDIECAAAAAAAAY

SEQ ID NO: 114657 - protein, 341 aa, Oryza sativa
  unsure (1)..(341): unsure at all Xaa locations
  Clone ID: PAT_MRT4530_18326C.1.pep
MAGTAATRAQLRPALVVPLVAXWKWLKERGNRKNGITGVRQSLWLRRSVADGGSQRRRRRQQNRGRNAAVGGVSWRAVAAPTEEVEGGFGWPARLGFGSAGLAAQEEWKGKRKKYTEGPSTCHGDKKHPQTVKPDIQGEGRRGADAVVLAAVVAVSLAVFLAGWRHYRYRVPEGSPLTPLVRVTSHGGRAAGWFGKDLNNSRLDLFYWLLACIGIANLVFYVVVATRYSYKTVMAGGKVVDDKAGDIEGAEEGGACITLVAAIHVRDPSRRYEALGAPMTAGGGLGLEGEERMEAVLRLDGSDLEAVVARAHQGRPKDGHRASALPVELDSGEAEDKAGPA

SEQ ID NO: 114658 - protein, 276 aa, Oryza sativa
  Clone ID: PAT_MRT4530_18327C.1.pep
MDDSGIGPKAAHELASRQVGGSVNLGYTRRVLKNHLRTKRQRELMYGEAGNEATFEETFSTIRSKVHKQTWLNSIYKVKEKWAECYMRNVYTLGMRSTQLSESLNNDLKNHLKSDLDIIQFFNNLERVIKGKRDNELDAEYEARKKLPRIKMRVPILVQASKIYTPCIFEYFQNEYERSMAAYIKSSEHNEFIVAIEAPGEASTFEEECKVVGNYAEQQALCTCGQFERTGILCSHALKVLDVMNIKSLPKRYILKRWTREARVGAIEDCYGKIVV

SEQ ID NO: 114659 - protein, 567 aa, Oryza sativa
  unsure (1)..(567): unsure at all Xaa locations
  Clone ID: PAT_MRT4530_18328C.1.pep
MKFKSTKEAWEFWTYYGGRTGFDVRINYENKSKVDGVITSARYVCSNEGYRAIDKRDHNTKRPRAKTRTGCKARIGITVDREVDDYSVYDLVLEHNHELQLPSTCHLMPSQRKISSLQAFEIETMDDSGIGPKAAHELASRQVGGSVNLGYTRRDLKNHLRTKRQRELMYGEAGSMLKYFQDKVAENTSFHYALQLDCEEQITNIFWADAKMIIDYAQFGDVVTFDTTFGTNKEYRPFGRTKKEDTNILSDFSACMYEYEDEATFQEDFSTIRSKVHKQTWLNSIYKVKEKWAECYMRNVYTLGMRSTQLSEXNNDLKNHLKSDLDIIRFFNNLERVIKGKRDNELDAEYEARKKLPRIKMRVPILVQASKIYTPCIFEYFQNEYERSMATYIKSSEHNEFIVAIEAPGEGSTFEEECKVVGNYAEQXALCTCGQFERTGILCSHALKVLDVMNIKSLPKRYILKRWTREARVGAIEDCYGKIVVEDPRLEDRCLLKFLIHKFLGIAIRAAESKECSTLVDSVLESLRKEEANGSLHTARLKKKETQKCSTRRKKNWLDKQHPTKKK

SEQ ID NO: 114660 - protein, 180 aa, Oryza sativa
  unsure (1)..(180): unsure at all Xaa locations
  Clone ID: PAT_MRT4530_18329C.1.pep
ELVPIAHARGXAVGSAPPSCFVVSPLFIHVAFIETASGSDASCSCSNXQASEEADPDSSPPRQRWDGTSQGEDLSGNRGGXDSSDATFTSDMYMSGSSCSRCGDRDKCIVISPHALLVIGSLLISCLRLLLQLFYTFETMEEKMRAMANLPQCVLPPQLLLKWPKEASFCQLLMHPVPDT

SEQ ID NO: 114661 - protein, 725 aa, Oryza sativa
  unsure (1)..(725): unsure at all Xaa locations
  Clone ID: PAT_MRT4530_1832C.1.pep
MDLGKSASTSATLKKPQEDGALPGRGTMEREAGCTNPQPILGRMVAIEDYVLCGFLPPPSEFLLLVLNFNGLSLLHLNPNSIAFLSIFVHLCEAYIGVEPFLDLFCFYYELRWMESNRVSGCVGFRLRDGLKSRYIPFQCPSSRSKWRNRWFYLEIKDSNPVFVVPEDQPDKIPSWTAKPPLTPSLQSFIDIIDDFRARGLSRYEVVAYFVGLSGETVERRVGQVMISGPTTASDIPVPLCEKGAAERDEAINALPLTDIIGPLADHQVASSLKVKVVKEVSDAATTSGGNIPTKPRKFSSASDASPPRPRQQRIVTIGKKEARAKAARAKSGEASSASPVVASTDVVPAAGSREATPSAPVSDRAAGRDLPTAVLSWEELQVEIGRLLEAGACGGELAEAREELMKMRELAAGNERQRKGLEDRMSELGNNLSEIRGSLRVTYTGLHQLAGECGVTSTIPVNPDEFSLTSSLAELATAMGEIPSKHAARIAEETSNGIYTGACHVLACVRLSHPELDLREILDQGAASDMHTDDEDVQQRGQPESLAVIPVLEFEPHVSPDHVDQPLDIEGRMATTSSDLEGALASQDRHIQYWKTKFEVAELEKTMLAVKKEQAVETLRGREVWFNSYLKSCCTSMARVCRELRVVRGDPEELAAGYISWLNGACAQLDGIGKRIDEALKQECRRSSRYAGGHVLACLRXITRAWTLNIFVRVLLVLGGLRRR

SEQ ID NO: 114662 - protein, 87 aa, Oryza sativa
  Clone ID: PAT_MRT4530_18330C.1.pep
PIYLLSTWRSELLTRSRQQGSLPPRIRVRRDQRQCYVSPISIRRHRRGLAMLISKVDIRRLVLAYNSIHPSLCGTPPISECCFRIRH

SEQ ID NO: 114663 - protein, 64 aa, Oryza sativa
  Clone ID: PAT_MRT4530_18331C.1.pep
EIFKPMNTKLKPCELTLDQTTTTLFNKMWSDIAIQGSQNYQNNHGSPKHEYRLPEQSCCLLPLV

SEQ ID NO: 114664 - protein, 150 aa, Oryza sativa
  Clone ID: PAT_MRT4530_18332C.1.pep
MMSAGRGKRQGRRPPAPRRPHHPKLVVSVGARQPPVPRRPCPDRRRRQRREEGRGRGAPAMGGDRVTGRLPLAEHATRSPLCRSELADHVAWSSPAACPLPTTLGPASTSVERGGEGERGTGGGGVQYSASLPCTPACLLACPWIDCCCY

SEQ ID NO: 114665 - protein, 74 aa, Oryza sativa
  Clone ID: PAT_MRT4530_18333C.1.pep
LAQDLNSAFHWSFSRLMDSSSGSQGKNSKTSDGCETKGLHILNFCLFPVSLFTFASLNNRYIAFSFPNSYHHVQ

SEQ ID NO: 114666 - protein, 102 aa, Oryza sativa
  Clone ID: PAT_MRT4530_18334C.1.pep
AVFSLHGVLSSSLGVVKRDGIERGVRRRDETGRPEKARSANASYNNEEFTLLSRKGNCSDPVHVAEHATCDAKIIRRPSASHDQYGPHGTSIMLGSGFGVGA

SEQ ID NO: 114667 - protein, 83 aa, Oryza sativa
  unsure (1)..(83): unsure at all Xaa locations
  Clone ID: PAT_MRT4530_18335C.1.pep
MAFLRQSGDVFAPRSTYQSNLALLSAGLAKNASASPALFAAGXVGDPPDTVYGLALCRGDTTNATACGACVAAAFQDGQQLCA

SEQ ID NO: 114668 - protein, 173 aa, Oryza sativa
  Clone ID: PAT_MRT4530_18336C.1.pep
MARERCQGGDASAAACVSRRRAKAVANDSEEAGVTERGKWHGLSRAMSRDVPSALTSPCVMNSNVPLINSIHFSLRFNYTIIFIAHMCSLRATKLGAEITRFAGREWLAERIDATRMVEFLVTNIVGEEREVANKLSNHSVHEGGSRRIRQGTPDAQVRHRLWLGLRYALPGQ

SEQ ID NO: 114669 - protein, 310 aa, Oryza sativa
  Clone ID: PAT_MRT4530_18337C.1.pep
MAGAGGGGVRDMDALEGVRSIVLKPSESLDEGRFTRIAGADFNDAGLGLPGLLASLATTGFQASNLGDAVDVVNQMLDWRLSHEKPREDCDEAELDPTYRESVKCKIFLGFTSNLVSSGIRDVVRFLVQHHMVDVIVTTAGGIEEDLIKCLAPTYRGEFSLPGTLLRSKGLNRIGNLLVPNDNYCKFENWIMPLFDQMLQEQSTEYDQFYLPAECLDTIEDIRLMNGEAIHATPRKTGIIVLGGGLPKHHICNANMFRNGADYAVYINTAQEFDGSDSGAQPDEAVSWGKIKGSAKPVKLRLNKGTLHGS

SEQ ID NO: 114670 - protein, 110 aa, Oryza sativa
  Clone ID: PAT_MRT4530_18338C.1.pep
KKGPLRGGKKNFLATNGEKPPKNPITKTPGKAPKSQGSLQPGGPRPFFGRTRDKHRIWKVYGPKHRGKVKTKRGGSITPRVRGAKMGENTDPTKFLSLAGRPQGGKKQNP

SEQ ID NO: 114671 - protein, 769 aa, Oryza sativa
  Clone ID: PAT_MRT4530_18339C.1.pep
MSLRLRGLLLLPLLRRRSCSPLLLRRRRLLRGWPPPLVSAIPSRAFGSSGLPARACASSGFSGMAAVSPPTPQQQQQRCVVEVREGVELTEKEERIFRRLLDVVRHFGLGTQLRVAGGWVRDKLLGKDSTDIDIALDNMTGQNFCEKVNEYSELLGEEQKGIGVIQCNPDQSKHLETARMLIFDIWIDFVNLRSEKYAENSRIPTVEIGTAKEDAFRRDLTINSLFFNINTNTVEDLTGRGIEDLKKGLIVTPLPAKATFLDDPLRVLRAIRFAARFNFTLTEDLKDAASDEKVKSELGSKISKERIGHEVDLMMSDKHPVNAMCYIRDLGLFYVVFAFPEKPDPPVPDKCDRLCVSHIEVAWNLAHSIGCSVFSGGSDSKSQDEHRRLCFYSALFTPVRNTIYLDKKSKKERWGEPSISPGLGQPMVYIGPHSEYMVKLHRLPWALDLGHPGHGPGGLGPGLSAPVGECRLDASWPYFFVQTEQWNGRFTATTIGVFLKEYRSIDAEYYEIPVTNYIIRDSLKLKASDADTVQFPEQASSSFLAYYCYFFPRILFPLLCTVVNVHAASEKFAELINLLESNENLTTVKEKLDDEYLEIPTDSVKRVLAVTGLILREIKDFWRVALFICTLTYPEVSSGGDSLGQPDELHQRKEKYTRAERLITELGKESTDDCRLPYDFLHDVVLLSEHLNVKTNLFISLLRFSDLYLTTSSPELDGVWKMKPLLDGKAIMGIMQQQRLLKWQLAYPRGTTEECIVWMKQSQSKRHKV

SEQ ID NO: 114672 - protein, 349 aa, Oryza sativa
  unsure (1)..(349): unsure at all Xaa locations
  Clone ID: PAT_MRT4530_1833C.1.pep
MDEVGRRWTFSRANEGYTSCGSVVEMSYGGGLVPNARGSVLPACPGXIPAVGRIGSVLLSKARMGWKLCHIFTTGSKAMECGVKMCLVGWPGLAWDELGPRSGCQFGPIHRRPWVKAVLDGQLCEEEDVVSCLPKLRKTAGSASEAKEAVKPAVKQEKRVSSFKVLSLALVYSFLVCFLSQPLPCDRXDNTGNKGYGNDGSDDSRTQANGNEKSINETSPELIQVVVNQTNMLATAFQLLQNRNNPAGATNVQVPTVQQHTADANVSKGFQPPIPTPSHNDHPQMDSSAKKTLICYNCKEPGHFSRDCPQPKRNLRHHSGHYARRRQVTRLVVTGANAPSPDISRKPEL

SEQ ID NO: 114673 - protein, 104 aa, Oryza sativa
  Clone ID: PAT_MRT4530_18340C.1.pep
MASGIRWTNMHSVTLAMAYGVARELSSSFFPLLIGPFVLSVSGVTITSSSLLGKAMVYLFGQGSFNLHYEGPDLQLAMESSSPPSSAQDGLPFQWKKQKDPIAF

SEQ ID NO: 114674 - protein, 151 aa, Oryza sativa
  unsure (1)..(151): unsure at all Xaa locations
  Clone ID: PAT_MRT4530_18341C.1.pep
NAVRCLESAKGNDSIAYMRFFFRDPRQDDAPDVSSSESEDDIMTDVTSDDESEGGVGLGGHSTFNGTARHPLDSNHTTDNSEERSASRTNSGDNRNPSDPHHVMFGGSAPRSSISSVSSPRSEVRDDPIELEAVISCTXDGAVVCLRRARP

SEQ ID NO: 114675 - protein, 374 aa, Oryza sativa
  unsure (1)..(374): unsure at all Xaa locations
  Clone ID: PAT_MRT4530_18342C.1.pep
QTPPSKQVVQPIQQTPQRQQVVQPIQQQGLLNASAGFRTPDNQPRQHAANQVVPEHLVHNVHPDQTVIPQVIPEHLVCNIQPNFQNYQGGNLNYQYQPPSPQVQYQXGGSAQPQFAPQYNQFEPVPQQAQGVSQQRQWADMIADVIREQFGLKPKNAGNLYRHPYPEWFERVPLPNRFNVPDFSKFSGQDSVSTCEHVSRFLAQCGEASAVDALRVRLFPLSLSGSAFTWFSSLPCGSINSWADLEKHFHSYFYSGVHDMKLSDLTAIKQRHDEPVQDYIQRFREMRNKCYSLSLTDAXLADLAFKGMIAPIREKFSSQDFDSLSHLAQKVTLHEQRFAEARKSFKKVNHVFPYIYGSDDDDDDDDDDSEIATA

SEQ ID NO: 114676 - protein, 58 aa, Oryza sativa
  unsure (1)..(58): unsure at all Xaa locations
  Clone ID: PAT_MRT4530_18343C.1.pep
MDCVHGDVSRKTXXXXXXXXXXXXXXXTXPLSPGXVITKKPPPIVLSNRCANYYFRNL

SEQ ID NO: 114677 - protein, 99 aa, Oryza sativa
  Clone ID: PAT_MRT4530_18344C.1.pep
YLRDTMLPSLLAIFLGSECTKVVRASKCVGGVQEDCIYFMHRTFDNPSREYFGPCVDPLGDSGVYNMTNRRITPFLPEAVMEKLCLKRQFLTWFFPADV

SEQ ID NO: 114678 - protein, 60 aa, Oryza sativa
  Clone ID: PAT_MRT4530_18345C.1.pep
SHPLRSALLHSTRPRIPPGSVVGAHQFSSSLPTIVGGGYQAQPQPAFSALASSLGRPAIP

SEQ ID NO: 114679 - protein, 947 aa, Oryza sativa
  Clone ID: PAT_MRT4530_18346C.1.pep
MASATFGAMDSVLSKLTDLLTFEYKLLEEVKRDIVFVKSELESMHAFLKKMSEVEDELDEQVKCWRKEVRELSYDIEDHIDEFAVHLKDEPGCELHGIPSFISQIVKSIASIRNHYQIAKEMRGIRAFVGEASRRHKRYKVDDTISKPSKVTVDPRLPALYKDASDLVGIDGPKIELIRWLTEGVSGPEQQLKVVPIVGSGGLGKTTLANQVYHNLEGIFESRAFVTVSQKPDMMKILREILSGIGYNGLEAAWDEGKLIHEVRKYLRFVRYCVVLDDIWSISVWEILRCALPENNRGSRIVVTTRITDIARACCAPRHCDIYHLKPLDNTSSRRLFFKRICGSEDSLPSHVKGVAEKILKKCGGMPLAIISIASLLATKAQTKEQWESVNISLESGLDKHIGFEGMNWILSLSYNHLPQHLKTCMLYLCLFPEDYIISKDILVQQWIAEGFVFPEHGRNLEEAGYYYFNELINRSMAQPVDIEYNGEAMSCRVHDMIRSLIISKSNQENFVTIFSTSEAASVMTPGKIRRLSVQYIDEECGMVPMLPTLSHARSFSIFGHCNKMPSLTEFKVLRVLEMDDCWKLENHHLKHIGRLSQLKYLGLRRTPISELPEQIGELKYLETLDLRLSHLTELPAAVVRLRRLVHLFFDSNIKLPDGIGEMQSLQQLSSFDVCRSSITSLQELSRLSNLRVLVMSWRSFGMIGDVRSYNNNLVSSLGRLGTCSLRSIYIQGYNSSLQDFSLDLWCPPPSLLQKFVANKCLSVIPNWLGSLINLSYINVDVLRAAQRDLDILGELPNLLFLRLGSETAPQERLIIRDQCFEHLKEFKFICLLTEGLEFQVGAMPRLERLCFQFVALEIIYATGGFDFGIQHLLSLKEAFVKIDCFAAWAGVGNAAEAAIRNSARALPNNPLLNIERFSANDDDMEEDFGFVVLGRRMQQRMPQPET

SEQ ID NO: 114680 - protein, 75 aa, Oryza sativa
  unsure (1)..(75): unsure at all Xaa locations
  Clone ID: PAT_MRT4530_18347C.1.pep
MISVRWGSXAXPRRVASSASSRVSIRSAPRRTXHRSRLSCSADLGRHGWWWRRRTTVXXLRXXRXDGGGGEVLWV

SEQ ID NO: 114681 - protein, 116 aa, Oryza sativa
  Clone ID: PAT_MRT4530_18348C.1.pep
ILEQIQWRCRRIHNRGEAYCLPLPPLQAQSPVSSFPTSTFDCRHRTHAGPPHLHLLPCAGFAPQHPSECEVGEASPPRSLRPHGFADGGARRGRGVVARSSPPEPPMGGRHARTEV

SEQ ID NO: 114682 - protein, 724 aa, Oryza sativa
  Clone ID: PAT_MRT4530_18349C.1.pep
MGKHSAESGTSMLLHGDLDIQIVEAKCLPNMDLMTERMRKCFTGYGACSTECGKSDPHTDVRKIITSDPYVSVCLSGATVAQTRVIANSENPKWDEHFYVQVAHSVSRVEFHVKDNDVFGAELIGVASVPVENITPGDTVSGWFPISGQYSNPMKASPELHLSIQYKPIEQNPLYKDGVGSDGCQSIGVPNAYFPLRKGGMVTLYQDAHIPDDFCPKIEIDGGRVYEQNKCWEDICHAIAEAHHLIYIIGWSLYHPVKLDGLMHTHDEEARKFFRHSGVHCVLAPRYASNKLSIFKQQVVGTLFTHHQKCVIVDTQVIGNNRKITAFIGGLDLCDGRYDTPEHRLFKDLDTVFKDDFHNPTFQVNKSGPRQPWHDLHCKIEGPAAYDILTNFEQRWRKSAKWKVSVRRAVSWHHDTLVKINRMSWIVSPSADELNARVCEQDDPENWHVQIFRSIDSGSVKGFPKLVQEAESQNLVCAKNLQIDKSIHNAYVKAIRSAQHYIYIENQYFIGSSYYWSSNRSAGAENLIPIELAIKIARKIKARERFAAYIVIPMWPEGNPTTAAMQEILFWQGQTMSMMYKIVAEALQKEGLDDTHPQDYLNFYCLGKREVSNDVSTTSQSNENSPQVYGYRMSLWAEHLGTVEECFRWPHSVECVRQVNEMAEENWARYVSPEMVNMRGHLMRYPINVERDGRVGPVHGYECFPDVGGKVLGTHSSLPNALTT

SEQ ID NO: 114683 - protein, 275 aa, Oryza sativa
  Clone ID: PAT_MRT4530_1834C.1.pep
SASTSATLKKLQEDGALPGRGTMEREAGGTNPQPILGRMVAIEDYVLCGFLPPPSEFLLLVLNFYGLSLLHLNPNSIAFLSIFVHLCEAYIGVEPFLDLFRFYYELRWMESNRVSGCVGFRLRDGLKLRYVPFQCPSSRSKWRNRWFYLEIKNSNPVFVVPEDQPDKIPSWTAKPPLTPSLQSFIDIIDDLRVRGLSGYEVVADFVGRRIQPLQARAHPAYNYSRPEDATRVSPRGLSGETVERRVGQVMISGPTTASDIPMPLCEKGAAERDEA

SEQ ID NO: 114684 - protein, 79 aa, Oryza sativa
  Clone ID: PAT_MRT4530_18350C.1.pep
MAGAARIASIAGCEDGGALRRPRCQIRRLFALYSGDLHLQIRQDGGASSIERWVVGGWREEREPLYLAWEGLGLEDLQR

SEQ ID NO: 114685 - protein, 96 aa, Oryza sativa
  unsure (1)..(96): unsure at all Xaa locations
  Clone ID: PAT_MRT4530_18351C.1.pep
TNHFNRIKMQIYMRRMGGWVLNTLAFCHEDIQVLFVHSASVAKQFLPDQFPTPCSPHSKSATQDQEALFSSSVPHFHWLLXXPRXSYRTXITXLLQ

SEQ ID NO: 114686 - protein, 77 aa, Oryza sativa
  Clone ID: PAT_MRT4530_18352C.1.pep
HFQFEHSVLCLSDHMRTQTRCQADNQFSVFKLTATIKCSWCDEHFTNYKHYFLNATGPQPAIKQSTEQCYKHKMLHF

SEQ ID NO: 114687 - protein, 226 aa, Oryza sativa
  unsure (1)..(226): unsure at all Xaa locations
  Clone ID: PAT_MRT4530_18353C.1.pep
KKPGKKQAKKSPIKKWRKKCPIKKTEGKKTTVRPKNYEPDEKNRRKTTSEKKSDQKNRSEKTGEKNISSKKIWGKKRNESVKKGRKNPVKKSPTKKNRSEKKGEKKMSAPKNTAQKNETMKKTGLKNKKNSDKKRGEKKTNMSDPKKGKKKEEKSKRIQLRRRSKKRAKKKNKNGLKKHVRKKCQKKAQKKTRXKKKFNSPKKHMRKKQKKKNNHHRGWAITFNMF

SEQ ID NO: 114688 - protein, 65 aa, Oryza sativa
  unsure (1)..(65): unsure at all Xaa locations
  Clone ID: PAT_MRT4530_18354C.1.pep
LDDNGAQQEYTHEGLHSQATMDTPTNEARIWNLKLYEEHYTRCETPRXIVVAWNKGYHTTRDASE

SEQ ID NO: 114689 - protein, 325 aa, Oryza sativa
  Clone ID: PAT_MRT4530_18355C.1.pep
MEGQGAPLLPEAREAPSSSSTPTSTSGPPRSRRRRGTRISLGRSRRSVCMDEAGVDGALIVQPINHMFDHSLVTSVLKKYPSKFIGCCLANPADDGSGIKQLEHLIVQEKYRAVRFNPNLWPSGQKMTNEVGRSLFAKAGELGAPVGIMVMKFLPADSNICISQALNGTTMITNVKFFCMEGISTYIQEIEELCTDYPKTTVIFDHMAFCKPPMNIEEEKAFTSFLELSRFPQIYVKYSALFRISREAYPYEDTSQLLSRVISSYGANRIMWGSDFPFVVPECGYKGAKEAISHVAGKIPVSSSDLEWILGKTVTQLFQGAWVSA

SEQ ID NO: 114690 - protein, 105 aa, Oryza sativa
  Clone ID: PAT_MRT4530_18356C.1.pep
HYGGVKKNPHPIKLITLQQQQICTKPMDTLPLSISHSLTFFYDANFSRHLTVIYPPPPPVIPLHHHHHMLRLATQRTTSHTLTLFTNVLPLQIEPDHVPHPYTPR

SEQ ID NO: 114691 - protein, 88 aa, Oryza sativa
  Clone ID: PAT_MRT4530_18357C.1.pep
VPITVKTVPCRIPARFKLPVSLHRRIFRANVLLKIGKNSRAYGPVCLLVVKLKPQFGTSVRWLGRVGMSPTSCGHVAQTPHVLGLGLV

SEQ ID NO: 114692 - protein, 593 aa, Oryza sativa
  Clone ID: PAT_MRT4530_18358C.1.pep
MTTGKNEVVLGTRLVEVGEVDTQLPLSVGFAYHYWSGEPLWIDDFSDETSFEKFVEFFSYGLFPIGGERTVKKLRLTKAVTIPEGTTVAEACQRMAARRVDAVLLTDANGLLSGIVTDKDIAKRVIAEGLRVEQTITSKIMTRTPVYVMSDTLAIEALQKMVQGKFRHLPVVENGEVIAMLDIAKCLYDAISRLEKAAEQGSALAAAVEGVERQVGDNLPDHSSVIETLRERMLKPSLSTIISENTKVAIVSPWDPVCVAARKMHELRVNSVVITAGNSLQGIFTSKDVLMRVVTQNLSPELTHVEKVMTAHPECATLDTSILDALHIMRDGKFLHIPVVDGEGRVVACLDVLQITHAAISMVSLHMRIFSLLIPCFFLMVSVHLTSFCVKVEGGPETTNGVANTIMQKFWDSALALEPPDEEFDSRSEISLLMPSEAGDGRSSINPPVVGNSFVFKIEDQKGRMHRFACGSESLHELVSSVVQRLGIDGEKGTVQLLYDDDEGDRVLLTTDTDLTGAVLHAKSSGLKSLRLYTDESNSSSEVTKHSSEVTKHASEVTKHTSEVTKQPPELTSSHTSQLTPAHYGLMADFSQM

SEQ ID NO: 114693 - protein, 447 aa, Oryza sativa
  Clone ID: PAT_MRT4530_18359C.1.pep
MVQGKFRHLPVVENGEVIAMLDIAKCLYDAISRLEKAAEQGSALAAAVEGVERQVGDNLPDHSSVIETLRERMLKPSLSTIISENTKVAIVSPWDPVCVAARKMHELRVNSVVITAGNSLQGIFTSKDVLMRVVTQNLSPELTHVEKVMTAHPECATLDTSILDALHIMRDGKFLHIPVVDGEGRVVACLDVLQITHAAISMVSLHMRIFSLLIPCFFLMVSVHLTSFCVKVEGGPETTNGVANTIMQKFWDSALALEPPDEEFDSRSEISLLMPSEAGDGRSSINPPVVGNSFVFKIEDQKGRMHRFACGSESLHELVSSVVQRLGIDGEKGTVQLLYDDDEGDRVLLTTDTDLTGAVLHAKSSGLKSLRLYTDESNSSSEVTKHSSEVTKHASEVTKHTSEVTKQPPELTSSHTSQLTPAHYGLMAGAVVLTGVVVMIYLRRSKV

SEQ ID NO: 114694 - protein, 165 aa, Oryza sativa
  unsure (1)..(165): unsure at all Xaa locations
  Clone ID: PAT_MRT4530_1835C.1.pep
WPGREGAPEXSLAGTADRRGTRPRPDGHRRRPPARRSGTRERGGKGEANGAAFGSPRSTATTGTAAETEEGGGAVRDDEDDGAPTVGERNGGADGVDDDAAKPKEATPRGEEVRSDGGGEPELVGDGGERGKRRERDSDDGIFSSPDLSLVEPLADFDWVAALED

SEQ ID NO: 114695 - protein, 290 aa, Oryza sativa
  unsure (1)..(290): unsure at all Xaa locations
  Clone ID: PAT_MRT4530_18360C.1.pep
MPESNPLASVSSTASTLLAAIRWQASATVVPSGIVTAFVSRSFFTVLSPLKKKKKKKSNLCKDQRRRGEREREAILVRGVAGGGRGFGGGDSGDRGGGIIGLLGGGHRRRAAAGAAVQRHAGGTHGFVRRRLRCSGISDVVGSGRREGSSAAVAAAGKIGGGERWPTVKYKLRRFAPDRKQAIREELDKLLKAGFIREVINPEWLTTPVMISMAKEDEEKTAFITPFSVFCYMKMPFGLISAGNTYQRGIQGALGDQLGRNVEAYVDDIIVKIKTGEXLIDDLRETFDNL

SEQ ID NO: 114696 - protein, 146 aa, Oryza sativa
  Clone ID: PAT_MRT4530_18361C.1.pep
MADGFNSGLERSVARRPGGSNDEDSKTTVSSIPILLEYDDQSGMNKTWRPVAVLLELPCKDQPRQGIGTAAGPVGAGNHWVPILIEEIATPIVIPPTITGLNADTTKNSPRTTTTAVARSSSARGSKRCSGGGGCGGRPSHAQVAP

SEQ ID NO: 114697 - protein, 104 aa, Oryza sativa
  Clone ID: PAT_MRT4530_18362C.1.pep
MVDRIQDDKAIFMLHSLRLLYGERNLCMPTRVPCMIFERSPKWIFLKRFFCTSNATCTKFAYNELEKKCRWLCLAITIDHCLTTSLSYLSAIFIEPMPNQPCFL

SEQ ID NO: 114698 - protein, 55 aa, Oryza sativa
  Clone ID: PAT_MRT4530_18363C.1.pep
MAMGAAAASIRDGELPPGDRPRRRVDPREPYSSRHPRRSRFRPLASLGGTSPICN

SEQ ID NO: 114699 - protein, 79 aa, Oryza sativa
  Clone ID: PAT_MRT4530_18364C.1.pep
MRSKLHPGINDLTFPHLHADQIWQPPPPHRPDPVAPTSRPMDPKVATKEKGLPPERLMATEVQWQWQGGRRRGGGGEDG

SEQ ID NO: 114700 - protein, 207 aa, Oryza sativa
  Clone ID: PAT_MRT4530_18365C.1.pep
MSSSSSATTTKYRGVRLRKWGKWVSEIRLPNSRERIWLGSYDTPEEAARAFDAAFVCLRGGGEAAGNGINFPGSPPAVARTSDPQEVYAAAVSHANNRPPPPPSARATSSALPWEEAPVVAAQEAAADMAPDVVVLPSSPVNVLAAAGSFEYWSQQPLYSPTAASLDLQRWMTAAAAAEESIMEDDDDEGTSDGLWSFHYSPTRSKW

SEQ ID NO: 114701 - protein, 67 aa, Oryza sativa
  unsure (1)..(67): unsure at all Xaa locations
  Clone ID: PAT_MRT4530_18366C.1.pep
EHGQFRPASWKCSEEXNAHQVKIRDPLKMGFPNIWALRLARQLLIWHPEDRLSVDEVLAHPYFQEPP

SEQ ID NO: 114702 - protein, 66 aa, Oryza sativa
  unsure (1)..(66): unsure at all Xaa locations
  Clone ID: PAT_MRT4530_18367C.1.pep
XVDVAVERXMRQVDLARDGEGRREGNVATAALSSVXRVGVSIGSPAAGASRTNXSCVALVCVCGEK

SEQ ID NO: 114703 - protein, 63 aa, Oryza sativa
  unsure (1)..(63): unsure at all Xaa locations
  Clone ID: PAT_MRT4530_18368C.1.pep
VDDQRMSAYGHGLVVNSWEPQPSILRXVFVTHCGWNSVLEGITAGVPMLCWPLYAEQRMNKVL

SEQ ID NO: 114704 - protein, 75 aa, Oryza sativa
  Clone ID: PAT_MRT4530_18369C.1.pep
MALPGQRMERVRTRLDLYDTPGPRMKGEGQHVATGQELDTAAAEDFLVLVSGLPVAARRGTVGPHVMRTRIPIFR

SEQ ID NO: 114705 - protein, 783 aa, Oryza sativa
  unsure (1)..(783): unsure at all Xaa locations
  Clone ID: PAT_MRT4530_1836C.1.pep
MDLGKSSSTNASLKKLQEDGALPGRGIMEREAGGTNPQPVLGRMVAIEDYILCGFLPPPSEFLLLVLNFYGLSLLHLNPNSIAFLSIFSHLCEAYIGVKPFLDLFRFYYELRWMESNKVSGCVGFRLRDGLKSRYIPFQCPSSRSKWRTRWFYLQIKDSNPVFVVPEEQPDKISSWTAKPPLTPSLQSFIDIIDDLRVRGLSGYEVAADFVGLNSEAVERRVGQVMISGPTTASAIPVPLCEKGAAERDVAINTLPLTDIIGPLADHQVAASLKEKVAKEASDAAAATTSGGNVPTKGRKFSCVSEHRRKASTPSASDTSPPPPRRQRLVTVGEKAARAKAAQDESRGTSGASPAAASTDVVLAPGSREATPSGPVSNPAAGRGPPATVVTWEELQVEMGRLLEAGACGISREIAEARLAASSANERADRLAHELSEAREDLKKMKELVAGNERKRQGLEHRMSELGNNLSEIRGSLRVTYTGLHQLAGECGIKSTIPANPDEFSLTSSLAELAAATEEIPSKHAARIGEETSNGIYTGACHILACVKLAHPELDLREILDQGAASNARKKVMEEVGDLGESVLPLFEEDVDDEDVQQRGQPESPAIIPALTFEPHASPNNVDQTLATGTEMATTSLDLESALTGQDRRIQYWKTKFEVAELERTMLAVKKKQAVETLRGREVWFNSYLKSCCTSMAKVCRELRVPRGDPEESAAGYISWLNGDCAQLDGVGKRIDEALKQECRRSSRYAGGHVLACLRXIARAGTSIFSVRVLLVLGGLRRR

SEQ ID NO: 114706 - protein, 668 aa, Oryza sativa
  Clone ID: PAT_MRT4530_18370C.1.pep
MWKMVDALLRCSALVALVLHFVVNGCSAVNTEGSALLKFQSRVEEDPHGAMAGWSERDGDPCSWNGVRCVDGRVVILDSDWKCSLPIRSRIIVAKCSRNLKDLSLRGTLGPELGSLSHLRALVLSNNLFDGPIPKEMSDLAMLEILDLSNNNLTGEVPQEIAEMQSIKHLLLSNNNFQWPLIQNSYRNFDQEIDFDVYDERGDVYQRSENGFESDSSSEENTKDNNNLSAHLSSQFAARNPTVQLSRRRLLEDTNLAAASANAPVPAVASVPSTGTGSFSAFKEIKVPPPLSPPSSPPMSSGPPQRSKRWLYAIVISSIALLFIGIACMFLLCRNKSVATIGPWKTGLSGQLQKAFVTGVPKLQRSELEGACEDFSNIVASYPHYTVYKGTLSSGVEIAVVSTVIATNKDWSKHSEGRFRKKIDLLSRINHKNFINLLGYCEEENPFMRMMVLEYAPNGTLYEHLHVEGFDHIDWNGRMRVIMGVAYCIQHMHELNPSITHPDLHSSAILLSEDGAAKVADMSVWQEVISKGKMPKNDDIVDHHEPVSADPAGNVCSFGLLMLEIISGRPPYSEHKGSLANLAMECIKDDRNISCLLDPTLKTHKENELEIICELIQECIQSDPKKRPGMREVTTRLREVLAISPEAATPRLSPLWWAELEILSVEAT

SEQ ID NO: 114707 - protein, 275 aa, Oryza sativa
  Clone ID: PAT_MRT4530_18371C.1.pep
MADRVHPMPAPPPPSSSPPPGHDAAAATETTPLHPSFRGAPPPSPGTYIIQIPKDQVLRVPPPDRARRYKKLAARPARRRRLRHACCAAFCAVLLLLLLAAAFVGVVYLVFRPRAPSFSVASLSIRGLDALAVSSLTPQIDAAVRADNGANKKTGIDYRGGGEVTVSYAGERLAAGPWPAFHQAPRNVTVFSTALAGGGVSLTEEQRKQLAADQAAGAVPLAVDAIVPVRLRFGKVLRTWTVDVKARCEVTVNKLAAAPANRGCMVKVRPLWWWW

SEQ ID NO: 114708 - protein, 80 aa, Oryza sativa
  Clone ID: PAT_MRT4530_18372C.1.pep
MRGVKQRYTNANGVVHRRVIKPVLEFVQMDAWRRGSCYTGGARFDPRGAVPQVTGVGGLPRRVNLPTIRPSANEIKCSCY

SEQ ID NO: 114709 - protein, 501 aa, Oryza sativa
  Clone ID: PAT_MRT4530_18373C.1.pep
MGLSFWSLDQPTSLQKENRQISFLRHARLILEQTHMLSFLPHDNTLRRGNIVAGPAKAGLGFHPLLTTCKSTAGVPMLHHCSSSADMWHTCTAAPRRPAFVRGRPRHTHRQLLLIPRHDHHHRCCQTPVAIHTSHPTPSPPQPAVAGDRLHDVASRCRIQRHQHRLTDPTAANQPPLPLSLSPATDDSRRLRKPPPPPKKPLHRRPPPPKQPATGPMPPPCPQLPQQPPPATLQIRPSGTDLRYTADVVTEHHATVPSFAPATSATMPASACRAPPPPRTHRCHHAMPGFAVAGRAAPPVLRQSKLPPSHGLRAPPSAADLASPAAAPPGAAHAVATEAGRSSFPVVGRLRRAGSAGELDPASPHAGEPAAAASTPPPTSPPTPTPPLQPLPHRRLLHPATDSSTPLPSSPRQPVGQAGVAVFAPQTVSVPPPPTGGRDEAPPPPSLWPCGFAGGRSGGGEAAEAGGGRRGRRRRWFLPPVSPVRETMRGLSFDTNAQVTD

SEQ ID NO: 114710 - protein, 800 aa, Oryza sativa
  Clone ID: PAT_MRT4530_18374C.1.pep
MLRRQPGDAPASAAASEADLAQLSTAIAAGEDLGPFVRRAFACGRPEPLLASLRAAARDREAEIEELCRAHFHDFIRAVDDLRSLLADADALKGSLSASHAALLSSAAPLLASLESFLAARGLAGNLSSALASSRRCVRLLALANRANAHLQGGNHNLYLALRAVDAIDRDLASGPEPLPLPTLRRMLLSLVPAVRAHAEREISREFSDWMVSIRAASRHLGQVAIGRSAAARQRQEELRSKHRPLEECITLDDDGVGDLDDFAAAAATADVADGAAAASFDLTPLYRAMHIHHTLALGERFKKYYLENRKLQLTSDFDVIAATPFLESHQVFFSQIAGFFIVEDRVFRTGGGLTSRPDVDALWDSAVAKMVSVMEDNFSRMQTANHLLLITDYAALLSATMRRYGYPVGMLLDVLARHRDKYHDLLLADCRRQVVEALAADKFDQMLMRKEYEYSMNVLAFGIQSSDITPAFPYVAPFSCTVPDICRIVRSFIEDSVSFMAHGGGGDTYAAVKKYLGRILSEVVDASIQKLVDSGGGLSVSQAMQVAANMSVMERACEFFTGHAAQLCGVPLRAVERGRRDFPLRKSRDAAEALLLRLLRSKVDEFMGQSDGVTWMADDPPAGGNEYANEVIIYLETLTSTAQQILPLPVLRRVLVAVLAHISERIVGLFLNDSVKRFNASAVTGIDTDLKMFEAFGESMSSLFVDSDQESAANEMKAALVEARQLVNLLMSNSPENFLNPVIREKSYNKLDYKKVAAISEKFRDSSESYFSTFGTRGARQNPKKKSLDTLIKRLREAS

SEQ ID NO: 114711 - protein, 313 aa, Oryza sativa
  unsure (1)..(313): unsure at all Xaa locations
  Clone ID: PAT_MRT4530_18375C.1.pep
PPGPSPSPPPRPTSSLASSSSPPPPPSSPPLPGPPSXTTPSPIASSSSPRASPPTSYLPSSLSTPSPAPPVPPEPSPRSTXPPPXPSFPPPSHVATLPPSPLPPPPGPPLXPHSRAPVNSSPASTSPRPRSAXIASHWLPPRTPPTPIYPSISALPFPSLLAPRESTPPPPLDLAPPPLPLPLPPSASAPGPPSTSPPSAAPPSPAAXDAQHPPAPPPQEXPGHPRHPPSTTTTTRPPADPTARMDPQPPRPPTPRHRSAPASTPRGSAPAPRSTSPPSSSTSPPDSPXPPTPPQEQGRKREGQASPSPGNSS

SEQ ID NO: 114712 - protein, 65 aa, Oryza sativa
  Clone ID: PAT_MRT4530_18376C.1.pep
NQNFTITFYFGRPLGHFFANFLFGGQGKEKKKNVFFFLEGKVFLPKFCLTPKGGALFFFTKGFKV

SEQ ID NO: 114713 - protein, 50 aa, Oryza sativa
  Clone ID: PAT_MRT4530_18377C.1.pep
QIYSSVKKKCVGNVLLWWLYVLSRQHDDVTMNSRCFGTRGRCAQPKKKKK

SEQ ID NO: 114714 - protein, 65 aa, Oryza sativa
  Clone ID: PAT_MRT4530_18378C.1.pep
PPPREDILSNEYPIFTLVYDIVQVHSVSPPRRIPSICSPLLASPPPEREREGKVEGHGSARVVRT

SEQ ID NO: 114715 - protein, 84 aa, Oryza sativa
  Clone ID: PAT_MRT4530_1837C.1.pep
TIARLENVLRGLHVPVLNLCRQNRQTPSCSSPLVRYQETSHPPPAKCPLCMEGKKLTPPLSLSPRRRRGTIRLRLRWPEKEEGM

SEQ ID NO: 114716 - protein, 37 aa, Oryza sativa
  Clone ID: PAT_MRT4530_18380C.1.pep
TAMNYWFEADLHRHILMNFNRGWIMVQKSVLPFIVIF

SEQ ID NO: 114717 - protein, 481 aa, Oryza sativa
  Clone ID: PAT_MRT4530_18381C.1.pep
MLENQRQAEVLWPRLVANKLFRKPSGSHAFVADFPMAVDDDFDGEAVPAAVESFDDDGCSPDADACRSVKRPRPRPQQRASNKTLKYRLFASTWNVGGVAPPDDLDLSDWLDTRNAAYDIYVLGFQEVVPLSARNVLGADKKRVGMRWNELVRAALNRSSPSAPNSSRDQREAKGTGGGAAAAAAGGGEIKQQAAQQKVHPVRGGIGGGGGELACRDYRCVVSKQMVGILLTVWVRADLARFVRRASVSCVGCGVMGCLGNKGAVSVRFWLHDTSFCVACCHLASGGRDGDEAHRNADATEILSRTTFPRGHSLNLPQKILDHDRVILLGDLNYRISLPEAKTRLLLRSEVESEGGAFHGWNEGAIAFSPTYKYYPNSDTYYGCASHGRKGEKRRAPAWCDRILWRGAGLKQKRYDRCESRLSDHRPVRALFEVEVGAPRRNLNSLRSFFLSERFDGGRSAAADLLREDGTASSARFGDTI

SEQ ID NO: 114718 - protein, 74 aa, Oryza sativa
  Clone ID: PAT_MRT4530_18382C.1.pep
AKMAYPNAFVRITGLDNVRQVQLISFFAYKPPVCEESSGTSRRHRHIQPCLIVHLSFADVSPPVSCVPSLFIVS

SEQ ID NO: 114719 - protein, 306 aa, Oryza sativa
  Clone ID: PAT_MRT4530_18383C.1.pep
MARSEAVDLMMARRRRCRGWSVDLMMASTTSATTTVGAFAAASASVVKTVFRHEGVGVGLAVIVTGDACTRVTACGRSRSSVVGYDGRRGGVRRRLRHEDAGCDGRRGAFTATTAMKTRAGSAAVAVGGASTLSVTAAVGAFSWHCSPQKARTSRHGGVHREDASGVGCRCSTAAVVTAGACVIQRPLPPPGSPAARPPSLPMAEEATGKKEEEEFSTGPLSVLMMSVKNNTQVLINCRNNKKLLGRVRAFDRHCNMVLENVREMWTEVPKTGKGKKKALPVNKDRFISKMFLRGDSVIIVLRNPK

SEQ ID NO: 114720 - protein, 65 aa, Oryza sativa
  Clone ID: PAT_MRT4530_18384C.1.pep
FTWLKGLGLATIMVGVSLFNWYKYEKYKKGHINEDEVNSPSFDGDAKYIILDDLEDQDEFQDEDT

SEQ ID NO: 114721 - protein, 121 aa, Oryza sativa
  Clone ID: PAT_MRT4530_18385C.1.pep
MRGGGLPSPTAAGGGLGDGLRRRIRRRRPREGRIRRPTEELGARRARRRPAAATLPPRQRCSHIPDPRRICRITGLPSWLEEARSGLLFGGSREVRRRVLKWLPVERRWVEHSSAIIEPQQ

SEQ ID NO: 114722 - protein, 66 aa, Oryza sativa
  unsure (1)..(66): unsure at all Xaa locations
  Clone ID: PAT_MRT4530_18386C.1.pep
GRANLXGXSXXXTRFXXSXQFGFKXGTXXRVFXWRXAFKNXPKYKTLXRFQGXKXSXGIXXFCXGW

SEQ ID NO: 114723 - protein, 65 aa, Oryza sativa
  Clone ID: PAT_MRT4530_18387C.1.pep
RAAGRSRRTTSAGAYLSLPDAASPTLHPRSFPNHHRSKYTAAAPRLLEASTRAQKATAASRSRTP

SEQ ID NO: 114724 - protein, 715 aa, Oryza sativa
  Clone ID: PAT_MRT4530_18388C.1.pep
MWAFYLLSLPLTVGMVVATLRYFAGPAVPLHVLATVGYAWLCSLSFIVLVPADISTTITGSQEGDVGFFWSWTYWSTFFLSWSIVPTLQGYEDAGDFTVKERLKTSIHKNLVYYKIIGSIGLVGVILIITMRHDWAGGIMGFAMACSNTFGLVTGAFLLGFGLSEIPKNIWKTADWTRRQKFLYHRIANMAGKFDNAHQEYCHAIAVVQATSKQMTKREPLRPFMDIIDDMLAQMLRDDPLFKPSGGKLGEDDMDYDTDENTMASLRRQLRRANEEYYRCKSKYTSYVMEALELEDTIKNYEQRDANEWKYVSGLRESRSCTLGSFLDFIEFIWRCILKKQLLKVLAVILGCISAAILLAEATLLPSDVDLSLFSVLTNVVGKQEVLVQVVAFIPLMYMCICTYYSLFRIGMMVVYSLTPRQTSSVSLLMICSMVARYAAPISYNFLNLIHLGGNSKTTFEKRMGNIDDVVPFFGRSFNRIYPLIMVVYTLLVAGNFFGYVLEFFGSWKRFRFWTEQEEDHTDGFDPSGVLILQKERCWIEQGHKVGELVAPLARNFTGIYKDVESGNVQQDEETAGMKATTLPSKKEGRLQSKYASNVALKYSSIREQNSSHQAVKQAQTETQSTSVVPETGNSETPSSVSKEPDSSAGIASRWTLMKTGFQNFKANMSSKKFLPLSLSSTQSSSSGSLDEIFEGLKRHSSNASVDYLDDDDGI

SEQ ID NO: 114725 - protein, 43 aa, Oryza sativa
  Clone ID: PAT_MRT4530_18389C.1.pep
FLKRYNDLILDSNHHFSRLLHSKLEDRRFTCATTMKGPATSLA

SEQ ID NO: 114726 - protein, 696 aa, Oryza sativa
  unsure (1)..(696): unsure at all Xaa locations
  Clone ID: PAT_MRT4530_1838C.1.pep
LGCIVAIEDYVLCGFLPPPSEFLLLVLNFYGLSLLHLNHNSIAFLSIFAHLCEAYIGVEPFLDLFRFYYELRWMEFNRVSSCVGFXLRDGLKSRYIPFQCPSSRSKWRNRWFYFEIKNSNPVFIAPTEQPNKISSWTAKPPLTPSLQSFIDIIDDLRVRGLSGYEVIADFVCRRIQPLQARAHPAFDYSGPEDATRVSPRGLNSEAVERRVGQVMISGPTTASAIPVSLCEKGTAERDAAINALLLTNIIGPLADHQVAASLKEKVAKEASDAAAATTSGGNIPTKGRKFSVSRHRRKASTPSASDTSSPPPRRQRLVTIGEKAAWAKAAQDESGGTSGASPAVASTDVVLAPGSREATPSGPVSGPAAGRGPPAAVLTWEELQVEMGRLLEAGASGIGREIAEARSEAASANERADRLGLEDRMSELGNNLLEIRGSLRVTYTGLHQLARECGIKSTIPANPDEFSLTSSLAELATAMGEIPSKHAAKIGEETSNGIYTGACHVLADVDDEDVQQRGQPESPAIIPVLAFEPHASPDNVDQTLATGTEMATTSLVKKEQAVETLRGREVWFNSYLKSCCTSMARVCRELRVPRGDPEESAAGYISWLNEACAQLDGIGKRIDEALKQECRRSSRYAGGHVLACLRDHRPRMDLDFLREGFARSRRTPAEIDHLARSMAPLAEKIFQSMDWRWPSW

SEQ ID NO: 114727 - protein, 144 aa, Oryza sativa
  Clone ID: PAT_MRT4530_18390C.1.pep
GPHRGDRGSRSTGALLLLPRHQNQHRPPRTLHRRRRGRRRPQRLQRQQGPPPGTSQPGTSGPKPDRAPPGCCRRAKQHPSCRGADVEHVGGGSVRRGRRRRGGRGRGRRSTPLDAESTTRSAAAPGRRRCGTEYASASARWPPE

SEQ ID NO: 114728 - protein, 52 aa, Oryza sativa
  Clone ID: PAT_MRT4530_18391C.1.pep
EPARPTHASLYGQGTHAQNGGPLIGDEGYISIPLRRGDHDEEDDRGEGTKGY

SEQ ID NO: 114729 - protein, 101 aa, Oryza sativa
  Clone ID: PAT_MRT4530_18392C.1.pep
RVEPRVRISTIERNDHGKQEFFALGQPGRLPRTARQGWPAKPQERRQQTVGLRLGLAFGRLGRHPRRHPGAACRGWPSKPQERQQALIAARAGPVRSSGPG

SEQ ID NO: 114730 - protein, 311 aa, Oryza sativa
  Clone ID: PAT_MRT4530_18393C.1.pep
MEDLYSIHPGISRGGGGGGGGAASEASGVAGGGSSPPHPPPPATTAAAADLTELMKAQIAGHPSYPSLLSAYIECRKVGAPPEVTTLLEEIGREGRGGGGGATAGGEIGLDPELDEFMETYCRVLERYKEELTRPFDEAASFLTGIHTQLASLCGGAPPPTDNSDEMVGSSEDEPCSGDADAADFGQEHSSRLADHELKEMLLKKYSGCLSRLRSEFLKKRKKGKLPKDARSALMDWWNTHYRWPYPTEEDKVRLAAMTGLDPKQINNWFINQRKRHWKPSEDMRFALMEGVTGGSSSGTTLYFDTGTIGP

SEQ ID NO: 114731 - protein, 148 aa, Oryza sativa
  unsure (1)..(148): unsure at all Xaa locations
  Clone ID: PAT_MRT4530_18394C.1.pep
RTRTLPRRRRGRRRRRRRTSRRPCRAPSPAATPPAPSTRTAAPSTSPAGCCHHRRSRTATARHPADPACRRRRSPASRRRRRRTPTAAPTSAPGQPRRRRARPRGTAXTRLSRSSASSPSGCCSAAXPPPACRRAAPSGTPRRRRPHP

SEQ ID NO: 114732 - protein, 2482 aa, Oryza sativa
  unsure (1)..(2482): unsure at all Xaa locations
  Clone ID: PAT_MRT4530_18395C.1.pep
MLGPPRRGPAYKTKLCALWQRGNCNRDTCSFAHGHGDIRRPPSSRGAFTHHPDSADMLTQLLPEDSMTFFINSSLGISTICVDDNACAVPEGELGEEIIEPVISEAGLIGGFHLGGGIPLEESPGVIVPFMIEGHLLEKEILAIHDLLAGRECERRHEKKTDDGETNSSRSLSLSDNNDEKKKDKFSSGDEKEDHEKQLKQIRLDMEALRDDKTQMEVILDEKIDEVRKISSKVNDLEVQLRREKDECHRMTSKMKKFIKAHARFLKAQEEVKRSQARFERLGDLLASDILKRGANEEGSSVNEDLNERSPNTAATKKRSIPYSTSEEAKAVKKRRERDSDTMTRSDKYRSDVTDFDKTSKGTEATKSLYLKKKLWEDEKSKYFVNLQVKGSPVRHVLPSTGMAAHAIDDLNEAIELEDRHESIDALLENDADDKTRSPAIPLQPPPVVQNAYEQSGFEHISFDIPFGLSIYCAKFPLTQLAGSTQATRFAAARQIGEIAKSHPQELNVLLKKDICIIIILRRKRVSPYLRSKNWDTRVAAAHAIGAIAENVKHTSVKDLFASAEAEKHASGLSGIGDVGSTLRHADTTATSELAFGSFDINRVLEFGSPLLASGGQEYDIANDNGKNPAERLARQKQNLRRRLGLDVCEQFMDFNDVIKDEDLLAQKNYWGANMQNNGFYSFNTGQNIQHLVASMVPSAIALEHSVGMALSSICDDLITPLTFFQDTVDAITDEDNLEYSENGRWPFQQFVDQLIHDMFDPIWEVRHGTIMALREILTHQGACAGVYFPDLNSPFADLDDKNNLDSLKRAHGIDLNEDIDSGQLEPVLKRQKKEESNPEVMDIQLDKEPSNGDYSKTEASLSTEPTVSSGEPNLAHAKVESPFQVDGSANPSKVDPYCTPPHETLNSMPKLSSTHLPENSKFIKLMKLANYSAVKNWEFLQDCAIRFLCVLSLDRFGDYVSDQVVAPVRETCAQALGAVLKYMHPTLVCHTLNILLQMQRRQEWEVRHGSLLGIKYLVAVRQEMLKDLLNYVLHACKAGLEDPDDDVRAVAAEALIPAAASLVRLNDQMLHSIVMLLWDILLDLDDLSPSTSSVMNLLAEIYSQPEMVPKMLGTTAIGGDNEFDLNSVTLVAGEEKMGSNDNPYVLAALTPRLWPFMRHSITSVRRSAVRTLERLLEVGNTRNSAKLWLASILGDALQVVFQNLLLESNDEIIRSSERAWKLLLQCPTEDLESAASSYFSNWVQLATTPYGTALDSAKMFLPVALPRGSRSRAAAKIKSARLEHENTRMISFGSTGENTSQEKHSEASLSVSKIIVGSDSDKSVTHTRVLTSMALGLFASKLPEGSWQVVLGPLASDLMSLSGVQRQVASMVIVSWFKDLRKSDPAAVGTLLAFLSSLKGWMLDLLACSDPSFPTKDSPLPYAELARTYRKMRNEANNLFQSIESCALLKEYTSNLNFEADMLSVDDAINFTSKLLLPSEPDFSLDSDKIVLNNIESAKQGLLSTSGYLKCVQNNLHVTVSSLVASAVVWMAGLPSKLNPVILPLMAAVKREQEEILQDKAADALAELIFSCVGRKPGPNDKLTKNLCTLTCTDASETPQAAVINSIQVIEDQNLLSIGKRFSNHKSRGQMTSGGESKSEGFISRRGSELAFKHLCEKFGASLFEKLPKLWDCLTEFLKPVKTGDDLMKEDPSIAQLGRSCEDKEPQSLINNIQVVRSVTPHLAEPLRPQLLSLLPCILGCVRHPHVAVRLAAARCITSMAKSLTANVMVIVIENVIPMLSDSSSVCARQGAGMLLSLLVQGLAVELVPYAPFLVVPLLRCMSDPDGSVRQTVTHSFAALVPLLPLAKGSLLPDGLSERLSSSAEDAQFLEQLLDNSQIDDYKLSIDLSVELRRYQQEGINWLAFLRRFKLHGILCDDMGLGKTLQASAIVAADIAESRARNDEQDPKSLIICPSTLVAHWEYEIEKYIDSSIMKPLQYIGSSQDRIILRSQFDKFNVIITSYDIIRKDIDFLENVFWNYCVLDEGHIIKNSRSKITSAVKQLKAQHRLILSGTPIQNNVLELWSLFDFLMPGFLGTEKQFQATYGKPLLAAKDPKCSAKDAEAGILAMEALHKQVMPFLLRRTKDEVLSDLPEKIIQDRYCNLSLLQLKLYDKFSNSNAKQEISTIVKENELDQSTSQPKATRHVFQALQYLLKLCSHPLLVTGESPPDYLVDLLKEIGMGTGDELHDLHHSPKLVALQEILQECGIGSEISSPDASAAIGQHRVLIFAQHKALLDIIEKDLFQSHMRSVTYLRLDGSVEPEKRFEIVKAFNSDPTIDVLLLTTHVGGLGLNLTSADTLVFMEHDWNPMKDLQAMDRAHRLGQRKVVNVHRLIMRGTLEEKVMSLQRFKVSVANAVINAENASLKTMNTDQLLDLFASTPASRKASVLPSSSGGDQSKDSKGKSGGNGLXSILNGLDELWDQSQYADEYDLNQFLAKLNG

SEQ ID NO: 114733 - protein, 75 aa, Oryza sativa
  Clone ID: PAT_MRT4530_18396C.1.pep
EAFHSPHQFCPRADGPGFFFPPFLLLDTQASGLLTFFGYTNPGVPFPPNFFIFSNFGPLFPGIFSRFKNFNTLLR

SEQ ID NO: 114734 - protein, 360 aa, Oryza sativa
  Clone ID: PAT_MRT4530_18397C.1.pep
MKKASSLSELGFDADGPSFFRHLTLTDGDDGTLPRRRLIKISVIGAGNVGMAIAQTILTQDLADEIVLIDAVADKVRGEMLDLQHAAAFLPRVNIVSGTEVSLTRSSDLVIVTAGARQIPGETRLNLLQRNVSLFRKIVPAAAEASPESVLVIVSNPVDVLTYVAWKLSGFPASRVIGSGTNLDSSRFRFLLAEHLEVSAQDVQAYMVGEHGDSSVALWSSISVGGMPVLAHLQKNHRSAATAKKFDEAALEGIRRAVVGSAYEVIKLKGYTSWAIGYSVASIAWSLLRDQRRIHPVSVLAKGLVRGVPADRELFLSLPARLGRAGVLGVAAELVLTDEEERRLRISAETLWGYCHALGL

SEQ ID NO: 114735 - protein, 214 aa, Oryza sativa
  unsure (1)..(214): unsure at all Xaa locations
  Clone ID: PAT_MRT4530_18398C.1.pep
MGSVPDPGELTELAQPSFEEFQKQTSLMTSCTLLWQELSDHFTSLEQNLMKKSEALKQMIETLDNQTQTSLESLKRREVTIDHSVEIVAGKVGERARAALESLEKARDGCGDGSNDDSGDVDDEEGLLSALKSLCLKMDARGFWNFVTARKKELENLRSKIPAALVDCVDPAMLVLEAISEVFSGDTXRGDKLXXDYGWALCXVFFESLTPVIG

SEQ ID NO: 114736 - protein, 99 aa, Oryza sativa
  Clone ID: PAT_MRT4530_18399C.1.pep
SWGNLAGQISRPGGPPPLVGPLAVPKGGVQKGGLPVGPAGPRSYLEVGSFPRCSSVTGVNPNCPSVNGISVAKPGGALGGGFKPGLPRICPSCPRNLFF

SEQ ID NO: 114737 - protein, 751 aa, Oryza sativa
  unsure (1)..(751): unsure at all Xaa locations
  Clone ID: PAT_MRT4530_1839C.1.pep
MDLGKSASTSAMLKKLQEDGALPGRGTMEREAGGTNPQPILGRMVAIEDYVLCGFLPPPSEFLFLVLNFYGLSLFHLNPNSIAFLSIFVHLCEAYIGVEPFLNLFRFYYELRWMESNRVSGCVGFRLRDGLKSRYIPFHCPSSRSKWRNRWFYLEIKESNPVFVVPEDQPDKIPSWTAKPPLTPSLQSFIDIIDDLRVRGLSGYEVVADFVGLSGETVERRVGQVMISGPTTASDIPVPLCEKGAAERDEAINALPLTDIIGPLADHQVASSLKVKVVKEVSDAATTSGGNVPTKPRKFSSASDASPPPPRRQCIVTIGEKEAQAKAARAKSGGASSASPVVASTDVVPATGSREATPSVPVSDPAAGRDLPAAVLTWEELQVEMGRLLEAGAHGIGREIAEARLEAATANVRADRLVRELAEAREDLTKMRELAAGNERQRKGLEDRMSELGNNLSEIRGSLRVTYTGLHQLAGECGVTSTIPANPDEFSLTSSLAELATAMGEIPSKHAARIAEETSNGIYTGACHVLVCVRLLRPELICARSWTRGRPATRVRRDVDDEDVQQRGQPESLAVISVLEFEPHVSPDHVDQPLDIEGRMATTSSDLEGALASQDRRIQYWKTKFEVAELERTMLAVKKEQAVETLRGREVWFNSYLKSCCTSMARVCRELRVVRGDPEESVAGYISWLNRAYAQLDGIGKRIDEALKQECRRSSRYAGGHVLACLXIIAHTWTSNIFVRVLLVLGGLRRR

SEQ ID NO: 114738 - protein, 119 aa, Oryza sativa
  Clone ID: PAT_MRT4530_183C.1.pep
GYYRYNRRSHQDQAVQSPLSNGSSLITKLHIVWPQTQKQGTRLRETASQRRSIALRAPPAPTARRPRHRFSAVLCSSRPRPHRLRRLVPPLSCGAVPPFRGPVSQPRRHPAVSPPLPPL

SEQ ID NO: 114739 - protein, 65 aa, Oryza sativa
  unsure (1)..(65): unsure at all Xaa locations
  Clone ID: PAT_MRT4530_18400C.1.pep
NVQSIRYYXHTGILVNVPLHAHXHRRRRXRXVVDYVTXTXNRXSLLXSPXXSATFYXXYPMTYXX

SEQ ID NO: 114740 - protein, 74 aa, Oryza sativa
  Clone ID: PAT_MRT4530_18401C.1.pep
LLLRSSTPFSLSYCSLLWSCLASTITLPPPLYFYIHSTFIPPSIYPFSCTYLPCKTPPSSLLTTSTFTCDSRFQ

SEQ ID NO: 114741 - protein, 74 aa, Oryza sativa
  Clone ID: PAT_MRT4530_18402C.1.pep
MARVAAADLRDSGGVGPSGEKAVTEWGPRHRAKGTSRRGRVRRSGKDREWRQRGCVRGQRAVGRRLGALLVRRM

SEQ ID NO: 114742 - protein, 239 aa, Oryza sativa
  Clone ID: PAT_MRT4530_18403C.1.pep
MAATTRQHRGNEATEHCAGNCRNSAARQNCGREDVQGAVSHEPNVCVTAIKTKILRYYRLAATSHYPPRRRHGIPSASLRCHKSINRLMKRREHIDAVKVARAFNLIDKFPPVSVIKAYVEKVKEAAQDMDRAMQEDVAALRSAKEAIEAHDSGSDYRYTIMQEVHKLMRSYEKKKRSLSFGSTSSSHEHKNKRHRSNQAMPRWENQTIPGPPVYFPVPPPYFGHYNPYHPFGPQPRRN

SEQ ID NO: 114743 - protein, 134 aa, Oryza sativa
  unsure (1)..(134): unsure at all Xaa locations
  Clone ID: PAT_MRT4530_18404C.1.pep
ELLKYLNTWKHXTLQKVAEGSGTRVVRPNQCWPLSLSVFTGKQVSTSFICISPPWYSTRALLRDEQSAKCGGFCWRLLNVDSIPPTSDIFKEPSSCCSSSISLSSSACTGICLEVFCLRKSRAVVLQPSNSSSW

SEQ ID NO: 114744 - protein, 337 aa, Oryza sativa
  Clone ID: PAT_MRT4530_18405C.1.pep
MGNRSFDLSCSLRKEEENGTNLSPFVRKLFKEVLPGEHNFVATLIEGRDQKKRPTQFGMNQVLQPFDSVKFNFTKVSPEEVIFTFKESQNDSVKYFDNVPHAVAASPTAILINVSPIGYCHVLLIPRIQDCLPQRVDKESFLLAMYVASEAKDPFFRVGYNSLGGFATINHLHFQAYYLKVQYPVEKALTEKLTTLGNGVSIIQLVQYPVSGFVFEGGACLEDLSDVVSKVCIFLQENNKPFNALISESGKRVFLLPQCYAEKQALGRVSQEFLDMRINPAVWELSGHLVLKRRKDYDEASEATICRFLVEASLSESEFQELKSCILEFLSSAAPEE

SEQ ID NO: 114745 - protein, 127 aa, Oryza sativa
  Clone ID: PAT_MRT4530_18406C.1.pep
MHDAAAASAQYYVPSIRPYIHQLAAALPSLLAPACQCHQYVVRQAEQQCDECDETAPSSARSSLRRGLSPGLPSLDWPVRSIPALRGRRRLSTTARARACVAAVLIVASAGSKAPRHAGNGTAACYC

SEQ ID NO: 114746 - protein, 165 aa, Oryza sativa
  Clone ID: PAT_MRT4530_18407C.1.pep
MVRASSCAIHSWRSGAAAVTRGPLYVLYRSKTMIVEMNVHMDCEGCEKRVRKAMSRLEGVSTVEIDMDTQKVTVTGYVDRREVLRAARRTGRAAEFWPWPYDGEYYPFAIQYLEDDTYMATHKYYVHGYNAPVIGSYPNHAFTHIVDDHALAFFHDDNVHACSIM

SEQ ID NO: 114747 - protein, 178 aa, Oryza sativa
  Clone ID: PAT_MRT4530_18408C.1.pep
MKQAQLHRCNTPVQGCYSHPMPINVIRYLKTKSNIRQQAAATVSSSSNPSSSSRMVLVAAAASKNQTAAATASRRSQQPQQQAIKSETIEGAAAGTHREEAKRKGNTDFVMDDDGCGLPLWPWWRCKDGGGNRNNGGGGQTAGAVRAGCSDPPAVGTTYIFVDKFSPKNLTDVIIVQS

SEQ ID NO: 114748 - protein, 42 aa, Oryza sativa
  Clone ID: PAT_MRT4530_18409C.1.pep
RGRDQGRCRSSPSTPAAPAHCLFQPPPPPSPPVQPMPGDRTP

SEQ ID NO: 114749 - protein, 247 aa, Oryza sativa
  unsure (1)..(247): unsure at all Xaa locations
  Clone ID: PAT_MRT4530_1840C.1.pep
EDGALPGCGTMEREVGGTNPQPILGRMVAIEDYVLCGFLPPPSEFLLLVLNFYGLSLLHLNPNSIAFLSIFVHLCEAYIGVEPFLDLFCFYYELRWMESNRVSGCVGFRLRDGLKLRYIPFQCPSSRSKWRNRWFYLEIKDSNPVFVVPEDQPDKIPSWTAKPPLTPSLQSFLDIIDDLXVQGLSGYEVVADFVGRRIXPLQARAHPAYNYSGPEDATRVSPRGLSGENVERRVGQVMISGPTTASD

SEQ ID NO: 114750 - protein, 119 aa, Oryza sativa
  Clone ID: PAT_MRT4530_18410C.1.pep
LAAAQGGRSTVDRDHAGGPPLVHGTDGPDRPEADRTARAAARHGSARHKADRPAMASGGGARGCRRRRPAEGGGGGWRERRRRTARAVARPKAAAHAGRGEKGGGGSPHRRGGDRSGRG

SEQ ID NO: 114751 - protein, 36 aa, Oryza sativa
  Clone ID: PAT_MRT4530_18411C.1.pep
PYDTKAVLVNGHRRIVLSGCIHYPKSTPQMWHRLID

SEQ ID NO: 114752 - protein, 98 aa, Oryza sativa
  Clone ID: PAT_MRT4530_18412C.1.pep
MKCQGKQEAINCRSIFHHRSIPALVKKWKKRLNESTMDPTEGVGQAGSREEGRQGGGRRVARWLVGQEAAREEVAGQGDDSPGRSAARKELASRRGRR

SEQ ID NO: 114753 - protein, 562 aa, Oryza sativa
  unsure (1)..(562): unsure at all Xaa locations
  Clone ID: PAT_MRT4530_18413C.1.pep
GCRTRKKYLFQNASVLIPVPGKAGRSPSSPDFVHPYPCTFAHDQTEPQTKPYPLDMWKYGSALQQRPEXGPYSGRGATIKTMHLEPSLKPFXGFELRRRGERPSEPLATTANHVSGTSGTTEATRSTQAKLQAYKEAITIHKKKTRYTETVHGSREADPVCQPRXVADKRTPLDTMRAAHVETTRLPSRHTNTVTTRTHERLPTPVHGRDAAGTGLDDAEPRTKTTTGXAAAHLTEHRRRTRTAXRRDERHHEQERREDDNDRGQRGGDEGSRQQLHEGEDGMKCAAPMPTTEAAPQDDETMERNXNRRRRRCDAEGGDGDVGRRTSTAEGATGVGADETEGGAAGTTAFRQNSGEGTVRPXRGRHCRAEGGGGDVGRCTGEAAQAAGGGWFTSGPXTDGPDWPEADRTARAAARHGSARHKADRPAMASGGGARGCRWRRLAEGGGGGRRERRRRTARKAAADGRSGDTAKGGGTAKGGGARGKGRKGRGRESSPEGRRPEREGMSGGSTSENGGRERRDLGKGSEGVREKRGAAARRGEMAGDGNNGKLTGGARESELRW

SEQ ID NO: 114754 - protein, 109 aa, Oryza sativa
  Clone ID: PAT_MRT4530_18414C.1.pep
MEVKAETVPTPFALPPPNRSTRGQGSPDLTVLDLAAVRSGGDRWWRLGGGGGCNDGAQEVKSYQKCETGGRRICRLGRLEGAEVAEFWQPPHKVAATACFLDIATSGRC

SEQ ID NO: 114755 - protein, 82 aa, Oryza sativa
  Clone ID: PAT_MRT4530_18415C.1.pep
FFFFFNPLQTASGMIQHFGNSNQVCKCFHLSFHHHHSTAHCASHVHHHPVSSTTPSVCLSCAQLPPQCALCAQPGLCVPHKR

SEQ ID NO: 114756 - protein, 144 aa, Oryza sativa
  Clone ID: PAT_MRT4530_18416C.1.pep
MSRCSPFFSYHHHPHHSAAGIETSATAVPHGEAEPLEEREEGEHAAEEVASRRHPSYAAVHRAEKRHDPIAAATATASPRPPSATSHRRPRPPALPPPPAPHCHKAPTAAVELSPGATAAPLPLAAVSARRETEREGAARKEKN

SEQ ID NO: 114757 - protein, 769 aa, Oryza sativa
  Clone ID: PAT_MRT4530_18417C.1.pep
MASHIILPKEEEAALGVAVEEDHDSPAAPGYQHQQGPPVAKALPFSATCVRISRDSYPNLRALRNASAMSLPDDDAAYAKLEEGDYGYLLDDVPHFTDYLSDLPTFPNPLQDHPAYSTVKQYFVNADDTVPEKVVVQKDSPRGVHFRRAGPRQRVYFESEDVKACIVTCGGLCPGLNTVIRELVCGLSHMYNVNDIFGIQNGYKGFYSSNYLPMTPKSVNDIHKRGGTVLGTSRGGHDTKKIVDNIQDRGINQVYIIGGDGTQKGAYEIYKEIRRRGLKVAVAGVPKTIDNDIAVIDKSFGFDSAVEEAQRAIDAAHVEASSAENGIGLVKLMGRYSGFIAMYATLASRDVDCCLIPESPFYLEGEGGLFEYIEKRLKENNHMVIVVAEGAGQDLIAKSIAAADQIDASGNKLLLDVGLWLTHKIKDYCKNKKMEMTIKYIDPTYMIRAIPSNASDNVYCTLLAHSAIHGAMAGYSFTVGMVNGRHAYIPFHRVTSTRNKVKITDRMWARLLSSTNQPSFLSQKDIDAAREADKLASKSPVPVNTKEHGENVKKPANGEGSSDAVVQEPFATTPTSPAALAAGAVSNPALTPAAVSMSFYDVNAGEQPSREDEAPEEVVEAAVANGAPTAVEKHNKLYSPAETPAGSGTRPHPTADAVAETAGAAPDDVDGCTTPPPPPVHDSEGSDTQSADDHGSPQREKPRTTSTAGGVKRDVAPSWSSRLLAFRSFSRDKKAKATVDARPPAHGKARDEGDEHKEKGKERRKRFWK

SEQ ID NO: 114758 - protein, 43 aa, Oryza sativa
  Clone ID: PAT_MRT4530_18418C.1.pep
MTTQWREAILGITIDSGQNQVGDEALEDPYAYYQEGDEDEGAQ

SEQ ID NO: 114759 - protein, 520 aa, Oryza sativa
  Clone ID: PAT_MRT4530_18419C.1.pep
MARAEAAAALEFTPTWIVAAICSLIVLISLAAERCLHYLGKTLKRKNQKALFEALLKVKEELMLLGFISLLLTVSQGILQKTCVPPKWTNYLLPCRKMEDQSKQRGPSEAHFVAAGVLGHLGRRLLADGGTGADHCQNKGKVPLLSLEALHQLHIFIFVLAITHVIFSALTMLLGGAKAYDSYSSWLYFFQNFIEQIHQWKHWENDIQKDVAQNAPKKVTHVHQFEFIRERFKGIGKDSIILSWLHSFVKQFSGSVTKSDYITMRLGFIQTHCRANPKFDFHRYMVRALEADFKKVVGISWYLWIFVMIFLLLNVNGWHTYFWISFVPLLLLLAVGTKLEHVITQLAHEVAEKHSAIEGDLVVNPSDEHFWFGRPKVILYLIHFILFQNAFEIAFFFWILTTYGFNSCIMDHVPFILTRLIIGAIVQILCSYSTLPIYAIVTQMGSFFKKEIFDEHVQQGLVGWAQKAKKRKGLKESNGAMAGAGSTNGSSQPSSILQMVRRAAASEEGSSNGGDMRTNQ

SEQ ID NO: 114760 - protein, 540 aa, Oryza sativa
  Clone ID: PAT_MRT4530_1841C.1.pep
MESEAGGTNPQPILGRMVAIEDYVLCGFLPPPSEFLLLVLNFYGLSLLHLNPNSIAFLSIFVHLCEAYIGVEPFLDLFRFYYELRWMESNRVSGCVGFRLRDGLKSRYIPFQCPSSRSKWRNRWFYLEIKDSNPVFVVPGDQPDKIPSWTAKPPLTPSLQSFIDIIDDLRDGSRLTGLSGETVERRVGQVMISDPTTASDIPVPLCEKGAAERDEAINALPLTDIIGPLTDHQVASSLKVKVVKEVSDAATTSGGNVPTKPRKFSSASDASPPPPRRQRIVTIGEKEARAKAAQAKSGGASSASPVVASTDVVPAAGSREATPSGPVSDPAAGRDLPVAVLTWEELQVEMGRLLEAGARSIGREIAEARSEAATVNVRADRLVRELAEAREDLTKMRELAAGNERQRKGLEDRMSELGNNLSEIWGSLRVTYTGLHQLAGECGVTSTIPANPDEFSLTSSLAELATAMGEIPSKHAARIAEETSNGIYTGACHVLACVRLSRPELDLREILDQGAASDMRKEVMEEVGDLGESVLPLFEE

SEQ ID NO: 114761 - protein, 70 aa, Oryza sativa
  Clone ID: PAT_MRT4530_18420C.1.pep
VQCSSNIKQASFALSCGTVLMSEHLRSSNATSYIAGKNALRCPMIFWRTVASRRHQTPGTVVEAWSHLEN

SEQ ID NO: 114762 - protein, 57 aa, Oryza sativa
  Clone ID: PAT_MRT4530_18421C.1.pep
MVEEPCTSALAARVGVVDSGLCDDDDDGSCDNDGMWICGICGFGILREILKWEHEFG

SEQ ID NO: 114763 - protein, 110 aa, Oryza sativa
  unsure (1)..(110): unsure at all Xaa locations
  Clone ID: PAT_MRT4530_18422C.1.pep
SWANGGVARGGAEHRVRVERSGELRRPEDAGAGDAADAAAEEEEPRXDADDHREKQGTHRRCGDGGGGGGRWPPCSPACRHRRSAPPLHSASPAAAQHRLPPRCRGDRRS

SEQ ID NO: 114764 - protein, 67 aa, Oryza sativa
  unsure (1)..(67): unsure at all Xaa locations
  Clone ID: PAT_MRT4530_18423C.1.pep
KTKILRWSIKTNPNICCFNEKXFKYKDTGYIKEKRWKIYYANTNQKKVSFVIVILDEIDFKGKKDKE

SEQ ID NO: 114765 - protein, 208 aa, Oryza sativa
  unsure (1)..(208): unsure at all Xaa locations
  Clone ID: PAT_MRT4530_18424C.1.pep
GRCQPSRPPSLRRAGETGRRAGDGARTPTPSSPPLGGRRLRRTLSSPRHAGEKGGRREGKQHRWWERRRRWWGRRPAWGRGRSGRWGEGAAPPEXGGEGKRRRWGEREGXGGVGRRVVAGSAGGRGRGRVRVINLELISALGRLAQLAQGSPSRTDRWGPPAPKLLRLQFAIGFAVAGHLRLLLAVESSLVSPPSSPLLPCLAPRGAD

SEQ ID NO: 114766 - protein, 218 aa, Oryza sativa
  unsure (1)..(218): unsure at all Xaa locations
  Clone ID: PAT_MRT4530_18425C.1.pep
SPPGARRRRRRRGARGTRAGSRGGGWRGRAGRAPAAWRPRRRGGASRAPPGRPRAARGAPRRAPGRPCRRPARSPRSLRRRRRGRDRRTPPCATRSPXSRRRRPRTRSTGSCGRTRCRGASPPARGGSPRARPCAGHRGTDGGTRRRTTRTARSPPGTPTRAAPGARRTHPRRAPASAARRXRSARRNGRYRLTISSAVGSNGWPPPPPLLPDATALA

SEQ ID NO: 114767 - protein, 169 aa, Oryza sativa
  Clone ID: PAT_MRT4530_18426C.1.pep
MPSFVILRGCLLVFLTTTDKSASARNTAVALHFRVTPKGYRTQGMITRTGFRAVTTCRLPLTNPWDTQQTKKKFSDPRAECIKSSGTPPEFLLRSYTHRGRSQISAKLPGTPPKLPLTLYLILMYKRYNRVSCNSAQSCVYWNEMKISLYRLQMTVRGMGNGQNTLQLP

SEQ ID NO: 114768 - protein, 66 aa, Oryza sativa
  Clone ID: PAT_MRT4530_18427C.1.pep
HTKYTYKKTESRFTRFTQENNIAYESGWFAHTFSCSCLRSPSQELDSIPILSRVRFYPAFVSAIFS

SEQ ID NO: 114769 - protein, 124 aa, Oryza sativa
  Clone ID: PAT_MRT4530_18428C.1.pep
MASTLTNVGLSTPAAAASSLVRPVAGAGRVVFPRVGRGGFAAVRASGPATPPDISDKMSESIDKAKEACAEDTASGECAAAWDEVEELSAAASHARDKLKETSDPLEAYCKDNPETDECRTYDN

SEQ ID NO: 114770 - protein, 78 aa, Oryza sativa
  Clone ID: PAT_MRT4530_18429C.1.pep
MTMHQQNMNLHEQSNAKKTRTGTKKPKKRMDPTMKSIYKDLQQTMDADTGNVCTTYLTKKNFHCNRFSNLKKLMVLIQ

SEQ ID NO: 114771 - protein, 136 aa, Oryza sativa
  unsure (1)..(136): unsure at all Xaa locations
  Clone ID: PAT_MRT4530_1842C.1.pep
SLRYXVXXXSPPXXXNXXNSGXVTXXQPVLEXXHLXPGXGXXXLGRTRXGXSPTXPXASSSXRPRPPXPRLAPSPPAXTXXVHRXXRGEKQREKXADSHSSEGCDXSMMXPRKLRRGHRPLSACNQVGKIISYYYV

SEQ ID NO: 114772 - protein, 137 aa, Oryza sativa
  Clone ID: PAT_MRT4530_18430C.1.pep
MRRQRVLSRRRCQWARATTCVIGPGPHQPVDVGQPRVTQLRLRPDRSDRHGTRSSPSDPGNSGFSNPIWVQPVIDTCRVGHERIDFSTVTRRPASLVRVHLTLPSVWLRLIAIRRAVPSRRTGWLHRADLTWPDTIS

SEQ ID NO: 114773 - protein, 400 aa, Oryza sativa
  Clone ID: PAT_MRT4530_18431C.1.pep
MSEAVDEQISAGKQAKHKHWWTRNRKWMIMACVPHVVRGDRPRGFDCGIKLKIPPRATRLAVHRSIAPRRKTIDDHPYFVASTDHHGRLLLCASQGPEPEPPVLDAFYRGPLGVHHGFPMAYFICDTRTRRCTRLPDRRLPILHPGNVCLVGTASGGFIVTDLHPTPGDQQAILFMYNSASGVWKDRVVNYPPRDRPWGGNGVVVHQMMIWWVDLSYGLLADLAFDQLRRVVPGIHHDLRFIPLPDGCELPPGTADLDKCRCVGLRRDDLRYVQIHKRDGDPAVSMWTLDQLAGTWSFDCEASFKAIWNDEGYRATKLPPEVPTVALIHPEHPGEVAYFFLHSRVFGVDLRACSVLECEFFAMLNPPMRYHSSRFVRAWRLPVSNSADLSVPVRAFFAVA

SEQ ID NO: 114774 - protein, 106 aa, Oryza sativa
  Clone ID: PAT_MRT4530_18432C.1.pep
GKKPTPPIQNAPQGKNPKKGPKTDPKKRFQIPKKMEGGKKTNPFPKIFGLCKHPLFQKQKKGLKKGKKNGPQKKISNPINLWGPLKTPHQLKEGDYPTQIRPGGGP

SEQ ID NO: 114775 - protein, 54 aa, Oryza sativa
  Clone ID: PAT_MRT4530_18433C.1.pep
GQLVSLILVLSIFCNMLEQPPVCRRLLHFSDHLNASDTAFCYTPYGMISFLLAL

SEQ ID NO: 114776 - protein, 76 aa, Oryza sativa
  unsure (1)..(76): unsure at all Xaa locations
  Clone ID: PAT_MRT4530_18434C.1.pep
ININNKESQEGGEEVDSLASDAIAPXAYGPTVGSAVAEGRGPLLCLLIRCGPLLATGCSRRESESEKIRSWLVPXA

SEQ ID NO: 114777 - protein, 50 aa, Oryza sativa
  Clone ID: PAT_MRT4530_18435C.1.pep
MVITILKGCVRTEADLEEINNHGNRTRISYGLHRLSSASAGTEPDREKPM

SEQ ID NO: 114778 - protein, 81 aa, Oryza sativa
  Clone ID: PAT_MRT4530_18436C.1.pep
MGKRSAAGLPKGMVAGGDLRVATDAIRGERAPEDLGTVEQRSTGMRASYGGTQPRRARLGGAISTPSCAASPSSRSPSPRA

SEQ ID NO: 114779 - protein, 277 aa, Oryza sativa
  Clone ID: PAT_MRT4530_18437C.1.pep
EGKLVHAAILLLAAQRKIRTCASSKRNTNHNLSGFDIIKDRITGSIISIETEGPGLTGGKNSKARKQQDDMRMFFRNALVLNSMISEAGEALDEYIQTHSEVSHRGVLGNISSILKDHGVAPTGKGINIGDLKCCPYDCEESDSVLKCKHEDSGMTKASGESPNRNVEAKNAVGNKLPSRQELEQTRNMFFPYWRSVLTSRFTVKLFPSYAPMDDCQPSLPKLYMAGGSGNKLKDKGSFPVDVGLLGKTPQLTSIHQSRRLFGTAAFTLLKMLKKRA

SEQ ID NO: 114780 - protein, 47 aa, Oryza sativa
  Clone ID: PAT_MRT4530_18438C.1.pep
YYFNIRKFLATAGQRWCQASATRRKRLWISHPTTSRQGSVRPGKTLT

SEQ ID NO: 114781 - protein, 310 aa, Oryza sativa
  Clone ID: PAT_MRT4530_18439C.1.pep
MADDVVEAAASSSPSTQGGGGGGIHVVAKNAMNSSKQFSSALAPVAVLLAVAVGAVSLLPSLAQAVWEVPHLFLLGLVVSYGVFAQKISTGGSGGGGGGGGGDDGARAWNSRYLSDDPLVVVADNAASDDGGGGGASGRPLSLPVRRLKPPPPAPTMPGIESEAGDASDDGIGAETDSSASTAGFWGAAPSPPSVLDAVCRSRKPAATATAAAPSAMSKGFPSYISPAPRCDQSFSDDGEVTDWDDDDDEKADVQDEMAASPQRSYVDHDDYNGDGDELSELAAEVEDEVDRKADEFIAKFREQIRLQRL

SEQ ID NO: 114782 - protein, 794 aa, Oryza sativa
  Clone ID: PAT_MRT4530_1843C.1.pep
MPYETPNNIPDGMDIDAPSAAPMDGNVHVSEENTFGELRENDDVGDTLYDEDTNEVDNRSCKRKKDRFVTAREYYCFRLQGVVDVINSGETRGKEVGKRIVLPRSFPGGDRDMQRRFLNAMALVQRFGRPDYFITMTCNPNWEEITENLYPGQQPQDRPDLVARVFRAKLRDMLDLFTKKKYFGEVQAYAHVTEFQKRGLPHEHILLIMKPAKGTEPEEPLQDKESGEHVGSKVSMPNNGVPSKLIRSIIGQTYDYLPQDYVLTNQDVTAQDIILVSSENETLVNMGGFSVKKHHLSCLLTKDKWVNDDVISAYIHCIKEAQSKTDKKVYYENPFLIAMLQRDAVYIIDEHIDNFITNTVKNYLFHELKKYSLVFSCSRPKKKVIHVLDSLCEDFDRVDLHIAIQGVQKHLDIITRRQDLPSHEWIDLNVVTWPIIEQLQVKIQLDGSSCGLFMLKFMEFFTGDKFSYPVTQKDIELFRYKLAGILLCWKTNMAAEASNVEQVEDTDNENDVVIVGSRQRERWDMKESKTATGFGISPMFHKDIDLAGSVGSWSKIHYEVAKCKSARTQNACTAGIYTYLAETMSRRNSRTIYVGNLPGDIREREVEDLFYKFEDPRDADDAICGRDGYNFDGYRLRVELAHGGRGQSYSYDRPRSYSSGRRGGVSRRSEYRVMVTGLPSSASWQDLKDHMRRAGDVCFSDVYREAGATVGIVDYTTYEDMKYAIRKLDDSEFRNAFSRAYIRVRESVSRSPSPVDERSISRSRTPVSSPSRGRSVSKSPSRSLSRSPSPVKSD

SEQ ID NO: 114783 - protein, 413 aa, Oryza sativa
  Clone ID: PAT_MRT4530_18440C.1.pep
KKAETHEPLKLFQKGSSFLAGNLSFSRARASLEGSAPVPIHKEPSSIIPGVPAITQHEILNNRRHVLTKDTAGSVKLWEITRGAVIEDFGKVSFEDKKKELFEMVSIPAWFTMDARLGCLSVHLDTPQCFSAEIYAVDLNVAGAQEDLKINLAQETLRGLLVHWSKKKQRSGSHGLSNGDTSTGKDVSLKNLPHPRSEVDDGAENHASQMLPSFEFSTVSPPSIITEGSSGGPWRKRITDLDGTESDIPWWIVDCVEHNRFPKENTKCGFYLHPAEGSPAPNITQGKLSAPRILRIHKVANYVVEKLDRPLDGNADSTFGMGLTSGQSQFSALDSSSRLGLKPWQKLKPSVEILCNSQANHYAFLALGSYTSVINITNMKQVLAPEMSLATVRAYVWKKPEDLILNYKVVQSR

SEQ ID NO: 114784 - protein, 114 aa, Oryza sativa
  Clone ID: PAT_MRT4530_18441C.1.pep
ERGAWQRGAALCKERPFFAEQRPSTLGGDPLQAPVSSLLPPNPSPTLAPGPSPMAPPARRSAPRAAIVTTGRSSAALKRRASQSSARRPARRCWAGVPGAAKSAALGGGVVGDG

SEQ ID NO: 114785 - protein, 240 aa, Oryza sativa
  unsure (1)..(240): unsure at all Xaa locations
  Clone ID: PAT_MRT4530_18442C.1.pep
LLRLQRRRRRAAAVVDAAASQLCRCDTQADLHNLENMLAACFLNEEPDIRQNDRSGILTSKQIYEAKFPAEFISPNWKIIWACKAPLKVKLFAWMLIRNRLSTKSNLLKKKIVQSATCAICNCADETANHLCFSCPFAVRFWXSIGIHPSIQDLRLFYRLSPSQLLPAKHFHVFYLLCFWVLWNHRHDVVFRGLQPSLAASLYRAVSEAGLWAELLVVQDRTVIDVWKQIFSSCLQSLNL

SEQ ID NO: 114786 - protein, 51 aa, Oryza sativa
  unsure (1)..(51): unsure at all Xaa locations
  Clone ID: PAT_MRT4530_18443C.1.pep
VFQLQPYXLHNGTPKTILTDQVLIVQPKVFIHVKTKQLKAQISSGFWYSKI

SEQ ID NO: 114787 - protein, 418 aa, Oryza sativa
  Clone ID: PAT_MRT4530_18444C.1.pep
MPREEYRAKRRRLPAAEPDFLAGLPPEIVDDIISRLDIRDVVRTSALSRAWRRRWESVRGLDLSFRSSAPAAAISSVLKRAAAPVRGLGLRVPGRRFRRAVHWLRLLPRKRVQSLDLHFEFVFGEKPSLDPSILSCLELTTLVLEGCIFPPSPPPPSFVGFPELTKLSLSEIDLPRHGGRRLEAMIAASPLLVELSLSNVRSLHHWERWFIRGPNLRSVWIWTDYDYGCRIGELPRLEHAIVFASAIKTEVLCKILEGISHAETLGFDAITDQFNGNPPERFSFTFQNLRSLDLHACLDQISSTSWVFCILRSAPNLETLEIEVDCDDDEVDAGSVEGFANAQASDDIFPRLRDVWLHSIDCSSNEMCFIKFVLSKARSLELFSVRVTSSRLSYQEACIEMAKYKRASPLAKLRLIRG

SEQ ID NO: 114788 - protein, 70 aa, Oryza sativa
  Clone ID: PAT_MRT4530_18445C.1.pep
MVTWRIRNMTIAFQLAVFALIVTSSVLVISVPLVFASPDGWSNNKNVVFSGTSLWIGLVFLVAILNSLIS

SEQ ID NO: 114789 - protein, 278 aa, Oryza sativa
  Clone ID: PAT_MRT4530_18446C.1.pep
MVGAVQEGIVREMNGGFEVMSGYDRSSMAPKQQQREEESKWYEEEIDDDLKLCYALNSVLHRGASKYQEIALIDTKHFGKEVVDFCRTYLTVNWDAFASDKLCLIINDARAELEKSREKFDVIVGDLADPVEGGPCYQLYTKSFYQHIVKPKLNDRGVFVTQAGPAGVLTHKEVFSSIYNTLRHVFKYVKAYTAHVPSFADTWGWVMASDYPFSMNAQQINERIKERIDGELVYLSGESLISSTILNKSVYQSLLNETHVYTEDDARFIYGHGRARCA

SEQ ID NO: 114790 - protein, 46 aa, Oryza sativa
  Clone ID: PAT_MRT4530_18447C.1.pep
MRRKLRTEGQKPEASSLHHMASSIERDVIARVTGTAQPPVENIPTH

SEQ ID NO: 114791 - protein, 75 aa, Oryza sativa
  Clone ID: PAT_MRT4530_18448C.1.pep
MWPVRPCYSATARKLAVVAQSEGPIGLAGQTDMGWPVRPTSARSDCHRLGLTEYGSVGSVSAIQSSTIPISRRPI

SEQ ID NO: 114792 - protein, 155 aa, Oryza sativa
  Clone ID: PAT_MRT4530_18449C.1.pep
MRRSDRLMKVGLTDVDRLVEPPKSPATACRRRRSDRLHAASLTADRFQGFGTHYFAHIKYIVVVKTVSKDSRVRRLPPPHALPRPSTTRMRRRRKDRLIRDLPSIEPGLTVGVKKKYPWRLKLIRDLPSIEPGLIRELPSFEPGLTKIPVGIKAH

SEQ ID NO: 114793 - protein, 134 aa, Oryza sativa
  Clone ID: PAT_MRT4530_1844C.1.pep
MKVRGYNSDSSRKGGQRIHPRRSSCRRRGEEEDVGKATVTGWAVVMWVQEGRLRRGCGTCSSPLQFGELEDGRSASMTGQDPPTTMRSPIYRALKELYLIDAVGWRRCSSWRWRQHSRGVGHKWKRRYGSNCND

SEQ ID NO: 114794 - protein, 1094 aa, Oryza sativa
  Clone ID: PAT_MRT4530_18450C.1.pep
MAGNDWINSYLEAILDAGGAAGEISAAAGGGGDGAAATGEKRDKSSLMLRERGRFSPARYFVEEVISGFDETDLYKTWVRTAAMRSPQERNTRLENMSWRIWNLARKKKQYLLENLSFGVSGGISLVPENTYISLLEEIEGEEASRLAKQRLEREKARRYAAADMSEDLSEGEKGENINESSSTHDESTRGRMPRIGSTDAIEAWASQHKDKKLYIVLISIHGLIRGENMELGRDSDTGGQVKYVVELARALGSTPGVYRVDLLTRQISAPDVDWSYGEPTEMLSPRNSENFGHDMGESSGAYIVRIPFGPRDKYIPKEHLWPHIQEFVDGALVHIMQMSKVLGEQVGSGQLVWPVVIHGHYADAGDSAALLSGALNVPMIFTGHSLGRDKLEQLLKQGRQTRDEINTIYKIMRRIEAEELCLDASEIIITSTRQEIEQQWGLYDGFDLTMARKLRARIKRGVSCYGRYMPRMIAVPPGMEFSHIVPHDVDQDGEEANEDGSGSTDPPIWADIMRFFSNPRKPMILALARPDPKKNITTLVKAFGEHRELRNLANLTLIMGNRDVIDEMSSTNSAVLTSILKLIDKYDLYGQVAYPKHHKQSEVPDIYRLAARTKGVFINCAFIEPFGLTLIEAAAYGLPMVATRNGGPVDIHRVLDNGILVDPHNQNEIAEALYKLVSDKQLWAQCRQNGLKNIHQFSWPEHCKNYLSRVGTLKPRHPRWQKSDDATEVSEADSPGDSLRDVHDISLNLKLSLDSEKSSTKENSVRRNLEDAVQKLSRGVSANRKTESVENMEATTGNKWPSLRRRKHIVVIAIDSVQDANLVEIIKNIFVASSNERLSGSVGFVLSTSRAISEVHSLLTSGGIEATDFDAFICNSGSDLCYPSSNSEDMLSPAELPFMIDLDYHTQIEYRWGGEGLRKTLICWAAEKSEGGQVVLVEDEECSSTYCISFRVKNAEAVPPVKELRKTMRIQALRCHVLYSHDGSKLNVIPVLASRSQALRYLYIRWGVELSNMTVVVGESGDTDYEGLLGGVHKTIILKGSFNAVPNQVHAARSYSLQDVISFDKPGITSIEGYGPDNLKSALQQFGILKDNV

SEQ ID NO: 114795 - protein, 78 aa, Oryza sativa
  Clone ID: PAT_MRT4530_18451C.1.pep
LAAASTSFTPLPPSTDCRPPPLRKTAVPEAGAAQDPASPTATASLHAVPEPGTAQDQRPRARRLPPRRPRRDLDLDIH

SEQ ID NO: 114796 - protein, 98 aa, Oryza sativa
  unsure (1)..(98): unsure at all Xaa locations
  Clone ID: PAT_MRT4530_18452C.1.pep
AVEXQRRSGCCMQFADIYRSAKRHLSELRLMDKVKASSVKEAPSAPPLEIQITEDQVRDTVKSLMNMATNKCVEMKAQGMLAFAELTSSDSNVQKMMA

SEQ ID NO: 114797 - protein, 275 aa, Oryza sativa
  Clone ID: PAT_MRT4530_18453C.1.pep
MKGCTNDLRQQARAIVQEINCEDFWNNVENILAITGPIYEVLRFSDGEGPKMGEIYERMDCMVGEIKDIMMKDDNPYKSSFPEIENIVIERWEKMSIPLHCLAYAVCPRFYDQNYLQKPAPGGTLRRAPNQDVEVMTGVLKAFERIADNKEEEKVLREQLNDFIMKKGFFALEYVQADAASMEPIEWWCSYGSETPELAEVAKRVLSQPISSSSAERIWGTYQFIHNAKRNKLNAANADKLVFIHSNLCLQSRFTESYKSGPNAMWDAHPEDSTI

SEQ ID NO: 114798 - protein, 62 aa, Oryza sativa
  Clone ID: PAT_MRT4530_18454C.1.pep
SRVLLQYHCHYVCQKSNRLPKRYRYKRTWPKPGSIPIDALRRTADIFNADGTRRKDHTCESN

SEQ ID NO: 114799 - protein, 67 aa, Oryza sativa
  Clone ID: PAT_MRT4530_18455C.1.pep
EKNRGGILLGLQKLKTDPPQRWTSWGHLIFFGAPYPFSLGHHSGAPFSASLEKPRGVCCCGPGGGPG

SEQ ID NO: 114800 - protein, 76 aa, Oryza sativa
  Clone ID: PAT_MRT4530_18456C.1.pep
MALELRALLLRVVPLKLRVPLFRVMALELSVHLLCAAAVARTAALLQRNNLSPEKFIEIDLAASVEGGKLTWQTAT

SEQ ID NO: 114801 - protein, 75 aa, Oryza sativa
  unsure (1)..(75): unsure at all Xaa locations
  Clone ID: PAT_MRT4530_18457C.1.pep
KKHGSTPRDTEDPIKLPIHFNKIQCLCFQKQSLLPGDHIDRWVFFSIDPGLXTVPKREGVNNIVLSYAFFKVNDS

SEQ ID NO: 114802 - protein, 99 aa, Oryza sativa
  Clone ID: PAT_MRT4530_18458C.1.pep
MAVLGGRPNKVWLNYPCGHSSPPSGGCAIQKESRRERRRQQRRQSRGGPAGRYDELLAAFSDLICCPAGQHDVHSSAQCHIQPVQAIDGFLCVYGIVFD

SEQ ID NO: 114803 - protein, 263 aa, Oryza sativa
  Clone ID: PAT_MRT4530_18459C.1.pep
MASPATATASLCCRLVRLPLLVPYARRRSPLSTRCSAAQSPDAVDREYADLNLRPLYPNRGHHLRIRQHVNPLSSSFSEPTEPPEWKEVFEDPLLPLMVDIGCGSGRFLIWLAKNSGERRNYLGLEIRQKLVERSQFWVTELGLRNVYFMFANATVSFNQIASSYPGPLSLVSILCPDPHFKKRHHKRRVLQSQLVDSITNNLCLGGRVLLQSDVLEVAADMRERFDEYSDVFEHVDCIDKDLRCDNEGWLLDNPMGIRTERE

SEQ ID NO: 114804 - protein, 168 aa, Oryza sativa
  unsure (1)..(168): unsure at all Xaa locations
  Clone ID: PAT_MRT4530_1845C.1.pep
GCRIRHEQSGFGNVSNGGRIKCMQVWPIEGIKKFEXTLSYLPPLTVGXSFEXXPITLLXSXWVXCXQFNXGGFXXXXNXRFPXFXXGXFWTXXKXPXFRXPXAPXXXRTXEAXXXPXXLVXILRLTSGRAVNSSQTPFESVANQIGCACFWALKNAFYFFYFPPWPPL

SEQ ID NO: 114805 - protein, 78 aa, Oryza sativa
  unsure (1)..(78): unsure at all Xaa locations
  Clone ID: PAT_MRT4530_18460C.1.pep
MNQVRYXDQSGFGKELDLKNRVCIGCEGIGWILYRLKQIGQRIADTTDSTDTADFAEDSCETASGIDQRATQGLPRWR

SEQ ID NO: 114806 - protein, 104 aa, Oryza sativa
  Clone ID: PAT_MRT4530_18461C.1.pep
IKNLGKKHLKHQIPQERHLLIKSLGILDQGLAKGLALEVKAQGLASNSTTTINKTSTTLNRIIIKITTTRTAAIQVEPRHSNILARTRQNQRDKHKHKHKHKHQ

SEQ ID NO: 114807 - protein, 72 aa, Oryza sativa
  Clone ID: PAT_MRT4530_18462C.1.pep
MAHRCLLSSLPPGHTSSLPELPLPSAGYRCATFPQPPPPMTTTAPAVTGSQEEDGVVSLRRSLKAEAASMEI

SEQ ID NO: 114808 - protein, 41 aa, Oryza sativa
  Clone ID: PAT_MRT4530_18463C.1.pep
LGGCPRVISCMRIVFYSQLARAVLLDMFSSAFCHCCVQSAI

SEQ ID NO: 114809 - protein, 76 aa, Oryza sativa
  Clone ID: PAT_MRT4530_18464C.1.pep
QTYKGVEWWRLMGHLKTINKTPNRILKMIKRKDDRQVMKQSVKAVVIITKGGSRRVAEEYSDKVADVLAELLKSKK

SEQ ID NO: 114810 - protein, 133 aa, Oryza sativa
  Clone ID: PAT_MRT4530_18465C.1.pep
KKKTNNQTQGTKNLGGGNSYGKKRGPKSFPLKGHGPQKKILPQPEWPLWGAPETLLGPFLGRPGLKNQGPGTFCFAGGPPGCLPETGGANPNRGPKKLQRKKTGTWGGKNRPFLRHWDFFFWPLFFLPRKNYF

SEQ ID NO: 114811 - protein, 86 aa, Oryza sativa
  Clone ID: PAT_MRT4530_18466C.1.pep
STSAGGLHRTRPGLPPKHPTLPVPMVGFTLQQHIAAHVVWLAPPHSTQHCHTRPHQASHFGAQALPPPGIQPDSGPHRQVVAQCGA

SEQ ID NO: 114812 - protein, 79 aa, Oryza sativa
  Clone ID: PAT_MRT4530_18467C.1.pep
NSQKPAHAGLLTNLTSQILTGPGPRRQGCSSPVVKHSFPCIFSMLFWWSLNYGALYLTASATTITEIAVIVQILGLFPG

SEQ ID NO: 114813 - protein, 74 aa, Oryza sativa
  Clone ID: PAT_MRT4530_18468C.1.pep
SISIRHQTKLYTQISDKTTTSNTSSYLLSVDSYRQTIFPYKLFWTYSSYSYGNINFILSYTHYQQLSLFFTKTF

SEQ ID NO: 114814 - protein, 165 aa, Oryza sativa
  unsure (1)..(165): unsure at all Xaa locations
  Clone ID: PAT_MRT4530_18469C.1.pep
RTRGGKLLDAKTERRLAQNREAARKSRLRKKAYVQQLETSRIRLQQIEQELQRARSQGLFPGGCSAPGDMSSGAVMFDMDYTRWIDDDSKCMAELQGALQAQLPDGNLGAIVEECMRHYDELFHLRAVLASFRVFHLMTGMWAAPARRCFXXFGAFXPSEILKML

SEQ ID NO: 114815 - protein, 121 aa, Oryza sativa
  unsure (1)..(121): unsure at all Xaa locations
  Clone ID: PAT_MRT4530_1846C.1.pep
RRLQAPRPVARRWLCPAVASLGSASTKAPGDGGSHKWRLPMMHQRRGGTVPVPTPCERRQRAVARLVAGGLAVHGGAPGXGRLADDGGGWHGCAAVRVENWRLDLEXLGFWVEDLEFDWLT

SEQ ID NO: 114816 - protein, 86 aa, Oryza sativa
  Clone ID: PAT_MRT4530_18470C.1.pep
MTGGAVGPRWRSKRGGELGIHGDEGLPGVFGFGEMAAGLSLVLAEPREAPESRAKFLGNSAAPAPTRQPATSRRRRYSRPRPAGTG

SEQ ID NO: 114817 - protein, 184 aa, Oryza sativa
  Clone ID: PAT_MRT4530_18471C.1.pep
MRVLVHSAESPATPAAAISIDSDMVVILASLLCALICVAGLALVARCACRRRGAATTTTTTTTTPAATSPAPKGLKKKAIDALPTVSFALKQQQQQAECAICLAEFAGGEELRLLPHCGHAFHVSCIDTWLGTHATCPSCRATVGTSTLFLPLPGRCRRCGEVDLPTLHDFSTATATAHHNTPP

SEQ ID NO: 114818 - protein, 88 aa, Oryza sativa
  unsure (1)..(88): unsure at all Xaa locations
  Clone ID: PAT_MRT4530_18472C.1.pep
ELPIIGERRRRRTWWCVTVTTTSPPPLLPPPPVLAPPSPVPPPHSVXSPPPAPTAPPPXPPPRPATPPPPPSAPLAPAPPPLFSLPFL

SEQ ID NO: 114819 - protein, 65 aa, Oryza sativa
  Clone ID: PAT_MRT4530_18473C.1.pep
LHSSTFDSHISKSENFIFATHISIQQPIILMILSYSMRDSSFFHIRLATWTSRNININESLVYDE

SEQ ID NO: 114820 - protein, 136 aa, Oryza sativa
  Clone ID: PAT_MRT4530_18474C.1.pep
MARSWEAVSVDAAPCRVVLLLTVHGRRERGGLASLLHTTTVATTATSPILRAAAGSPCLASAPLPDIRRAAVAAATATALLSRLPLPPLPNAAAVGWQCRRRRMPTPLALFVPARHRPKGKKGRERERRERGRRKV

SEQ ID NO: 114821 - protein, 33 aa, Oryza sativa
  Clone ID: PAT_MRT4530_18475C.1.pep
MGVTVREIAAVDWFGNQRVELSLETPMEVTNLF

SEQ ID NO: 114822 - protein, 584 aa, Oryza sativa
  Clone ID: PAT_MRT4530_18476C.1.pep
MRGAARPPENPAIRRRKMPWLIGFAPVAGRGGDLGSPLATFSVGRFWDWSFAACWGLRTPESGVMDNSEVTAVVLIVMLWNLVKMGSDAGHAEPSCSTPAHHQVFRPVTRSMTRKPTAAAAASSDVKGGESASTSKRRDSTDPCFNTQSAAARPSVTRVRTPHKVASSAWKPLTQPIVMSEDLKRASVPSTNPSAKRSRVASSQAAEDSPTVHRGKKRNEESASKGDQLDGAVIPSPSKKLQTGKSPSDVLPKRKPTIRNKDGKLAAPLSMVKLETESGESSVIASSKIGPATTNDNCQSAELAQQLQLDTKNNSNDIITEAIAYGTNQADLLVAPVTTDAIASGSSQVNLSAFPVTAEAIPNRTHQVNHSAGPLNIKAMINRTSLVNKPVAPVNAKAIANRAQQVAAHNKLPSPVIAAPRQNLQDDLQRKLAKLLIARKQPSGQAGATAPLVSPKLEIGKAKGSSSNVLSDPAYANVKALLIKQQEQLLQQFKSANSQPQVHIKGPALTDKDEAPPVEPLGTRCQLCKLDIAFRPQGDDARDNAPPVAAVLGCHHAFHSSCIEAIYGLAEPSQCIGCLDSAKA

SEQ ID NO: 114823 - protein, 138 aa, Oryza sativa
  unsure (1)..(138): unsure at all Xaa locations
  Clone ID: PAT_MRT4530_18477C.1.pep
MVLMADVDREWLQHGTCAGTGHMDVAKRGRFWPRVDSGLXGTLHPPSGGLQHQRLASSAAAGTSKPALPLLPLIRASPSRRRRQSPPQSVVNSSKPGMLGASAKEAVARGDEAVRTVEEAVRFLDWTQGRRPRPRAAA

SEQ ID NO: 114824 - protein, 49 aa, Oryza sativa
  Clone ID: PAT_MRT4530_18478C.1.pep
SSNRFRSASPLSPHRILSFFFSLSILPGDRVVGFCSPPARRREARFPFI

SEQ ID NO: 114825 - protein, 101 aa, Oryza sativa
  unsure (1)..(101): unsure at all Xaa locations
  Clone ID: PAT_MRT4530_18479C.1.pep
LLPXRSGQRHRAQSSVWQHASQAERARRRTSVTSPPGESGRAPPARATGCPALPLALPALTSSPTRQCAPRWPPCRHEPPRRRRPCGRGRTRGDRDTDGTR

SEQ ID NO: 114826 - protein, 454 aa, Oryza sativa
  Clone ID: PAT_MRT4530_1847C.1.pep
MGDAVIVKNKWGQDNVILIEFPKFSVSRAYPLLSLQMSSSSNGNGHYPVNGAKVLQKRENNQEKMLLDKNAAFRACQKDRHYIEKLETELRNCYQEIDYLQDQLNIRNVEANIMGEHIHSLELKLTELEKFPERVRVIDDELMRSDSQCWLLMEEVRCQEEKLKKAALQIEKLENVNLDSQCEIESLKLDLTTLEQRLFDADSFGQHVSADKAIADNKLREYELQLQEAHKTIDHLLLENKELKRLFPGGVATALTSDEQVDKTIEKIDGQYYERGGAILENMAKRSEESELLIEQLKEELREQKLKAKEDAEDLTQEMAELRYQITGMLEEEYKRRSCIEQAAIQQIQELEAQVSKEQRKLSGALRKLQESHELAQKQSMEIKKLKDSLGRFNSALNHGTVCRSCSCGFCAMLLELSNCSIEGLVDVRSSNEKPQNQALLEWRPDEDADGEAG

SEQ ID NO: 114827 - protein, 817 aa, Oryza sativa
  Clone ID: PAT_MRT4530_18480C.1.pep
ISSLLLLLLIGPASSDDAAAAAAARTSTGGVAGDELALLSFKSSLLHQGGLSLASWNTSGHGQHCTWVGVVCGRRRRRHPHRVVKLLLRSSNLSGIISPSLGNLSFLRELDLSDNYLSGEIPPELSRLSRLQLLELSENSLSGGIPSSLCNLTSLSSLYLNKNTLSGTIPSCLGNLNSLLELALSDNTLSGAIPSSLGRLSRLSSLHLSSNNLSGLIPDPIWNISSLTVFGVQYNMLSGMLPANAFSTLPHLQEVYMDNNQFHGHIPASVANASNISMLTFGVNSFSGVVPEEIGRLRNLGTLVLAETLLEAEGPNDWKFMTALTNCSNLQHVEMGACKFGGVLPDSVSNLSSSLVYLSIGANKISGSLPRDIGNLINLESLVLFNNSLTGSLPSSFSKLKNLHRLILFNNKLSGYLQLTIGNLTQITNLELYGNAFSGTIPSTLGNMTRLFELNLAHNNFIGAIPTEIFSIPTLSETLDVSHNKLEGSIPKEIGELKNIVEFHADSNKLSGEIPSTISGCQLLQHLSLQNNFLNGNIPIALTQLAGLDTLDLSGNNLSGQIPKSLGDMPLLHSLNLSFNSFQGEVPTNGVFANASEIYIQGNANICGGIPELRLPQCSLKSTKKKKHQILLIALTVCLVSTLAIFSLLYMLLTCHKRRKKEVPAMTSIQGHPMITYKQLVKATDGFSPANLLGSGSFGSVYKGELDSQHGESTSSVAVKVLKLETPKAVKSFTAECEALRNMRHRNLVKIVTICSSIDNKGNDFKAIVYDFMPNGSLEDWLHPETNCDQAEQRHLNLHQRVNILLDVACALDYLHC

SEQ ID NO: 114828 - protein, 716 aa, Oryza sativa
  Clone ID: PAT_MRT4530_18481C.1.pep
MALQASSSPSMFRAIPTNTNASCRRKVRASAAAAAANGGGDGKVMMRKEAASGAWKIDYSGEKPATPLLDTVNYPVHMKNLSTPELEQLAAELRAEIVHTVSKTGGHLSSSLGVVELAVALHHVFDTPEDKIIWDVGHQAYPHKILTGRRSRMHTIRQTSGLAGFPKRDESAHDAFGAGHSSTSISAALGMAVARDLLGKKNHVISVIGDGAMTAGQAYEAMNNSGYLDSNMIVVLNDNKQVSLPTATLDGPATPVGALSKALTKLQSSTKLRRLREAAKTVTKQIGGQAHEVAAKVDEYARGMVSASGSTLFEELGLYYIGPVDGHSVDDLVAIFNKVKSMPAPGPVLVHIVTEKGKGYPPAEAAADRMHGVVKFDPTTGRQFKSKCSTLSYTQYFAEALIREAEADDKVVGIHAAMGGGTGLNYFHKRFPERCFDVGIAEQHAVTFAAGLAAEGLKPFCAIYSSFLQRGYDQVVHDVDLQRLPVRFAMDRAGLVGADGPTHCGAFDVTYMACLPNMVVMAPSDEAELCHMVATAAAIDDRPSCFRYPRGNGIGVPLPPNYKGVPLEVGKGRVLLEGERVALLGYGSAVQYCLAAASLVERHGLKVTVADARFCKPLDQALIRRLASSHEVLLTVEEGSIGGFGSHVAQFMALDGLLDGKLKWRPLVLPDRYIDHGSPADQLAEAGLTPSHIAATVFNVLGQAREALAIMTVPNA

SEQ ID NO: 114829 - protein, 152 aa, Oryza sativa
  Clone ID: PAT_MRT4530_18482C.1.pep
MATARGDATARWDGDGDDNGAAAAARGARRRHGARGDATGGSGDTRGPRRRDSERREATRWAGCAAAAMATACGDATARRDGDGDGAAAATRDASRRHGARGDATGGSGEPRGARRRDSDGNGDATATATARGSGGELGQETAIEHLWGNEQ

SEQ ID NO: 114830 - protein, 72 aa, Oryza sativa
  Clone ID: PAT_MRT4530_18483C.1.pep
FGPCACPASYKGLGSAAAAVWYVSSQVLLIAAATLLTDQCRSPFLIFRSADRICCAAFVVNTRASLVKKKKR

SEQ ID NO: 114831 - protein, 311 aa, Oryza sativa
  unsure (1)..(311): unsure at all Xaa locations
  Clone ID: PAT_MRT4530_18484C.1.pep
MAAVASGEGPDGRRARRCLGGPVHARSRWRPPVSCKLASAERQGAVAASSEPAMGQTGGRPGGGGGPALQRLRRHAAGKVASRSLARCREGARRRGRQAAGQRHSGRQGSNESTTQSQPTVTVIEDLKLEIGRQEATKTNGQANRRGRRAAAEQAVASGEGPDGRRARRCPGGPVHARSRWRPPVSCKPAXLASAERQGAVAASSEPAMGQTGGRPGGGGGPALQRLRRHAAGKVASRSLARCREGARRRGRQAAGQRHSGRQGSNESTTQSQPTVTVIEDLKLEIERLALSSNMAALDTLAPSSCHRGTM

SEQ ID NO: 114832 - protein, 157 aa, Oryza sativa
  unsure (1)..(157): unsure at all Xaa locations
  Clone ID: PAT_MRT4530_18485C.1.pep
XXLFCGGSVVXPSGLLVRFSRGCNPMVSGRRXPRCGGRXVVHKPXFIPALTNHVTHQXSDEPLTVPKEPSFLSVKCCIGGECHPIFLQSPSHQNNINTXLIEGNYCTYIPSPCSMNXLFFPVCSSVNPSAIKYSXVCLTCTKPLFLXSCCLLARIFT

SEQ ID NO: 114833 - protein, 77 aa, Oryza sativa
  Clone ID: PAT_MRT4530_18486C.1.pep
MLSMYICTPAVFSTIPKAILFLVHLVGYRIPMDDRLDGRVGTWRGNAHHLEWFGSICPGRVMNNHIVPGYDMLCNEQ

SEQ ID NO: 114834 - protein, 50 aa, Oryza sativa
  Clone ID: PAT_MRT4530_18487C.1.pep
CGNRKLTSISSLTEIVALAGHITLVLREQYTPQALLTVTTVLKIQYYISE

SEQ ID NO: 114835 - protein, 364 aa, Oryza sativa
  Clone ID: PAT_MRT4530_18488C.1.pep
MAQNVQENEQVMSTEDLLQAQIELYHHCLAFIKSMALRAATDLRIPDAIHCNGGAATLTDLAAHVGLHPTKLSHLRRLMRVLTLSGIFTVHDGDGEATYTLTRVSRLLLSDGVERTHGLSQMVRVFVNPVAVASQFSLHEWFTVEKAAAVSLFEVAHGCTRWEMIANDSKDGSMFNAGMVEDSSVAMDIILRKSSNVFRGINSLVDVGGGYGAVAAAVVRAFPDIKCTVLDLPHIVAKAPSNNNIQFVGGDLFEFIPAADVVLLKCILHCWQHDDCVKIMRRCKEAISARDAGGKVILIEVVVGIGSNETVPKEMQLLFDVFMMYTDGIEREEHEWKKIFLEAGFSDYKIIPVLGVRSIIEVYP

SEQ ID NO: 114836 - protein, 127 aa, Oryza sativa
  Clone ID: PAT_MRT4530_18489C.1.pep
MNRMMFMACCYNDPDMLIDPDTVYPIRPECREDAAKTRFKPRPGLTLSPRRWKLLHNEEGVLDIAGMIKRVQRGGTHPNIKGEVWEFLLGCYDPKSNTEQKSQLRQQRRLEYEKLKTKCREMDTGSR

SEQ ID NO: 114837 - protein, 35 aa, Oryza sativa
  unsure (1)..(35): unsure at all Xaa locations
  Clone ID: PAT_MRT4530_1848C.1.pep
THGHRSLYQNEFTIISTFILISNHDRPXLAVVDSD

SEQ ID NO: 114838 - protein, 108 aa, Oryza sativa
  unsure (1)..(108): unsure at all Xaa locations
  Clone ID: PAT_MRT4530_18490C.1.pep
GPFPPSPRVRPIYALSADVVASLVALRNNRMRMFSDGAVTIGCWMPAKAVFYASTHVLCSPQCSXRMLAGSQIYHHPGLCHPEVKMLELHRRKECTGGPSAVSESDDR

SEQ ID NO: 114839 - protein, 57 aa, Oryza sativa
  Clone ID: PAT_MRT4530_18491C.1.pep
NTTYTIIYLYAGNHHNWMKRFGHKRIWEALIEFSKQKTADQKLFRKAKWSIFPCTIR

SEQ ID NO: 114840 - protein, 181 aa, Oryza sativa
  Clone ID: PAT_MRT4530_18492C.1.pep
GGGCRRSEAAAGELRRPTLSTEKVEKARRPPHPLPHRRLPLFLHRRRRLPPPLSPPPTPTAGSAAPMPPLHRICKGREGSRREREGGAARHCCHPPPDLPPPCLPSAGFARGGRGAEGRGREGPRGAVVTCRLHLRLPPDPPSPCLPFAGSASGGRRGEGSRREREGGTARRRCRCCEERM

SEQ ID NO: 114841 - protein, 72 aa, Oryza sativa
  unsure (1)..(72): unsure at all Xaa locations
  Clone ID: PAT_MRT4530_18493C.1.pep
PFQLVTGRVWKXTAFAGFVSGSLDSWLVPKYCVKNSKVFEYVTCSVYGTGIDEAFDLLHQSAGLRCVVACDE

SEQ ID NO: 114842 - protein, 114 aa, Oryza sativa
  unsure (1)..(114): unsure at all Xaa locations
  Clone ID: PAT_MRT4530_18494C.1.pep
LQEFGTRVLLRLINAALNDELFFSXANHTLTVVDVDASYVKPFDTDVVLITPGQTTNVLLRAKPTAEAAGATHLMMARPYATGRPGTYDNTTVAAVLEYAPPGHIKSLPLLRPS

SEQ ID NO: 114843 - protein, 146 aa, Oryza sativa
  unsure (1)..(146): unsure at all Xaa locations
  Clone ID: PAT_MRT4530_18495C.1.pep
MAVATDTARKNCLWRGNNFGSTRKSLASWEKRYCQMXIRTGTTALFWTDLWNDQFKCQQYQHLYASFLYKNDSVQAMCARPLEDSFMPPFSYQAYCEYFHLQTELAHLNLQQGTGDSWSFIWSSSCYTPKRFYKLNFATIQDEGSP

SEQ ID NO: 114844 - protein, 226 aa, Oryza sativa
  Clone ID: PAT_MRT4530_18496C.1.pep
MRPPGTFSLTDDAKRSRPDPTRSLTGRSVRVQPEKNREPWPPPPQYKHLASSQLYPPPPLQEPTTSAASASAAGAAIAKPRREAAIMKRLLRRLSRVAAADACAAAAYQPLRADRTAKLSASSSSSLAGARRLGCGARVPEGHVPVCVGEEGGPVERYAVRTDLLGQPAFAALLRRAAQEYGYGHPGALRIPCPVADFHQLLLRLSAAAAGDGDDDDEDGGGLVYY

SEQ ID NO: 114845 - protein, 152 aa, Oryza sativa
  unsure (1)..(152): unsure at all Xaa locations
  Clone ID: PAT_MRT4530_18497C.1.pep
RGWGSSRRSSRCTALAEIRRGKSGKRAFDPTLPPFQLAGPMELWIQDGDDVRLALPHFFEAGTLKKVVLSDGXAVVTVKGAKAVSLRLPLELPLPLNRTXYKGRLSSLISIAQTLRGAARSNQKPLLSLRIEGPTSXSSTPFMSPNDRLKLK

SEQ ID NO: 114846 - protein, 248 aa, Oryza sativa
  Clone ID: PAT_MRT4530_18498C.1.pep
MAARARWRILALPLALLLAVGSSPGLVRQASSSAAAKPPVPKAISDLREAIVKGLGFQSEELKVSGFDVRDALVGQAVAYEFDIEVGRKVVPVRLLEDVNRWDFVDLPIFRSQADADDTALAEIRRGKSGKRAFDPTLPPFQLAGPMELWIQDGDDVRLALPHDVEAGTLKKVVLSDGAVVTVKGAKAVSLRLPLELPLPLNRTTYKGRLSSLISIAQTLRGAARSNQKPLLSLRIEGPTSLSSTPSM

SEQ ID NO: 114847 - protein, 747 aa, Oryza sativa
  Clone ID: PAT_MRT4530_18499C.1.pep
MGLPGRRHRGAMAGRALVVLLWCVSASVFLPSARAQTTTFTSAIDGKKATTFSFPTFDKSLMQLGANLTFSSNATVSQSALQVTPDSSNNPLDYLVNQAGRVFFPTPFVLWSSNSSNSTADGKYVASFSTVFRANLYRSNTTMKGEGLAFVIASTNAINPPPGSYGEYLGLTNASTDGNATNGFAAVELDSVKQPYDIDDNHVGLDINGVRSNASASLTPFGIQLAPSNTTTDDGNYFVWVDYNGTSRHVWVYMAKNDTRKPSTPVLDAPLDLSTVLRGNKGYFGFSASTGETYELNCVLMWNMTVEMLPDEGATKKKAALPGWKLGVVVGVSSCAVAVVLGLFAALYIRKRRKRIGDDPSSVFNTTIDFRSIPGVPREFDYRELRRGTNNFDEKMKLGQGGYGVVYRATVVGENGQNMEVAVKQFSGANTKGQEDFLAELSIINRLRHRNLVKLVGWCHQNGVLLLVYDYMPNGSLDTHLFGGPESEVLDWQQRYNVVAGVASALNYLHHEYDQMVIHRDIKPSNVMLDSAFNARLGDFGLARALESDKTSYTDIIGVPGTLGYIAPECFHTGRATRESDVFGFGAVILEIVCGRRISCSNPAGCSQLLEAVWKLHGAAGGGGGGGRILEAVDQRLAGEFDEAEAERLLLLGLACSHPNPGERPRTQTILQILTGAAPPPHVPPSKPAFMWPAMPVALDGDDDDETSRSSTVMNSSSSYYVSSSGWTQNYQVSKEHEVADRDVATV

SEQ ID NO: 114848 - protein, 851 aa, Oryza sativa
  Clone ID: PAT_MRT4530_1849C.1.pep
MKKRKGPAVDLKSFLEKSAAKKANRSQTPGEGNLNPIDSNLNPSCNESQMQLVIYQGHHHENESGSPASSSTIPIDPAISDMPGSNDESQSSDEDNDGGLYDIEHDPGLRTPISRYDVNDQDSVRRAYIALGPCRPKMKKDDFPQHSCGGMRRFLPKWFDEFKWLEYSVNRDAAYCFVCYLFKESNHGGDAFVNGGFRNWNMKGRFHKHCGAVNSAHCEAEEKYILFMKPKSSIHESFASNSAQVKAEYEARLLWSLKCIRYILRQGLAFRGHDESRNSENKGNFRELLQWLAGNFEEVNKVVLGNAPINCQMIDHEIQKQLIRSCAHETTKFIIEELGDECFAILADESSDAYQQEQLALCLRFVNKAGQPVERFLGLVHVEDTTSLTLKEAIKSLLMQYQLPLSKVRGQGYDGASNMKGHVNGLKKLIMEDSPSAYYVHCFAHQLQLTLVAVAKENTDCAWFFGQLAYLLNVFGMSCKKIRMLRIAQAEYMIEAFKLGEIETGQGLNQEMGLARPGDTRWGSHYKTVMHVMSLYPSIKKVLFRIGKECTGVEAIGAQTMLEVFQSFEFVFLLHLMNDIFGYTADFCQALQKREQDVVNAMDLLAFTKVELDVLREDDGWREFHGKVTSFCVKHKVKVVDMDGKYKPIQRSRKFFKDAINYHRFHADMFLGVIDRQLQELNNRFDEVNTELLRCMASFNPSKGFSAFNVESLVKLAEFYPHDFDFEEMNQLSFQLNRYISDVTKDEKFTNLKGLAELSMMLVKTERVRRYELVYRLLKLVLVLPVATAGVERVFSSMNYIKNKLRTKMGQKYLNDCLVTFIEREFFLQAKDINVCTYAQFYVIYTIYYII

SEQ ID NO: 114849 - protein, 241 aa, Oryza sativa
  unsure (1)..(241): unsure at all Xaa locations
  Clone ID: PAT_MRT4530_184C.1.pep
WPALEGGPKARAGERGRGSRWAGSTSRGPEWDPLVGGSAHRAEEARDATLGFGRGAQCTRAAGPRIASRLSVGRAHASGDGGSXLTGVGLTRXAELAPTWRLRGCHAGRREEDDDAAVNGRRTVAAAFGAKRSDAGKGKHTGRFHGTRGDEPTARICRRGLDGGGLRRQPPAARXEGNGDDATGDRFLRTRASTRLRETIPSVGLGGNTPRKAGDERRLLNSGDDGGEHTTNSGSGRGGAS

SEQ ID NO: 114850 - protein, 734 aa, Oryza sativa
  Clone ID: PAT_MRT4530_18500C.1.pep
MAVLMLVWCVSVFLLLPSATAQATTFTSNVDGKEFTTFSFPKFDKPLLQLPDNLTFSGNATIAQDGLQLTPDSGNRPEIFLVNQAGHAFFTAPFVVWESKSSSSSSNSAAAAADGKYVASFSTVFKVNLFRSNLNKTVKGEGLAFVVASSNARGPPVGSHGGFLGLTNASTDGNATNGFVAVELDTVKQRYDIDDNHVGLDVNGVRSTAAAPLAPLGIQLAPRNTTVDDGICFVWVDYNGTSRRMSVYIAKNESKPSAAVLNASLDLSTILLGKTAYFGFSASTGAATYQLNCVRMWNMTVERLHDGTTTTATKLAGTSGWKLAVGVLCGVAVVLGVVAALYIRKRRRRSGGDPSSAFNAAIDFRKIPGLPKEFDYMELRRGTNNFDEKMKLGQGGYGVVYRATVVGEDGRSTDVAVKQFSGANTKGKEDFLAELRIINCLRHRNLVKIVGWCRQNGRLLLVYDYMPNGSLDRHIFGEPGAAALDWKQRYNVVAGVASALNYLHHEYDQMVIHRDIKPSNIMLDSAFNARLGDFGLARALESDKTSYTDMAGVTGTLGYIAPECFHTGRATRESDVFGFGAVVLEIVCGRRVSCSDLPGWLSLLEWVWKLHGAAGGGGILEAVDQRLAGEFDEVEAERLLLLGLACSHPNPGERPRTQAILQILTGAAPPPHVPPSKPAFMWPAMPVALDGDDDDSETPTSRSSMLLTSSSTGWTKIFQVSKEHDVAEKDVAAE

SEQ ID NO: 114851 - protein, 54 aa, Oryza sativa
  Clone ID: PAT_MRT4530_18501C.1.pep
MMIFMITIGRPSHYGYVLVRSSVTKTILGQILMGVFLKVNNAAIIMLRRVEPYV

SEQ ID NO: 114852 - protein, 619 aa, Oryza sativa
  Clone ID: PAT_MRT4530_18502C.1.pep
MTNATVSQSALQVTPDSSNNPLDYLVNQAGRVFFPTPFVLWSSNSSASFSTVFRANLYRSNTTMKGEGLAFVIASTNAINPPPGSYGEYLGLTNASTDGNATNGFAAVELDSVKQPYDIDDNHVGLDINGVRSNASASLTPFGIQLAPSNTTTDDGNYFSRRMSVYIAKNESKPSAAVLNASLDLSTILLGKTAYFGFSASTGAATYQLNCVRMWNMTVERLHDAGTSGWKLAVGVLCGVAVVLGVVAALYIRKRRRRSGGDPSSAFNAAIDFRKIPGLPKEFDYMELRRGTNNFDEKMKLGQGGYGVVYRATVVGEDGRSTDVAVKQFSGANTKGKEDFLAELRIINCLRHRNLVKIVGWCRQNGRLLLVYDYMPNGSLDRHIFGEPGAAALDWKQRYNVVAGVASALNYLHHEYDQMVIHRDIKPSNIMLDSAFNARLGDFGLARALESDKTSYTDMAGVTGTLGYIAPECFHTGRATRESDVFGFGAVVLEIVCGRRVSCSDLPGWLSLLEWVWKLHGAAGGGGILEAVDQRLAGEFDEVEAERLLLLGLACSHPNPGERPRTQAILQILTGAAPPPHVPPSKPAFMWPAMPVALDGDDDDSETPTSRSSMLLTSS

SEQ ID NO: 114853 - protein, 341 aa, Oryza sativa
  Clone ID: PAT_MRT4530_18503C.1.pep
MAVLMLVWCVSVFLLLPSATAQATTFTSNVDGKEFTTFSFPKFDKPLLQLPDNLTFSGNATIAQDGLQLTPDSGNRPEIFLVNQAGHAFFTAPFVVWESKSSSSSSNSAAAAADGKYVASFSTVFKVNLFRSNLNKTVKGEGLAFVVASSNARGPPVGSHGEFLGLTNASTDGNATNGFAAVELDSVKQPYDIDDNHVGLDINGVRSNASASLTPFGIQLAPSNTTTDDGNYFVWVDYNGTSRHVWVYMAKNDTRKPSTPVLDAPLDLSTVLRGNKGYFGFSASTGETYELNCVLMWNMTVEMLPDEGATKKKAALPGWKLGVVVGVSSCAVAVVLGLFAA

SEQ ID NO: 114854 - protein, 60 aa, Oryza sativa
  Clone ID: PAT_MRT4530_18504C.1.pep
DCPDTQYLYVLLSGVGSTLYINVSLSSQFSLDAKLLLLKLSSSVPSLIERILCWLAKKKK

SEQ ID NO: 114855 - protein, 208 aa, Oryza sativa
  Clone ID: PAT_MRT4530_18505C.1.pep
QPRRPRTPPRASPSLAPPGSNATSLRLSSVTNRRLSRSTLPPSSMSPPFASLAVAHSSSSASASCSSSAAADAAARLSFSSSSSATSLHLPSAVSRRLSRSTLSPSSAPPLFVSPAAAHSSSSASASCSSSASSAAAHLSFSSSSSVAFLHLPSAASRRLSRSTPPPSFASPAAAHSSSSASASCSSSATRRPPTAPPPTAATLPIAA

SEQ ID NO: 114856 - protein, 68 aa, Oryza sativa
  Clone ID: PAT_MRT4530_18506C.1.pep
CRNSAQAGKCHTRLIFANDGDWATMVVSKKFDVFLMARPSCFLFLLVAQLGWHIYFSSYFMIVAQCSD

SEQ ID NO: 114857 - protein, 702 aa, Oryza sativa
  Clone ID: PAT_MRT4530_18507C.1.pep
MQRRGSLAAAAAAFRCLLLVVVAAAADDAGGAAAKPVILATVCGNTTAADQEGFDVSFVNTLELIYQNVTRSGFGAAASGEGADTVYGLGQCMGYLSPTDCQLCYAQSRVKLPHCLPATGGRIYLDGCFLRYGADNFTAAATDASDTAVCSNATVSSPASFAATSAALLRNVTAAAPGARDYYYYSASSSSSASALPSVSPRVYAAAQCWRSLNATACAACVATARDRVVGRCLPRAAEGYGLNAGCVVRYSTQPFYLPANAAAAAGSSTRHIVIVVIASVFCALAVIGIALVWAKMRNRRNDHHDDMDGSSEIIRTIAASQLSFKYEELCKATDDFNQINKLGQGGYGSVYKGVLLDGREIAVKRLFFNTREWADQFFNEVRLVSQVQHKNLVKLLGCSIEGPESLLVYEYLCNTSLDHYLFDRFRSFMVDVADAFKKTALDWERRFEIILGTAEGLSYLHNASEIRIIHRDIKASNVLLDERFRPKIADFGLARNFMEDQSHLSTGLAGTFGYMAPEYIVHGQLTEKADIYSYGVLVLEIITGRKSLNSVASSAEGHSLMSLIWKHYNEGTLMELLDPNLQEQCTEEGALKVFHVGLLCAQASPNLRPPMWKVVEMLGSRNNELPRPTQPPFINIKGSNAKSDSSGSSSLKSSSDKSPFSLNQLSVSGVQAREVKIILLMIASCEETASKINGLNNRDKE

SEQ ID NO: 114858 - protein, 99 aa, Oryza sativa
  Clone ID: PAT_MRT4530_18508C.1.pep
MALEKQPPPLTDKSSEPQTKILKLTGAEVDDGNDVPITVDKLSPEQKKEFELMMKHTQQQFMNSFTETRQGRVVQKYKLKLVADVPGTGSSKDGEVQKT

SEQ ID NO: 114859 - protein, 106 aa, Oryza sativa
  Clone ID: PAT_MRT4530_18509C.1.pep
CSKLALTGSAPGHPPIAGQLARCRPACHWALQVWPNPARHPVAAAQTAAKHSSHTAKPAGSPPLLMYMHVSCPPMGCCHAAHSAAAAELLLLLRVCPPVWLCVPSC

SEQ ID NO: 114860 - protein, 667 aa, Oryza sativa
  unsure (1)..(667): unsure at all Xaa locations
  Clone ID: PAT_MRT4530_1850C.1.pep
MAAAGDESAAAAAAAAAAGGAAAGEAAVDSKDLQQQSKALDKLTDRVEDRQLDSSRVQSPLRLRRAAGAFPPAGRAAVDSKDLQQQSKALTKLTDRVEDRQLDSFRVQSAMAALASSKEADWNAMRLREKELAAIKINPADVEIIANELERDLHRPYVEGDNSTGASTWHEASASPDQKHVALYTRRPPIGHAPVSQCTIGQRPWAMPSHVYTRGSSLPVGQIPPSRGVMAIPRRSAAAVAAVVALASVAAVAGEVFFQEKFDDGWEDRWVKSEWKKDDNRAGEWNHTSGKWYGDADDKGIQTSEDYRFYAISAKYPEFSSKDKTLVLQFSVKHEQKLDCGGGYVKLLGGDVDQKKFGGETPYSIMFGPDICGYATKKVHAILTKNGKNHLIKKDVPCKTDQLTHVYTLIIRPDAKYSILIDNTEKQTGSIYDDWNIIPPKNKRDPEAKKPEDWDDNEYIPDPEDKKPEPEDWDDEEDGEWTAPTIPNPEYXGPWNQKKLKNPNYKGKWKAPLIPNPDYKDDPYIYAFDSLNHIGIELWQVKSGTLFDNILITDDPEYAKKFAEETWAKHKDAEKAAFDEAEKXXXXXXXXXXXXXXXXXESANSKIDDSDDDASDDEDEADDDKADVVAEQTKDKGDEKPQDIKVSADEKPKSSKDDSSAAKKDEL

SEQ ID NO: 114861 - protein, 208 aa, Oryza sativa
  Clone ID: PAT_MRT4530_18510C.1.pep
RVRLHSSLNQQRQHQYGPMVDANDRYHRIPGHFSQQNFVQPGFDMNLAFCNQEKQRNEESSVDSSQWRNIFLYVLPYGSSRPLTRKLSLDASSSDSRGMEASTSMPTDNTAMAINAPKLLRVLIMGRQPMVASSTLVELTTRLDFFKERRSQLMEQLHSLDLGHGSASQGFPYNKPPSPWDSPRKGCSFSSTIVYSLVVILFPSMLII

SEQ ID NO: 114862 - protein, 97 aa, Oryza sativa
  Clone ID: PAT_MRT4530_18511C.1.pep
MEGGRGVTRVLLVDDSPVDRRVVQLLLSSSACAGSFHVIAVDSAKKAMEFLGLKEEGKEQAIDMVLTDYCMPEMTGYELLKAIKALSPLKPIPVIVM

SEQ ID NO: 114863 - protein, 104 aa, Oryza sativa
  unsure (1)..(104): unsure at all Xaa locations
  Clone ID: PAT_MRT4530_18512C.1.pep
MPIALTNRSDQQELAAFTNDSGYRERVYSLSWTSAARLIFWRHELRLHPQXCERPKHAFIVLDSGECSHGYIYGTFQGCLKICQGASGHNYDSLLRCSYSPLCM

SEQ ID NO: 114864 - protein, 164 aa, Oryza sativa
  Clone ID: PAT_MRT4530_18513C.1.pep
MESCVPPGFRFHPTDEELVGYYLRKKVASQKIDLDVIRDVDLYRIEPWDLQEHCRIGYEEQSEWYFFSYKDRKYPTGTRTNRATMTGFWKATGRDKAVRERSRLIGMRKTLVFYKGRAPNGHKTDWIVHEYRLESDENAPPQARSPFISLSINKIDLQFLEKIN

SEQ ID NO: 114865 - protein, 882 aa, Oryza sativa
  Clone ID: PAT_MRT4530_18514C.1.pep
MVTRVNWGRVEREFEGGRFVAWSMHSDFLQKINLGILGTVFIHHVEHKASTLPQRGGEVNVTLGGIDLNNSGSVVVREDKKLLTVLFPDGRDGRAFTLKAETSEDLFEWKTALEEALAQAPNAALVMGHNGIFRREKRPIKSLVVGRPILLALEDIDGSPSFLEKALRFLEKYGIKVEGILRQAADVEEVDRRLQEYEQGRTEFAPDEDSHIVGDCVKHVLRELPSSPVPASCCTALLEAFRLETKDARINAMRSAIVETFPEPNRRLLQRILKMMYTIASHTSENRMTASAVAACMAPLLLRPLLAGECEMDEVFDMDGDDSAQLLAAANAANSAQGIVTTLLEEYESIFDGEHNLRCSLSPESQIEDSGSEASTDDVNLDVKGNGFHDAENDVDQEMDDENGAERILSGKLSESSGYAGSDLYDYKVVHADDSDAERSEDAKAAEVKIELSKGPKSHSAENGSAYMETLLSEKNPSNPISSHETPLSMGEILSSLDPGISLANHSGEYSVESRQPAKINGSHPHVKRSNFWGRNNARKSQHSESVDSSGEEELAIQRLEIAKNDLQNRIAKEARGNAILQASLERRKQALHERRLALEQDVSRLQEQLQAERDLRAALEVGLSMSSSQFSSSRAMDTKTRAELEEIALAEADVARLKQKVAELHLQLNQQRQHQYGPMVDANDRYHRIPGHFSQHGPISVKSGCRNFVQPGFDMNLAFCNQEKQRNEESSVDSSQWRNIKQHVLPYGSSRPLTRKLSLDASSSDSRGMEASTSMPTDNTAMAINAPKFTEVREITATLFSTTNILQRKIVLIFIVWQGVDYGRQPMVASSTLVELTTRLDFFKERRSQLMEQLHSLDLGHGSASQGFPYNKPPSPWDSPR

SEQ ID NO: 114866 - protein, 911 aa, Oryza sativa
  Clone ID: PAT_MRT4530_18515C.1.pep
MKGGSSATAASGGGGNSLAIVERQKPATSCVASLFQMLAKKKLFSSSSKKTKLLPPVRTQKFSPGRPPAGGEKTPAAKMRTLLLDAPYYPNEVTTRLPPPGQDNKSSEMCTPGVVARLMGLSAMPATSHQKAVKTMDASELGGHRSECSYGSIYNSHQKQQKPGHIRDGRHDNGNQLDADAQPVWSRKHAAHKLASPIKSPRSVSSRNKVRLIEAAVKVLEPGLQSRHHHQARRQARLEYRCNSSDVQSAAEAMHDFSDQFAREMCDVDASRSGAQNVGATSLHNSTSNQWSEEDTMRNVSVRRPNQNISCQAQSEGNHKGQRNGFKDSGQRTSDDVLVSSQGVQKIQPKNISRENVDCRPLKQNNLKQNALPETYRAADTGHMVQRQKHRAKEQNVANTANDFVCSNRGMNNSASLRSKGKVKDKIGMPHGSAENRNLSTKCHRTSGLHGDCSNKQISKTATLKATEKDMIIAKGAGLVSEKPKSTSPNSVRNDSRRKVESRIASRGNNSGIISISSNSPRKAVLALLNGHTKGSDSVVLGSPTGSCPKRDYRRDCQNISSERELVLSEALQGISSLESAESVCFNRNELRNREILDDRVMSSLFRKTSAINVMEESPSDEFLWQCNFLDSLTFGFREVPRSGKLRETHKKHEVTTNASDPSYYADDECFSGSLLKTAASEAGFRDRRRSENCTMQQDGTNKRNSRCSETNFGQDSSNLIHPGEVAATVELLLTNVRRSTSTTPPRTSKAPFKAFLVKTFESALTTVTTTSSTKKKKKKKNGFSFNAGVVKATEGEKSRSPLGSLAFDSVMECLDSLFTQFCDSGYRSFSRVPLICPEERLAAQVDREIARCSGMAGKEVDELIASDVQHSGVEIGVDVLHEAFEIGAQIERDLLQELVAEIGMDMLRRL

SEQ ID NO: 114867 - protein, 115 aa, Oryza sativa
  Clone ID: PAT_MRT4530_18516C.1.pep
SGLTEHCMNDGGHHVALFAGVGQDNALEPIVAPEIVADHHHQDHRTSQVAQIVWARDLLYMADNNVCPCHPAKQCMRHSAEATQGTLSCSTHHKLSQRSTATAYVSRGQRGERPN

SEQ ID NO: 114868 - protein, 216 aa, Oryza sativa
  Clone ID: PAT_MRT4530_18517C.1.pep
MKEGSDSSSGVSSGSGTAMASPRAFQRRWAPADEISLLEAAASHRQRHGGMPSPGDLAAALRGRLLTEDHHLDARAVSRQLASLRRRYAAAWRRLSSRGVVPVKDHDLRIYRLSKSLWEGSRGCGARKPIARHEARELGELEALYPCLSAEVEAVEASRLCAVPGVFRRSFRRIGDEKAAELEAKAKRLRLAELKVGVRLDMLRKEVAETILELID

SEQ ID NO: 114869 - protein, 191 aa, Oryza sativa
  Clone ID: PAT_MRT4530_18518C.1.pep
MVKHVRTRVICAIKLIRINRQPSILMQQLSLVCTVLVNEWHDAYLVSRLTQPLKCKPEEKFALHGTNAASNSLGRHTLGQATRQLPPWTESDSFQRKVGHYLSTTFKTQSSNPMAREMCAGVEGTDCTKALEGVHEVSHNRRNGEEKKEKRKPNISFDGFISGQLDQFHIVVERQLRHVERHGSLNNGWKR

SEQ ID NO: 114870 - protein, 260 aa, Oryza sativa
  Clone ID: PAT_MRT4530_18519C.1.pep
MATMDTTIAHIMDEQHDIKFKSSKCWNPIRPPAILLISNGRRICIRPLFLAREYLMESSRSPLSNGSCLIARFQVIWPQSYKQGAASPILGLWACNFVWDPGPRIRLICIGKINIPRRGVSIAKAQHNVSYGCSRIVNVFSKNRSYQYSPKDQANNSLECREELRVEYVERGNRQPLAVVYLNARREDRVHSSLRDLEVQKTEVFFGEGPAELQAGSANQTGISLVRLEFEEEDAAKKNKMGLNTKEGFAQMNEDRNVKN

SEQ ID NO: 114871 - protein, 387 aa, Oryza sativa
  Clone ID: PAT_MRT4530_1851C.1.pep
MDVTGDGGGGGQRPNFPLQLLGKKEEQTCSTSQTAGAGGGGVVGANGSAAAAPPKRTSTKDRHTKVDGRGRRIRMPAICAARVFQLTRELGHKTDGETIEWLLQQAEPAVIAATGTGTIPANFTSLNISLRSSGSSLSIPSHLRLAGLAGPRFGGGARAADAWDRVVGLGFGGAADAPSSATSSSSSPLLLSFHSGSVGLDVSPPSASTSPAAADLSRKRRWEQEMQQQQQYQQQMAGYTQSQIPAGTVWMVPSSNAQAAGGGAPPGGGGESIWTFPQSGSGGGGGAATVYRGVPSGLHFMNFPATPMALLPGGQQLGLAGAGGGGEGHPGILAALNAYRAQAAQPDAGAAAQNGAQGSSQHRQHQHHGGGGGGGDERHESMSASDS

SEQ ID NO: 114872 - protein, 111 aa, Oryza sativa
  Clone ID: PAT_MRT4530_18520C.1.pep
GSASARSNGVFLGKSKSTGRCLVVSYIGRLRRPRGPPDLAVGGDIELNDLHRRQADPAVSSASSSFANDLHFCDLGGGCSFIPWYISLLLARTRTLFVLGMNKMIVPAAIV

SEQ ID NO: 114873 - protein, 822 aa, Oryza sativa
  Clone ID: PAT_MRT4530_18521C.1.pep
TRPVRLNKTPRHLDDLRLPSPPRRAAPSSSSSSHPAEHSPAASVSCASAAAGRGRGAAVGVGRGRAVMEDLGIEAKEAAVREVAKLLPLPELLSSIASIKSDYLARQQTNDAQLSTMVAEQVEQAHAGINALALSQETINKLRENFIDIDKLCQECQTLIENHDKIKLLSNARNNLNTTLKDVGGMMSISVEAAAARDSLSDDKELIRTYERLTALDGKRRFALAAAASHKEEVGRLREYFEDVDRSWETFEKALWGHVTNFFRLSKDSPQTLVRAIRVVEMQEILDQQVAEEAAEAEGAGAMATIANQRRTANRKGGGATSTPRSTQDKSKVQGKGYKDKCYEYIRKAVEARFDKLLTELVFSEDLMEALEEAKAIGDELGDIYDYVAPCFPPRYEIFQLMVNLYTERFIQMLRLLSDRANDIPNINILKVTGWVVKYQENLIGLGVDESLAQVCSESGALDPLMNMYVERMQATTKKWYSNILEADKTQPPKSTEDGKLYTPAAVDLFRILTEQVQIVTENSTDVMLYRIALAVIQVMLDFQAAERQRLEEPASDVGLESLCALINNNLRCYELSSELSSSTLEALPQNYAEQVNFEDTCKGFLEVAKEAVLQTVSVIFEDPGVQDLLVKVYQKDWMEGMVTEYLVATFADYFGDVKQYIEERSFRRFVEACLEQTIVVYVDHLLTQKGHIKEETIERMRLDEEVLMDFFREHINVTKVETRVRILADLRELASAESLDSFTLIYTNILEHQPDCPPEVVEKLVGMREGIPRKEAKEVVQECKEIYENSLVDGNPQKSGFVFGKLKCLTARKGIWSKLGQ

SEQ ID NO: 114874 - protein, 297 aa, Oryza sativa
  Clone ID: PAT_MRT4530_18522C.1.pep
MEEEGEGLCEIARLPEELLSAAISRASPRDACHAAAVSPAFRAAADSDAVWASFLPRNLPDLADGELSPAPASKKELFLRLSDGPYLLSDRLMSMWLDRETGAKCYMLSARSLVIIWGDTPHYWRWIPLTDSRFAEGAELIDVCWLEIRGRIHSKMLSPNSTYAAYMVFKIADEFYGLDAPFQEASVSLGGRGSTKIVCVQSYDSEDEEVPENYWPMSIGPLLRRRARRRDRRLVLDEGVTVPQKRTDEWMELEMGEFINEEGEDGEVCFSLMETKGGNWKRGLIVQGIEIRLKKSG

SEQ ID NO: 114875 - protein, 676 aa, Oryza sativa
  unsure (1)..(676): unsure at all Xaa locations
  Clone ID: PAT_MRT4530_18523C.1.pep
MAATNTAMSLVLCLLVMIICSTHRLLHPQPQLAATAASSSSSPFSSRSKIGKDIIDKTVSFTLYQQETMNRTGYVVVPGVDAPAPARVVVSDAGEPSADRQPFGSMYVFRDNLTVRADSSSRVAGVAEGTSISTSFDCEDGRRSVSVAKITLHHRGYRGSVSILGGTPNITRPSVYPVVGGTGDFLYAVGYVRSSPVDTPATRRRDLSNPTHFLSVGARRASCPQIRRPPQVKALARAPLLPMRACREGWDQGNGIGDTRQNHIYFRHLSATRELEEIEEEHFRLPPPHKVNPRAVKRRGPRKAPKVIDQYLDESSAVHALFFPDERSAVNPTKGGNDSMYFYPGRVWLDTDGHAIQAHGGGILYDHITAKYYWYGENKDGLTYQTHPKSTYRVDIIGVSCYSSKDLWSWTNEGIVLPGEPTNFTHDLHKSKVLERPKVIYNDHTGQYVMWMHIDDANYTKASVGVAVSNSPTGPFTYLYSFRPHGFESRDMTIFKDDDGSAYLFYSSRDNTELHVSPLTKDYLNITVAMRRILIRRHREAPAVFKLQGTYYMITSGCSGWAPNRALAHAAESIMGPWETLGNPCVGGNRFFRLTTFLSQSTFVLPLPGLPGNGAYLKVGRVIPEXLPYAHEVHTKITDDRCNHGTDIEFWIPGMSRVSIYWHRKWRLPESWKGYT

SEQ ID NO: 114876 - protein, 140 aa, Oryza sativa
  Clone ID: PAT_MRT4530_18524C.1.pep
MPVTREIIAGAGAGSAAAAAAVLALLVAAAGGDELAAAVGSSSSIMPPCFHACFDQCVQREEYWFCQFSCYRRCGAGAIAIAIAAGRFSGTGDCEHACALSMCGQIDPGSKMMAVCRDTCGKSYAAAGCRRRPTSLTAAV

SEQ ID NO: 114877 - protein, 145 aa, Oryza sativa
  Clone ID: PAT_MRT4530_18525C.1.pep
MARGCAASGGGMPTMARGCVANGGGRQVRHVEVSGGVEAGEVQPVSMGGWPAGGVGAVESMRWQRADNDDASGVIFPLVGIVELSTSSGWAVGWCWLTLDACPLAVENPVVFSFRENFDQAKIGLARPMVAFAAQIDRAAANRQR

SEQ ID NO: 114878 - protein, 38 aa, Oryza sativa
  Clone ID: PAT_MRT4530_18526C.1.pep
QSGLGTPMIVMNRTSMLQIVEIQLIRIVSSLVRLKAHL

SEQ ID NO: 114879 - protein, 175 aa, Oryza sativa
  unsure (1)..(175): unsure at all Xaa locations
  Clone ID: PAT_MRT4530_18527C.1.pep
MATCEYNALAICCRTDDKSRARTMHNDSTAINHFDRVNDNNAGPMLTSTLHIDLRWIGNCDRAAHARNPRNVADQRYFPLARHLXSPRDRSIEARGCYKSGSGARQTSPRPPSICCGRSKKNIHYCSYESSQQDIIYKDDVCGEGEVAYHGGDAFDGLRPSALEYVDIAGVPGVS

SEQ ID NO: 114880 - protein, 72 aa, Oryza sativa
  unsure (1)..(72): unsure at all Xaa locations
  Clone ID: PAT_MRT4530_18528C.1.pep
SASQTHFPSFRQSTVYAGYLVHALREHGYQGTTRVERQXIIGAIDXKGDLPCSRSSRSFTNLRENPRSAKIR

SEQ ID NO: 114881 - protein, 76 aa, Oryza sativa
  Clone ID: PAT_MRT4530_18529C.1.pep
GPGFDSPWERIFQNLTAIVLSVVGDVPVDSEAHMWICRPSPIYQGGFARPVFEDAHRGRVCVRVFIGVILKKKKKK

SEQ ID NO: 114882 - protein, 324 aa, Oryza sativa
  Clone ID: PAT_MRT4530_1852C.1.pep
MASPQAPPLPLSSLQESRSARIRIPRDEPRPTPPARSSSREEPRFVAETKLITVHSCAGRLGDAREVFDGMGRRDLLAWSAMIGAYAIRGMYSDVLALAVTMVEEGVLPDRFLITRILQACAYAEDLELGRALHSMAIRRGFMGRVKDVPVGNSVLVMYAKCGDLGWARKVFDKMVCRDLGTWNSMIFGYCRFGDLDVAMELLGQMEESGVAPDVVTWTSLVSGFVHMDRSDEALRCFIRMRLAGVEPNGMSIACAISACASLKLLNQAKELHSHAIKVGSVNNVLSGNSLVDMYAKCGEIVAAWRIFSGIPDKDIFSWNSMIS

SEQ ID NO: 114883 - protein, 190 aa, Oryza sativa
  Clone ID: PAT_MRT4530_18530C.1.pep
MALLAVVVVAAAAFSTASGASYGVGKPNGGWDLQTNYTSWASSITFRLDDKLVFKYSAAAHDVVEVTKDGYLSCSASSPIAVHRTGEDAVELGRLGRRYFICGVPGHCDAGMKLEVRTLCSIPSPPPPGSDGDGNGTPGGICIDGSSPPTIISTPGVVSYGSAPGSSGSATTALAIMAAATVMLLSLIIV

SEQ ID NO: 114884 - protein, 112 aa, Oryza sativa
  Clone ID: PAT_MRT4530_18531C.1.pep
RLHPRPHPAATAGAVLPPPLYSYPRRRCRPSPPSSPSLTTLNPPPPSPSSPRRNLRFKTMSATTRGEEACPSTTNPSCTTTTKSKKTTRRRRRPSPPTPVTSSSSPAPATPY

SEQ ID NO: 114885 - protein, 173 aa, Oryza sativa
  unsure (1)..(173): unsure at all Xaa locations
  Clone ID: PAT_MRT4530_18532C.1.pep
RPSPLQCLSGRGNCLLRRRPTVTMAVDLRVSIAHQTSFALRLAAVLSSPAHPAGGAGRNVAFSPLSLHVALSLVAAGAGGATRDQLASALGGPGSAEGLHAFAEQLVQLVLADASGAGGPRVAFADGVFVDASLSLKKTFSDVAVGKYKAETHSVDFQXKAAESASQVNSWVE

SEQ ID NO: 114886 - protein, 108 aa, Oryza sativa
  Clone ID: PAT_MRT4530_18533C.1.pep
PLPSMLPPLFCPGRGLFGGFGFCPLSGCFPVGLPFAPPGFGGGGARSWSLLALSFLCPPVSIPAGMGSVPDIVSLPHGCCPFLVCFFLVGPFFVRFFSGFFFRLIIDR

SEQ ID NO: 114887 - protein, 65 aa, Oryza sativa
  Clone ID: PAT_MRT4530_18534C.1.pep
ERNRGVRDVNCHALLNFISILLKKIGSDLSVALDPLRGGRMCKQDDKTASRYLQFLALNQGDYHR

SEQ ID NO: 114888 - protein, 117 aa, Oryza sativa
  Clone ID: PAT_MRT4530_18535C.1.pep
GGGWRQRRRDARGGTGLGAMGRAAQARRRRADARQGAGDGDAQQRDGAGLGAATRRAGDAARGSARLGMGLGATATGDDGARRGSGDGDGARRLAAMGQCAATATRRRRRRGARGRL

SEQ ID NO: 114889 - protein, 115 aa, Oryza sativa
  Clone ID: PAT_MRT4530_18536C.1.pep
MWIGTSAVLSKLASQPGNHHAENSGSYFILEECGGVCHAAQAMIYAYEKEATLEETGNTANKEQQQVEVTNLSPIPAGESMILELEAAPIKISTKFAGSAIAEINAQGHMKEISI

SEQ ID NO: 114890 - protein, 849 aa, Oryza sativa
  Clone ID: PAT_MRT4530_18537C.1.pep
MENTINGEHIVQIRGVQAEGKMAAPEKRLNRFVHLVAMTERLGNALGAMAFTWATVVLLGGYPDNLDSTDFWLATAIVFLEAIRMFTNDNRLDYQLFFGTRGDFRLLGWNGLLVVMVYLSVVPVLLSKKLLPWRQLVLNMCMLAAIVMLVFIFSDELTYQLMIIVYEVSALLFLSSGNFQIPAAVVRVVLALTQLLNGNDGENDNEQNLKTSLDIFYGMVLGQGILYIVACLVEAFSFIPRRYLIHRGGFGGQMGVEYANSYYAYAFEKCMGGAVLAPKKISLITFAMDSLNSDSSRKKLYGAQMLHKFLKKEQLRTKTITKLTNDTRTVVSLFDMLDWKSDGDEQIRLFAAKITAELAGSLRVVQIPGATQLVASLVLDTDHQQTTRDHFLFIDSQVGREDSPIQQVGMGQQNSPVLKYLKQVARYCLIPVDEPSNRRQQNSSMLRWWKRITKRWSIPEEEPSRDQDFLPVQGLLILERLANFDPGNCMEISRTIGLISKMIDFTSYRNHMTSTNEAHQIMLASLSLRVLRRLASTEGKLGVTLRQQILEHPFVLSNLSEILNDSGSNHEQKQLAAEILKNLAMDRNTSKDIEHIRVIISSLMCRFLSRDPSSSTNCNHLLRKTAGQALAMLAMESKDNCLVMLMEPGYAFIRELTATIHNDRYKCITASLLWSMCEHAQCKLSNSDLKGLSDILRLVLEGIMHTKGAELEVLIGLSSQICKCIPEDFARELEKGQIKERFVKRLVDELNAHMRPSPYCPSIRRVIVQHAIYLMEFNPRYANDFHKCWMVEALSKVESTPSRVENYRLLSGDMGLMEHSTAVSTLVARAKKLMGRDSREWARSISSAT

SEQ ID NO: 114891 - protein, 104 aa, Oryza sativa
  Clone ID: PAT_MRT4530_18538C.1.pep
MGMKFRVVCRKLYDYVRYDLKEIAFPSSLPDPPHIKKRPKLTLKDKWCILKEATRLYGASWVRDIGPDLRPNDYKKVKEEPDIKTEEGSSEPTTVEDLLGALKG

SEQ ID NO: 114892 - protein, 1620 aa, Oryza sativa
  unsure (1)..(1620): unsure at all Xaa locations
  Clone ID: PAT_MRT4530_18539C.1.pep
MAQGDDATEQQPYWEYTLRKYLLLLASLVATVAYGAGFSPPGGAWQVTAGGHTAGDPIIRDLYYGRYLVFFYCNATAFASSLLVIVLILLFAVLHEKRNMWVTVMPLRVVMVLDLLSLMGAYTAGTCRDATTTRYTAVLVAAVFVYLVVQMVLASLAGGDDEDEHVVTKERSRKVLLLLATFATSLTYVAGLSTPGGFWADGVAGHRAGEAVMGERHPARLTAFLLCNTTAFVASLLIIVLLLDRKLRDGTVRSWELYGCIVVALVGLVGAYAAGSSRAEHTTVYVLALVGAVLVYIAFHLTVVPCVKQALGNTKLARIYSSISKRRYCPKQDQEVDQATIDREAEHNRAMEKARSLVLLLATLAATVTFQAALDPPGGYWQDDNGDHKAGNPILLTTNPRRYKAFFYCNSTAFVSSLLAIILVQSRSLLKRHALEAAMILDLFGLMGAYAAGSCRDASTSIYVMAIAGAVLVYVVIHVVFFTLDQRGHDEDVLLEKRRKRLLLFAILSATITYQAGLTPPSGFWQDDSDGHRAGEPVLFSNNPYRFKAFFYCNTTSFMSSIALIILLVNPNLYRPAIQSYALSVCMVAGMFGLMGAYAAGSSQHMRTSIFVFALVLIFVAILLVVFVVRQNHGNTTTRQNSQGDQNQRGDNSGSENHTKRKXPDATGDPGSERHLPGRPAPAGRRVAERRRRRRPRGRQPGPPRQPEAXGTAPSSTATPLPSWRPSXVIVLLLPESASPHVNEWLLKAMNTTIVLDMIGLLVAYGAGSSREWETSGYVIAMAVVVLGYIAVHGVLSTFGQGHKAGEYQLKNHLLLLATLVATVTYAAGLNLPGGFWQDTQEDHLAGDPILPGNHKEQYIMFYYCNATAFAASLVVCLLLLVLDKENSGCAAALRVVMLFDLLGLMGAYAAGSCRDEFTTIYSSVIMSMVFAYIVPSLFTYAVSKLKKKDKNHGKQNKDSGEPKDTEKQTWYPDEHKREELHEVLMLLATFAVTITYVAGLNPPGGFWGSTQDGHRVSNPVLQDINSRRYKAFFVCNTTAFVASLLIIMLLLDKRVNTEQMSLQFGELYGSIVVVLFGLVGAYAAGSCRDTDDTVYVICLIAAILAYIFLQVAVTQFLKKRIKNDGHTERSISSVKSLIRNEDGSRNTKRNIAMEKARSLVMLLATLAASITYQAGLDPPGGLWPDDRDGHKGGDPILLTTNPARYKVFFYSNSVAFVTSLVAIIMVQSKHVLKNHTLEAAMLLDLFALITAYAAGSCRDVSTSIYVVALAGGVLVYVVIHIIFFTLDNMDNEYHDPDEEDKKREVLLLLAILVATLTYQAGLTPPGGFWSEDDNLGHHHRAGYPILLENYPPQYEAFFYCNATSFMASIALIMLLVNPNLYRPGIKCYALYVCMVAGMFGLMGAYAAGSSRRLRTSIYVLTLVGAVFALVALQVAMFWNKRTSKTGGNMTNSSAQEGGSTDTEASQPAPLIKGMGSTSQATQITDITDAALRNTDKGEGSSEQGGSRINSVTSEPGAHGTGNGASLQEANSEEDKSGSTEKDMREYLMLLGVLAASVTYQAGLKPPGGLWQENGNGHLAGHYILHDINKRRLTGDLPAVRPAAAAAVIGAASSFGGQTG

SEQ ID NO: 114893 - protein, 1072 aa, Oryza sativa
  unsure (1)..(1072): unsure at all Xaa locations
  Clone ID: PAT_MRT4530_1853C.1.pep
MMVVKLYHHHLDYLEAIIEKLKLLSINMTSNNTVEETPKDLGALVPLEGKVKKRGSRAEVKIDPVTNLMWNLLMALDKCEGVEGIDEDKERLLEEERRMFRGRIDSFIAHMHLVQGDRRFSPWKGSIVDSVVDVFLTQNVSDHLSRXMRTSILFGIRLILCNFACSCFNYIFFCSLKNFSSAFMALAARFPVKSEGPEKPAAVEKSTPTPPKQKDSCSGVLGESAKLQGNFFVEEIGDLGSFNTVDDGSLEGVLSSQNSVVSPRNFSKYLLNGTYTMGSSSSLVKFTQEVGSSGCHQVSVLPTSDLNKAAPFDLDTTYQICTGLDHGVNISDVAQSEVSLYQQHPIDASINKNKAKVTDYSSGSFLYDNRDGSLSQHMYSSFPFQPSQEAECSATVKQSFFQQFISSEEVPISTGHSFYDNSFTSNRTEDPYVEQQDCFNNLQEAYTTRTIQINSERSQPECSQQQDNDIRVQAKTCEKHSSSNLCGNMNSHSDVPLGIASGSIGKSKHTEKRPKARNVRGRTKMKHYDWDNLRKEVLHNHGNRQRSDKAKDTIDWEAVCQANVNEISFVIKEXGMNNMLAERIKDFLNRLVRDHGSIDLEWLRDIEPDKAKGFLLSIRGLGLKSTECVRLLTLHQMAFPVDTNVARICVRLGWVPLQPLPESLQLHLLELYPLLEHIQKYIWPRLCKLDQLILYELHYQMITFGKVFCSKSKPNCNSCPMRAECKHFASAFASARLALPGPSKKTSKPEYPNDAESSHKKYTHSRPMGQLSWNTNHPGHVYGDQXQPIIEEPSTPEPEPDIAEAREAEIEDFFSEDPDEIPIINLNVEEFAQNLKSYIHANNIEIEDADMSNALVAISPQAASVPTSKLKNVNRLRTEHQVYELPDSHPLLEGFDQREPDDPSPYLLSIWTPGETAQSTDAPKTFCNSKETGKLCESSTCFSCNSTREMQSQKVRGTLLIPCRTAMRGSFPLNGTYFQVNEVFADHYSSKNPFDVPRSWIWNLPRRTVYFGTSVPTIFRGLSTEEIQHCFWRGFVCVRGFDRELRAPRPLYARLHFPASKASRGKKDEGGW

SEQ ID NO: 114894 - protein, 565 aa, Oryza sativa
  Clone ID: PAT_MRT4530_18540C.1.pep
MAMASSCSPLVAVLVALLLVAATVPAPCAAVDPVNTYCARNLSGAPAQASVAQVLSELVPRASAGYYATATAGRGGDGSAIWGLAQCRGDIPAPDCALCASAAARQLAGACRGRADARVWYDYCFARYDDADFVGLPDTGYALILLNTQNATDPEAFEKAQRKVMARVAADAGDAGGGGLARETARFKDGVTIYGLGWCTRDITAADCGLCVAQAVAEMPNYCRFRRGCRVLYSSCMARYETYPFFFPLDGGQSADASASAAGDYDRVGSSPAPLPPPLPSAWSAAPNDGDDGQYISDLTSPHAAFSYLPLRRLAPADSGSESGLASTPPLPDRRRVSHFISSHLPTPPSVVCWWHAGSVPLATDRTPRRLGWQKKWMGVALVNLLSDHTKERGTAVPMGMKFRVVCRKLYDYVRYDLKEIAFPSSLPDPPHIKKRPKLTLKDKWCILKEATRLYGASWVRDIGPDLRPNDYKKVKEEPDIKTEEGSSEPTTVEDLLGALKGGAEKAKPALQRMYMARASNYTDALKNYVESYKEGLKEHLEEEAMGKGHRQGNDATKPPQSPSS

SEQ ID NO: 114895 - protein, 87 aa, Oryza sativa
  unsure (1)..(87): unsure at all Xaa locations
  Clone ID: PAT_MRT4530_18541C.1.pep
LVSVNAPFFIKGWAKSSPENKHVKFLPDGLGTYTKALGFELTLLEKGLGICLRRFAFLVANLKVFVANIXEGGQFPIFGVEEILKAL

SEQ ID NO: 114896 - protein, 240 aa, Oryza sativa
  Clone ID: PAT_MRT4530_18542C.1.pep
MQRRCPPLLLALILLFSAAVTVGVAAGDLIAIPTALDGSRTSRRRPIDDPQFTVTLWEEEEIKTRPIASRNLEDGSGVSYVVPMAFIEKLRRRCAGDDGGQVPTGGSHRRCDATAIRQLEEEMAPCLLEQFKENMEIMRTMNDVFTWRFEHPYFMAVEQRLVTPHHHVPCRHFVEHMVGVTQPLPPPPAVSPRVATTDATDARRRHGHQSGHAPPPTPAVTPCAACRHRHHLARATATTT

SEQ ID NO: 114897 - protein, 53 aa, Oryza sativa
  Clone ID: PAT_MRT4530_18543C.1.pep
MDSPRQLPSYHPITGIKARLLLAGMLVEDLKMDRQEDLCFPMLGTLLPKTKDS

SEQ ID NO: 114898 - protein, 89 aa, Oryza sativa
  unsure (1)..(89): unsure at all Xaa locations
  Clone ID: PAT_MRT4530_18544C.1.pep
MASEGVLLGMGNPLLNILAVVDDSFLTKYDVKLNNACLAXENPLPLCGAQPSQGDDLSIACGASQNFLNHAHWERHAPGATSDIPQLGK

SEQ ID NO: 114899 - protein, 37 aa, Oryza sativa
  Clone ID: PAT_MRT4530_18545C.1.pep
KLFFFRINSLYFVMHPIKKPTLKLPCHLYIHTKKGCF

SEQ ID NO: 114900 - protein, 365 aa, Oryza sativa
  Clone ID: PAT_MRT4530_18546C.1.pep
MWWRAARARRRIAGARAASTSAAAAGEKSCRAVVVPRFGGPEVLEVRQGVPVPDLKPGDVLVRARAVSINPLDLRMRSGYGRSIFEPVLPLIIGRDISGEVAATGTSVSSFTIGQEVFGALHPTAIRGTYTDYAILSQDELTSKPSTLSHVEASAIPFAALTAWRALHGTARISEGQRVLVIGGGGAVGLAAVQLAVAAGCSVSATCGTKSIEQVLAAGAEKAIDYTAEDTESAVKGKFDAVLDTIGVPETERIGINVLRRGGHYMTLQGEAAALADRYGLAVGLPAATAVLLKKPHASRYSHGIDYWWTYMRADSEGLHEIQRLSGAGKLQIPVEKTFPISKVREAHEAKEKRLVPGKVVLEFD

SEQ ID NO: 114901 - protein, 716 aa, Oryza sativa
  Clone ID: PAT_MRT4530_18547C.1.pep
MHACNSRSSRVLRVVLDEVGEAWSSTTALGTARRRRSFSDERHRLDSLQELPCMYVSHVKDVLGNLCVHGIDLELTGERGTNDGAQRLDLEKNSLISLLGAQILGILEGIWRGPRGEDVGATARPDSLHSSRGSYEVVAAALRARSGAPVGMMAFPMIRCTREGEVKSQFTAKLDDGSFVHVPHKYEEWVVDYRQCTLEVLVKDFAARINWGRCQRVVVCGYDTFTDNMDLVHAFYVRKSQRRLVLFVDVVDKPVQLVTSSSVSEINETVMDEVVTARQVFYDRNDPPIEVGSSYVALNKFLHACSSTGRVKIKMATYKWVAEKAIPFLKKDSNMDVKPYLETYHNLLWMRSKFSEDIKCDFIINNLAESWNKWIKEKKDLPIAELADGIRSKTMDLLARRRKIGHKLDEIWATYQAEVTVITPEQDIIRHAVNLTEHTFTCREWQVFGKPCPHALALIKSHRNPRMADYLDPFYSVQKYKLAHTGVIQPFPGVGRQRKNRIVGCLEKGQSKPRTEGKWQVTGNIAKSCQQLINVFTVKKLIHAFRSPLYNNLQKCMLQIHAFRGADGAHPNSKMLLETAHPVPALGVGGGAPVFLLGVAAGWWRSGVPMPVALGGGGNGGVDLGQRGRWRTLVAAARRRGGGGDELGWRPGRWRTLAAGWWGGAARRCGGGVEQRGGGGATAAGWWRHWWLVALGAQPGGRIDRFDPERDFSLWI

SEQ ID NO: 114902 - protein, 92 aa, Oryza sativa
  Clone ID: PAT_MRT4530_18549C.1.pep
YRAPPRVFFFFFFFFFFFFFSKNNKNIAYQATNYGSFNPFITSLRTDNISPNQPDYFQVDCFFLRKLNQRFITGSTRSSREREHQTASTSAN

SEQ ID NO: 114903 - protein, 993 aa, Oryza sativa
  unsure (1)..(993): unsure at all Xaa locations
  Clone ID: PAT_MRT4530_1854C.1.pep
MIGAYAIRGMYSDVLALAVTMVEEGVLPDRFLITRILQACAYAEDLELGRALHSMAIRRGFMGRVKDVPVGNSVLVMYAKCGDLGWARKVFDKMVCRDLGTWNSMIFGYCRSAEWEEARHLLDSMRQEGTQPGVVTWNTLISSYARFGDLDVAMELLGQMEESGVAPDVVTWTSLVSGFVHMDRSDEALRCFIRMRLAGVEPNGMSIACAISACASLKLLNQAKELHSHAIKVGSVNNVLSGNSLVDMYAKCGEIVAAWRIFSGIPDKDIFSWNSMISGYAQAGYCGKAYELFCKMENYGVRRNVITWNTMISGYIRNGDDERAFELFQMMESHGVKRDTATWNILIAGSVHNGYYDRAIRIFRQMQALLRRPDYITILSIIPAFTNLVASWKVREIHACIFHHNLELDGKIANALINAYSKSGNLASACAVFDMHSSRNIISWNCIILAHVLHGSPNEALDLFCQMKQEGVVPDHTTLVTVIKAYGLTGKVSEGSQTFFNMANDYNIXSGTLFDNILITDDPEYAKKLAEETWAKHKDXIPNSTVWDTFLTAAVMHGNVRLAHLAARELSAIDPGDPRVQRLGSSLQDLTGKTVDVPEEMTPNKGRNLDEVESCSIEIRNKVYVFSNGDNVGLEDTVAELKSMMFKMGHSMLDIGIGTLDVEEEKEEVVGVHFYVYWVKYLAKCPFAGLHAANLLNRISLAIKLIHQVDLRVGSHREYYHIEDGQTTLSKGTEVQKHEHGNVTLRVIDLNGKNEILQVVPIYTLLEQIRIILVDFNSTINIRDNGWEDRWVKSEWKKEDNTVGEWNHTAGKWNGDTNNKGIQTSEDYRFYAISAEYPEFSNKDKTLVLQFSVKHEQKLDCGGGYVKLLGGDVDQKKFGGETPYSIMFGPDICGYATKKVHAILTKGVFEEKEIEKIGKPKNGNNHLIKKDVPCETDQLTHVYTLIIRPDAKYSILIDNTEKRTGSIYGDCDNLPPKKKKDPEAKKVDVMGKD

SEQ ID NO: 114904 - protein, 526 aa, Oryza sativa
  unsure (1)..(526): unsure at all Xaa locations
  Clone ID: PAT_MRT4530_18550C.1.pep
MHACNSRSSRVLRVVLDEVGEAWSSTTALGTARRRRSFSDERHRLDSLQELPCMYVSHVKDVLGNLCVHGIDLELTGERGTNDGAQRLDLEKNSLISLLGAQILGILEGIWRGPRGEDVGATARPDSLHSSRGSYEVVAAALRARSGAPVGMMAFPMIRCTREGEVKSQFTAKLDDGSFVHVPHKYEEWVVDYRQCTLEVLVKDFAARINWGRCQRVVVCGYDTFTDNMDLVHAFYVRKSQRRLVLFVDVVDKPVQLVTSSSVSEINETVMDEVVTARQVFYDRNDPPIEVGSSYVALNKFLHACSSTGRVKIKMATYKWVAEKAIPFLKKDSNMVCQGRHKALEKIFGSWEESFAYLFNFKAEVELKMPGSVVEIDVPENNDGFIFIXFFCAFKSCIDVFENMYPAXRYDYYMNKIHEANSDVKPYLETYHNLLWMRSKFSEDIKCDFIINNLAESWNKWIKEKKDLPIAELADGIRSKTMDLLARRRKIGHKLDGVMLPIVIQQLNVMTRNLGHLPGRGDSDHS

SEQ ID NO: 114905 - protein, 883 aa, Oryza sativa
  Clone ID: PAT_MRT4530_18551C.1.pep
MAAPVESTVQAARSSVVPNEVSTGIDPDAEFRVCVQFSQYIAKLDDGSFVHVPRKYEEWVVDYRECTLERLVKDFAAKINWGRCQQVVVCGYDTGTGEETKFTDNMDLVHAFFVRKSERRLVLFVDVVDKPVQLVTSSSVSEINGTVMDEVVTARHADATDCNSQHAIDWESLEIAPIPTEQVQQHVIDWDGVEITPIAETQIGSSMPVMDEDEMYAFVGLRAEDERAEQARLEAEKQLDSAPSPAAGHAQGNLDNEADIGVSDVVPGESEVFYDRNDPPMITGSSYLSMVEFRSAVRQHAIKGQFELGTESSDKERFRGFCKAEGCPWAIVARVKTKMATYKWVAEKAIPFLKKDSNMGLTKLKEELETTYNVTIGYHTVCQGRQKALEKIFGSWDESFTYLFNFKAEVELKMPGSVVEIDVLENEDGVYFHQFFCAFKPCIDGFINGCRPYLSIDSIALNGAWNGHLASATSIDGHNWMFPVAFGFFQSETTDNWTWFMQQLHKAIGDQSPLAISSDAFFGNMYHAARSFMPDRYDYYMNKIHEANSDVKPYLEIYHKLLWMRSKFSEGIKCDFVTNNLAESWNKWIKEKKDLPIVELADGIRSKTMDLLASRRRIGNKLDGVMLPVVIQQLNTMTRTLGHLRVVQGNRDQAKVTEITPEHDIIRHAVNLTEHTCTFREWQVSGKPCPHALALIISHRNPRMADYLDPFYSVEKFKLAYADVIQPFLDKSQWPKVNIGFKLLPPLTKKGVGRQRKNRIVVCLEKGQSKPRTKGKWQVQCKRCLAMGHRPSSSKCPLNGTKKKRKSRAKQGRPVGSTSGAAGPSTPKRQKVVRSDSTCTSPGPITRRQMALINAGEQGSSQMATPLRPPRAAKKITPKKGKK

SEQ ID NO: 114906 - protein, 106 aa, Oryza sativa
  Clone ID: PAT_MRT4530_18552C.1.pep
SFCNFPLLFFFFSGLFLKFMGGITPKKGHKPSTTMIVPLTNFNTPLTRLHSKIKKGVNFVRPKDHLVHFTPKHNPPQTLYLTNVKTTNKKPLREGLHNHGLLCQSN

SEQ ID NO: 114907 - protein, 42 aa, Oryza sativa
  Clone ID: PAT_MRT4530_18553C.1.pep
VATTPSQPTPQTQQRITRFGRIMLGGFGDMLPGKAKGSDEPS

SEQ ID NO: 114908 - protein, 166 aa, Oryza sativa
  Clone ID: PAT_MRT4530_18554C.1.pep
NRYEKNEKGVHRLQFRVAHCYFTLQLFCFCFFLFLLLLVILREKLISRVFIYYQFLIEERWRERRTASTSSSPSSSRPSASSSSSDAGMSSGSACCSPSSATSPASSTPSTPSPSNSSLVTTSSTKSSRDGLQTASSIFSIAVCLLEFGNDICIQNSVLSAPILVI

SEQ ID NO: 114909 - protein, 298 aa, Oryza sativa
  unsure (1)..(298): unsure at all Xaa locations
  Clone ID: PAT_MRT4530_18555C.1.pep
TSGSPGCRHLASATSIDGHNWMFPVAFGFFQSETTDNWTWFMQQLHKAIGDQSPLAISSDACKGLENAVKYVFSAAEHREXFWHLMQNFIKKFHGPVFGNMYHAARSFMPDRYDYYMNKIHEANSDVKPYLEIYHKLLWMRSKFSEGIKCDFVTNNLAESWNKWIKDQKDLPIVELADGIRSKTMDLLASRRRIGNKLDGVMLPVVIQQLNTMTRTLGHLRVVQGNRDQAKVTXITPEHDIIRHAVNLTEHTCTFREWQVSGKPCPHALALIISHRNPXMADYFGSPSIQWESFKLCI

SEQ ID NO: 114910 - protein, 41 aa, Oryza sativa
  Clone ID: PAT_MRT4530_18556C.1.pep
RLGSQASERSLIQRRSTAQEKRSEHMPPPETAGTWTWARNS

SEQ ID NO: 114911 - protein, 73 aa, Oryza sativa
  unsure (1)..(73): unsure at all Xaa locations
  Clone ID: PAT_MRT4530_18557C.1.pep
HASAHASAHASAHASATRPAGTANCIDILIAIILPPLGVFLKFGCGHEFWICLLLTFLGYIXGIIYAIYAITK

SEQ ID NO: 114912 - protein, 69 aa, Oryza sativa
  unsure (1)..(69): unsure at all Xaa locations
  Clone ID: PAT_MRT4530_18558C.1.pep
QELEHSGLNFGCIYHFQIPTSTRQSSLYHFQIPTSTRQSRRYVESLAVNLLLSCELAXLLCISIYDLFY

SEQ ID NO: 114913 - protein, 184 aa, Oryza sativa
  Clone ID: PAT_MRT4530_18559C.1.pep
MHQLRGAVHVDLDAGDYISTTSKITVEVVLEMIDFQMMNRVCCFVGTDQTGQWLPVARCLGRVFAVMDQESAWWRFPMGIRTLSMSLREVIKLSSTLRVLRFVFHRVWRSNRRLNGGPTGDKRRSDRRHTGGQTGGGDSKRQLISAVRPEIESRSDRRQPGGQTGASTSVRPRSIDFEGNFYFR

SEQ ID NO: 114914 - protein, 442 aa, Oryza sativa
  Clone ID: PAT_MRT4530_1855C.1.pep
MAIPRRSAAAVAAVVALASVAAVAGEVFFQEKFDDGWEDRWVKSEWKKDDNRAGEWNHTSGKWYGDADDKGIQTSEDYRFYAISAKYPEFSSKDKTLVLQFSVKHEQKLDCGGGYVKLLGGDVDQKKFGGETPYSIMFGPDICGYATKKVHAILTKNGKNHLIKKDVPCKTDQLTHVYTLIIRPDAKYSILIDNTEKQTGSIYDDWNIIPPKNKRDPEAKKPEDWDDNEYIPDPEDKKPEGYDDIPKEITDPEATKPEDWDDEEDGEWTAPTIPNPEYKGPWNQKKLKNPNYKGKWKAPLIPNPDYKDDPYIYAFDSLNHIGIELWQVKSGTLFDNILITDDPEYAKKFAEETWAKHKDAEKAAFDEAEKKRLEEESANSKIDDSDDDASDDEDEADDDKADVVAEQTKDKGDEKPQDIKVSADEKPKSSKDDSSAAKKDEL

SEQ ID NO: 114915 - protein, 271 aa, Oryza sativa
  unsure (1)..(271): unsure at all Xaa locations
  Clone ID: PAT_MRT4530_18560C.1.pep
MGSLTTNIVLAVAVVAALVGGGSCGPPKVPPGPNITTNYNAPWLPARATWYGQPYGSGSTDNGGACGIKNVNLPPYNGMISCGNVPIFKDGRGCGSCYEVKCEQPAACSKQPVTVFITDMNYEPISAYHFDFSGKAFGAMACPGKETELRKAGIIDMQFRRVRCKYPGGQKVTFHVEKGSNPNYLAVLVKFVADDGXDVIQMDLQEAGLPAWRPMKLSWGAIWRMDTXATPLKAPFSIRVTTESGKSLIAKDVIPVNWMPDAIYVSNVQFY

SEQ ID NO: 114916 - protein, 70 aa, Oryza sativa
  Clone ID: PAT_MRT4530_18561C.1.pep
SYIARRAGRVKGRRGGTKKGRHLGYSKTPILHVDQLTWRYTELHSMFDLVLNILINEMVKTLLRKKEPPR

SEQ ID NO: 114917 - protein, 65 aa, Oryza sativa
  Clone ID: PAT_MRT4530_18562C.1.pep
RGVGLELNRHHGRRLNRWLAWVARRHFDNPWLILAWLAAAVLLLCTLVQTVFAVMSYRPSAKLNS

SEQ ID NO: 114918 - protein, 62 aa, Oryza sativa
  Clone ID: PAT_MRT4530_18563C.1.pep
FLATLLHCKQHACMPSFSAAFCFTWGIMWFVCVSECVLVHLILVINFNIIVATCNEKKKKKK

SEQ ID NO: 114919 - protein, 325 aa, Oryza sativa
  Clone ID: PAT_MRT4530_18564C.1.pep
MHILLHRHNTSSGGHRRRRCRIVDDGALQQRAAVVVYELPAAAADVTVCKVEGGQLMLPSTFPYFILVALEVGGLFRGLLLLLLYSLYPVLLLLGHGRATKLMVMVSFADVRKEDGSSSFRVGSAVMPKLFLEDVSAEVLDRGGGAAGIEIRDGRYDIWAQGPLGSRRPFRLPLRSSRRSSVPPLFGNLAGVPTLAGAAVAARRRGGNDLRRWIWRRRPREGRIRRPRKELGSRRRAAGTVTACSGGSGGAVAEAEDSGAPETEGPSGRPAARRWRSRGGGPAWMGSVEVAARLAAWLTLWRLLSSGGKVLGEEEKAAENIYIKD

SEQ ID NO: 114920 - protein, 93 aa, Oryza sativa
  Clone ID: PAT_MRT4530_18565C.1.pep
RRPAAARSFILVALEVGGLFRGLLLLLLYSLYPVLLLLGHGRATKLMVMVSFADVRKEDGSSSFRVGSAVMPKLFLEDVSAEVFEVFKSRRNC

SEQ ID NO: 114921 - protein, 239 aa, Oryza sativa
  Clone ID: PAT_MRT4530_18566C.1.pep
MAAAGPSPWRRSLFGVGEVAFAGVGTLVRGGDEVSQLGGGRSGIAIAGSGKPSDFRRWRRLLRREARGRWRQRAHGGAWAESARAWRRPALAAGAGSRGRQGRGRLGSPTPPLLPGGAWPVKAGAGGNRRLRWSARRSGHQMKSSSRHRLVAFEPLHHSPLSRLLRKPAAPAAASPPARSGGVEGSSPPASPPLPPLLKPAGCHHLPFLSHPARRRSRIRPPRPPPTPLAPPTADPTRR

SEQ ID NO: 114922 - protein, 211 aa, Oryza sativa
  unsure (1)..(211): unsure at all Xaa locations
  Clone ID: PAT_MRT4530_18567C.1.pep
LPRRRHRPPPFAHHPQPPRISPPLPPPPPLLSPLLRPPPLRQSRRRPNSSGSGGGSKEARRQRXRRWIWRRRPREGRIRRPRKELGSRRRAAGTVTACSGGSGGAVAEAEDSGAPETEGPSGRPAARRWRKPRRQAGVDGVGGGGGDLVRQREGVNARGFRQGSQCEGVQARLAAWLAPRRLLSSGGKVLGEEEKAAKNMYIKVYPPYSLP

SEQ ID NO: 114923 - protein, 73 aa, Oryza sativa
  Clone ID: PAT_MRT4530_18568C.1.pep
MAVAARAPLGVVAVVAVLVVGIFMPAAAQAPAPAPVSDGTSIDLGIAYILMLVALVLTYLIHPLDASSPYKLF

SEQ ID NO: 114924 - protein, 45 aa, Oryza sativa
  Clone ID: PAT_MRT4530_18569C.1.pep
RCDPLTSIILTFPLPEKLSLKKRKVCDPGIRARNAEAVHLGVPPP

SEQ ID NO: 114925 - protein, 127 aa, Oryza sativa
  Clone ID: PAT_MRT4530_1856C.1.pep
WASSSTCCPLSSRRSAPRRRRRRRRCRSSRRWCCAARRRRRRACCGRRRCARRRRGSRRGQPPRGGRRTLALAAAATAAGGAAAGGRRRRRRSSPCRTISPRCSSHGGRCRAGRRWTARRSACTSWA

SEQ ID NO: 114926 - protein, 132 aa, Oryza sativa
  Clone ID: PAT_MRT4530_18570C.1.pep
MGKADADAEFKAAGKRKKAGGAGKPKRGLTPFFAFLAEFRPQYMEKHPNTKGVAAVTKAAGEKWRAMSDEEKAQYGGKKPDGESKPAAASKKKESTSSKKAKTDGAEQEGEGSDKSKSDVEDDENDGSGEDE

SEQ ID NO: 114927 - protein, 162 aa, Oryza sativa
  unsure (1)..(162): unsure at all Xaa locations
  Clone ID: PAT_MRT4530_18571C.1.pep
RPGLSTSSTSPNPLHSTAASPAARRLIPSPQPQLLQQGGMAVGGEEEKPFNFLQILCEGVIAGGTAGVVVETALYPIDTIKTRLQAARGGSQIQWKGLYSGLAGNIAGVLPASAVFVGIYEPTKRKLLETFPENLSAVAHFTAGXAIGGIAASLIRALTEVV

SEQ ID NO: 114928 - protein, 242 aa, Oryza sativa
  Clone ID: PAT_MRT4530_18572C.1.pep
MAERGSRGFSAASKGKAIASKKGSLRQNSSANIPHVNIDSDSDSEGFVEELPRVNSKTNGKAASESLKTGGKASSKGQTGKGGNAGKGGKGSASARVSAKSDAELKLELDMPPNSCILMNCEVAELLQEIHEHMAILSEDPKIKIPESFDKAFQYVKEGNQFSTAQSVKQQANWFFSSLTSIRSPLRKYGVSDGEMCLIANVGPETIEEVYALVPSLKATRSLNESPIMEALTALADIKAAK

SEQ ID NO: 114929 - protein, 292 aa, Oryza sativa
  Clone ID: PAT_MRT4530_18573C.1.pep
RLRRGVEEGRRGRRLTGKERRGQEGRWDERRRRWLPSRGEERGGHRRGEAAEEGEIEDDGAADVAAVWWGGAAGDRGGRAGATRATAPCREQVEPRLHRRLAMTMAMSSISGRRPAACMSWRRCPASFGTLAMPSCESGGRRSGVERWRQAGESAAAASGRARGTPAKPRVTLPASDGVVAARATFSTHTHRSEWAAAVKPPPSAVAKLILRSPSSSKLHQVTSYLDSRPRAAIADRTRGIGRPASSRYPKPARRHPGAAVAGRTTLWPRAPPPVREQRAKGRREIEKERGC

SEQ ID NO: 114930 - protein, 67 aa, Oryza sativa
  Clone ID: PAT_MRT4530_18574C.1.pep
LVLFEQNSLGSGVVDPFNALMPAVRGLSALRLRPCGALLQMRVAFSWRPPIILALETVFHWIKKKKQ

SEQ ID NO: 114931 - protein, 280 aa, Oryza sativa
  unsure (1)..(280): unsure at all Xaa locations
  Clone ID: PAT_MRT4530_18575C.1.pep
MPSRSRTRGGDGDGDGDGLPAGDLKPGVIRNLPTFSRLLINKWPPVFRQRFSYPFRLTHFACYEVRITRLEKQGTDPSPPNIFSTPRIIVPVLTRNGLFGCAPSLKRVRGILPNLMNISAPATVAVWLGFPYHLSWLSIFKQGSSLCSWEPELYSRITGRVHQKLSVADVLANNRWIRDLRGSLGVQAILQYLQVWSMVRSMILSEGQPDSFIWRWENSGSYSTRSAXLALLSGRIPFQHLPIWRSLTPPRCRYLLWLIAHRRCWTIDCLEKRGLPHPTC

SEQ ID NO: 114932 - protein, 128 aa, Oryza sativa
  unsure (1)..(128): unsure at all Xaa locations
  Clone ID: PAT_MRT4530_18576C.1.pep
GAEGRRRQCRGRVGAEGRPAGPTRSPAHQPLRIVGAGPASPHRPPHIHPPPRYCRGARGRVRASRGELGRDGEAGDDNDAVAARLAEHEAGGGAGPRXPTGLAQRPPPLLSASLRRPRRWPPLLPPLP

SEQ ID NO: 114933 - protein, 387 aa, Oryza sativa
  Clone ID: PAT_MRT4530_18577C.1.pep
MAAAAAANGKRRPRKAAAEAVDGQEEACRGGGGAAEAAKGKKRPRKAAAAEEGGRGGGGGGRFFCCYLLRSLCPRRKGSTYIGFTVNPRRRIRQHNGEIRCGAWQTKRGRPWEMVLCIYGFPTNVAALQFEWAWQHPTESLAVRKAAASFKSLGGVGSKTAVCSLEDLQYCTDGVSSEEDNNVDEPPPKKNHQEPDDAHAPARDELSVSEHAEARGLDESSEHDEWMGQEDDPLFEAQPLEHETRTAASAVTVTASRLPRPSRAKGLHRPPSGQAAQQRTAPGQHHRQHHGVGHTAGAGHAPEPSPSPPLPTSEPPPPPPGSAARRRHSPPGRPHALLPRKRRRAATSRGAPLLRQIYARMAGSGIGDSGSDASHTTLASPIAGHGA

SEQ ID NO: 114934 - protein, 129 aa, Oryza sativa
  Clone ID: PAT_MRT4530_18578C.1.pep
MVQAMRANTRGARGSSALTLPCGDHCLGARTLPPRDSCAIAIQRRRKRGAACGPGRYVWAPRELAHARHRERTGGKCGVGVAVAARGWDVVALLGGATLAAATRGSSLAVTASLAVAGAGCLCVHEVVD

SEQ ID NO: 114935 - protein, 327 aa, Oryza sativa
  Clone ID: PAT_MRT4530_18579C.1.pep
MLPSPPQLPGVTTAPSPPVSTVSMPPTSSALLPSPPPTPLTCSRVVVAAATAATSPAAGPPLPPRPGAGLPRARAIYTLTPAPAPAVVSSARGSTFAKSTLTFPQIKTHLLLLLLRPPLAVARAAMAGRRLALLLLAVASVSLLAASPAAAARPCHTFFVSFAANPNPIVGDGEVGDHRGAALATATVITVFRVRRLGPHLAHVHGHGHAHPNLHHLHSIPANVQIRRPELPEHPRPAAHAADSFQERAKDILVVVVGILFGVGCGALTAASMYLVWSVLAGAGAAAPSPYDELYGDEDEEASDSESPKKVGYVIIPGVEAHDGGMN

SEQ ID NO: 114936 - protein, 405 aa, Oryza sativa
  Clone ID: PAT_MRT4530_1857C.1.pep
MDFSGGSGGGGVASGRVQAERWLEIAGKLLAARDLVGCKRFAERAVEADPLLPGADELLAVTDVLLASQSVLPSGQADPLAVLQLPPSTNPADHAAVSRAYRRLALLLRQDTNPHPGADVALSLVHDAYAILSDPNRRPPPPVAVAVPHAHPGAASHPAAPAAAESPEFWTACPFCSYVHQYQRELVGRALKCPNESCRKGFVAIEISTPPTIVPGTEMYHCAWGFFPLGYPTSADLNGNWKPFYKMFPWNNAPAGGAGSGGRGGYGGRGGGSAGRQPQNGSARGGSSRGRVKKTTARKKVGAGLKRRSFGGVESGIEPMDGQDGWGEGEEGGDGQAEEVRGININEEAQSTDGATRGHVHARGNVSGGVVDMGTFHLDVDPSEDILGNLQNLPFLRVDNLGRML

SEQ ID NO: 114937 - protein, 732 aa, Oryza sativa
  Clone ID: PAT_MRT4530_18580C.1.pep
MGSHSFSYVLVALCLLGVAAEATQLAPAVFVFGDSTVDVGNNNYLNITKQARANYPKHGVDFTGSTPTGRFSNGYNLADQLAQQLGFPMSPPAYLSLTAKTIVSQMYKGINFASGGSGLGDKTGQGAGDVIPMFQQVQYFSKVVAMMQKLSGSRTTNTLLSKSIFLISTGSNDMFEYSLSGGNGDDREFLLGFAAAYSGPRRLSEDGTRGCYGPINTLSLRSYPTLAASLRDLADELPSMAYSLSDSFAMVSFIFANPRTNAWSFTELESGCCGSGPFGALGCDETAPLCNNRDDHLFWDANHPTQAASAIAAQTLFTGNRTFVSPVNVRELALLGDDAGSGEQGGGDDDNAGAGEGIGGGEGEEAASATVSDLRTALRSSFTLALVSPDFHLFLKGTKLMADARAAAKTSTPRSQRTQRRRRRRSPAMDVQFGDVNGNRVGLDLGIMVSAAVVDLDGARVELTNGRMVNAWIDYSPTLSSPSKPSPRTTAPSPPPEAPVSSAVPPPVSLNPMLPSPPQLPGVTTAPSPPVSTVSMPPTSSALLPSLQPIHLAPLAAAAAAAAATSSAAGPPLPPRLAGPPPLPPPGGERWGGSPPAGRAGGGGGAGDWAPCVYFECGCGVDGDVGTGPAGMRGAVWCMVCWAGVCVGGCAEWSWVDGLCAPRRLAGRAGGRSVEWAPGPCGGWVCHVVGRGRFSVAGAGPVHLWRREVVTAGRLCRAVGGGVIAGLQESWA

SEQ ID NO: 114938 - protein, 591 aa, Oryza sativa
  Clone ID: PAT_MRT4530_18581C.1.pep
MACRPVVCSASALTPLRHRLLPLVCVARCSPSSARLAGNPAAATTSLCRRCDHIVLLLAMNSMSYNKLSITNDRMDFNTRGNAVPNGKLDRNQSGVSANRSSASKPTARSKKKPDQADKTTPNPAQNSASSATRSEAATVTTTTKSPAISVDRSSIARSNSLDSFSYGQAKRHTGGDSRWDAVRSASSVDCPLGLVHFRLLKRLGYGDIGSVYLVELRDTDAFFAMKVMDKESLISRNKLVRAQTEREILGLLDHPFLPTLYTHFETDKFYCLVMEYCSGGNLHSLRQRQLNKHFNEQAARFYASEVLLALEYLHMLGIVYRDLKPENVLVRDDGHIMLSDFDLSLRCSVCPMLVKSSSVHAGANGVVKGLAAGGGGDGEGVGVGCMQPSAFLPRILPKRSRKTSKSDLGLLHGSPLEFNAEPTDARSMSFVGTHEYLAPEIIRGEGHGSAVDWWTFGVFLYELLHGMTPFKGSSNRATLCNVVEQPLRFPDGGAFPAPAAASGVARDLIRGLLVKDPGKRIASRRGATEIKQHPFFEGVNWALVRSAHPPSVPDPVDFSQFGVREKPAAAPTKVAKPAASDSSSGDFEYF

SEQ ID NO: 114939 - protein, 67 aa, Oryza sativa
  Clone ID: PAT_MRT4530_18582C.1.pep
GAKKNFFLPGTRDRALRVLSGKNKTPTGGSNPKAPHFQFFEPAKKGRGLIQNGKQTKAQSTKERAGF

SEQ ID NO: 114940 - protein, 114 aa, Oryza sativa
  unsure (1)..(114): unsure at all Xaa locations
  Clone ID: PAT_MRT4530_18583C.1.pep
LXXIKERRTXRPEARSTARAAAXKESKARKAEAEKAKKAEKAKVAGRQGPSPVRLTSKQGAKGAQQKVAANTSLRNPGFVKQIPQYPFSERTFFTASSFLMNPGNDGLRKANIA

SEQ ID NO: 114941 - protein, 68 aa, Oryza sativa
  Clone ID: PAT_MRT4530_18584C.1.pep
LSLLERLVIFDVHNKSSFFFCHLHNAIIIYNMFISWGSLCLPGASKLVGVSTVILTLEIMCYVLCTFS

SEQ ID NO: 114942 - protein, 248 aa, Oryza sativa
  Clone ID: PAT_MRT4530_18585C.1.pep
MEERPRDRTVEEAAAFSGDESDGEFEFPFVSRETDAGGVADELFADGRIRAFYPVFGRVLDDVAVTPAAAAAEERRPPLGRLFLEEGRTSSVGSTSSSSSSTDIAELDGVSPDSYCVWVPGSSPASSPSRPPRKSGSTGSIARWRRISELVVGRSHSDGKEKFRFLSAPSSPARDHPKPKPTTKGGAAAATKLHTELDTIAAGHRLSYSPNHKAHGGATRRTFLPYRQDLMGIFANVNGLSRTHHRPF

SEQ ID NO: 114943 - protein, 54 aa, Oryza sativa
  unsure (1)..(54): unsure at all Xaa locations
  Clone ID: PAT_MRT4530_18586C.1.pep
LALLLIRKHVLLRASFVQVWRKLQLYVILCIIVXFLSSVTSRNQNLLGIAIRVC

SEQ ID NO: 114944 - protein, 53 aa, Oryza sativa
  unsure (1)..(53): unsure at all Xaa locations
  Clone ID: PAT_MRT4530_18587C.1.pep
XXGGFFFWWAXLLXLLAFIXIDLKCSQYLTKVVFPFIICTNMLLMACCMLYWF

SEQ ID NO: 114945 - protein, 34 aa, Oryza sativa
  Clone ID: PAT_MRT4530_18588C.1.pep
LINMVAPAVSFFQREPSSRSSYSSRASPSHLCSF

SEQ ID NO: 114946 - protein, 105 aa, Oryza sativa
  unsure (1)..(105): unsure at all Xaa locations
  Clone ID: PAT_MRT4530_18589C.1.pep
GTFTAHRNVEACYTQATGNPTYLSEQELAECAHAYRNFXGIGGLPXXAVEYIKYNCGLDTEQAYPYTGVNGICHNKPVNFGVKGLDSANITLGAEDELKNAAGLV

SEQ ID NO: 114947 - protein, 147 aa, Oryza sativa
  Clone ID: PAT_MRT4530_1858C.1.pep
MSPLALRLFFAKQFFKILLPVPPILIVVKPWRVNRQLRVCSEVKSSIKLHAAKSGKMLIPQLQSPKQQMQRQCLHQQVQAQMQAGIRIRAKVSLFSKSKHLQPQTVRHQVFSRLAQLSHHQSQRQQVLPIVVMVYKVDDTEVGPEAC

SEQ ID NO: 114948 - protein, 278 aa, Oryza sativa
  Clone ID: PAT_MRT4530_18590C.1.pep
MEFGWALRRPMRLPDSPRHERGLPAALRGVAVKPEVASGMAIPMDPSGTYHCRPIPAGYSKVEVELVEAAYEDLELDYPGENGKILLGYLYQTLNNASAKIVVGSIVNAGEPWWLLQTWLNLVVMKTVNRPSVTEAEFPRLKPITDDDEEERTYHRCMSYGEYASTPADAGAKLSAELLKDWFCSFYEGFQKDARVWFFYEDSSLLENPSDFRFEDINHKRYQKSSIENIELARFRSKNFDRWWGYQSRKPGTFSVDPTKAECGTSDHTVLRKEPSED

SEQ ID NO: 114949 - protein, 331 aa, Oryza sativa
  unsure (1)..(331): unsure at all Xaa locations
  Clone ID: PAT_MRT4530_18591C.1.pep
RRSQRRGRGGGGQRSRRHGWQRGXRVPGGVAGDEVGDGARDGDRQGRRRGGRAAAARSRLSRXLASASSARGHGASAAQAEAVAAAAGSVPSASDGRRCADVELAGRWLMLAEDAGESLAVPLAGSTTAALVGVISLLGGIVMAFFHIPHXSPDENLVPAFRRATAALHVVSSLGASLRRSSNASTTVDGLFRFKSFHTLCSVRPLSSWVHFVGCRSCFSLWRLSCLQCRCSCEVLGNDNTSSAMWELLYRFCVXLGGDILLLGSAVVVSLIVAGSPVPRRAPPIATAGDIIINVARPLCPVASEREPPLHSRNKRRAGRGGAHSRERFRQ

SEQ ID NO: 114950 - protein, 104 aa, Oryza sativa
  Clone ID: PAT_MRT4530_18592C.1.pep
MEGVRGLPPRETLSLIHHGLSDGWLRLDIAVCAAHSLRESESSIINRRDMNSVWSWWLTRPRSRSICSATREHTVHLLPLFDPMNRRGERFGKQLVAAMERRRM

SEQ ID NO: 114951 - protein, 396 aa, Oryza sativa
  unsure (1)..(396): unsure at all Xaa locations
  Clone ID: PAT_MRT4530_18593C.1.pep
AIDSASRLDVSAAAAPLSLRPPRRHSLCLRSASAVAPRGRRRGQRRDRRERAAAARPPRRRPCLSPSRAPSPTSPCRQPPPHQCCPPLLLVALHRSPPSPAAPRXASQPPPSPATPPGTRPPPLPAVPPRAXPPPPRPRLCERRRPQPPAAPPRSLRAPHPLLSPPTAVSXPDPAGAAPDPPPPRRDESPPPRPSRRRRAAPSPPSPPPPSRGHPPPPPMHRRVPSPDPLPGASDPPRPCRRRPPEPPTXRAPLRPPAXGRALPVLLAPPPPSPTCFTPMMPATNPRQGQTYLLTKRYTAPPXPGPERPRRSPAVERGVGPRVQPRRRAQERVADXRPSAAGGSSPRTPASRSRPPAPPPPPARPRRRRSCRCHCCRWWRRRWWSGGRGGAASRMR

SEQ ID NO: 114952 - protein, 78 aa, Oryza sativa
  Clone ID: PAT_MRT4530_18594C.1.pep
CAHPTRSPSSPTTPPAPPPPATAMAATTSPPPGPRRRGRRRGCRPSRGGCTPTTTWCTPPPPPRTTPTSSGATRRPAT

SEQ ID NO: 114953 - protein, 135 aa, Oryza sativa
  Clone ID: PAT_MRT4530_18595C.1.pep
WRSARRIPNPAPARADAGNCSAISAPIPNSLADLPRRCRLAAVYIAAHSVVIESVLGQESRRRRCPPRRSVPHRHRSPLPARPPPTPRRKPFCRQVSADAFHAELLLAATDPCCQVAVDAFRTELLLAAPPRRRR

SEQ ID NO: 114954 - protein, 714 aa, Oryza sativa
  Clone ID: PAT_MRT4530_18596C.1.pep
MSYRRWRQARQASRRFDRSIYIGQTDVHQAVRPAHTFRSDRNPSNLREYIKFQMKPGEALDDYLSRFNKILSDLRSVDSSYDANYPQSEISHHFLNGFDMSIWEMKVTYIQESVNMSTLTLDSLYTKLKTHEMNILAPMKNVRNRKRGEPNRCPKLGRGKKEDDVRVKEDDVDKKKNMKEKEKKKHCMQWLIQEIIKAFDESEDEDESKDDDNEEKLSYDQLEYAAYKFAKKLQTCSIVLDEKDHTIEILNAEIARLKSLIPNDDNCQSCEVLFSEINALRDVNSVNCNKLEFEIEKSKKLESSFALGFALHARVVDELIMTKNVLILMLIILDILLLFWVLLGEQYFEGLFVSIIAYLEIIVEEVLEIINFQVMKTGGIRAVQPAVVTGALPYATDIKHCNFSAKEQLQNLFGGIKPSHVKKEGLRVALARTARGQNPSCPRRHPRPPSPPRHRLSSLPESRAVSREGGGGAKRTSKTLPQRGRTERRATVGGSSGRRRQGRGGSGAPGSGSGEGTRRCAGGSGGWPREGGGGDGGDGAAHRLWLGRGGGDSSRRGGGGSGTAPAGSGQRRQSDGRGADAAREGARRGGRRLWTPVLAVARPRRWRPALAEARLAAGQAAFPEVWPATAEAGPRARGIRRRRRAVQRDEEQRRIALVRLLWLEDGGDGDATRRPTRVAWLRRRQRSIQMYIQIDLIQGWACNDGPVITRRLIL

SEQ ID NO: 114955 - protein, 68 aa, Oryza sativa
  Clone ID: PAT_MRT4530_18597C.1.pep
SAASLDACIAGRPSFFFFFFFFFFFLLQSLFFFIFYTMHNAGIFLFKEHMTTMGRVGNGKIRKSNSHI

SEQ ID NO: 114956 - protein, 104 aa, Oryza sativa
  Clone ID: PAT_MRT4530_18598C.1.pep
LIRKDKQDSYIAGEYNVTSTSRRRIDLKWIFQQWMNWGTTRPSKVGWGWGCIVNTGRNKRDSAMKGKLDDPTGTREEVDLEMRSAGLGDTQSLPLHGTTLNVQK

SEQ ID NO: 114957 - protein, 115 aa, Oryza sativa
  Clone ID: PAT_MRT4530_18599C.1.pep
MAGSISGGSEYDNCSGVSDVEEGRCGATSCVSGGGEDGRAAATAHAFVLQQAQHPYDAKEIQSADAAMVAELTKLSDHNWRFAKDPVDTAKSVVVGSAVLAEHADEQHNCRPGKK

SEQ ID NO: 114958 - protein, 101 aa, Oryza sativa
  Clone ID: PAT_MRT4530_1859C.1.pep
LARDYGTRRLTSNEGSCPGHHRDYLLGLFLLLFLLVQPDVSSQHHMSVATVWGSNHAETLLGGSFQITPCGTLLSTQWLGVTHGNTVPPQGQTSTHHFLGS

SEQ ID NO: 114959 - protein, 82 aa, Oryza sativa
  Clone ID: PAT_MRT4530_185C.1.pep
MAHVLSSAQGQASRPAQKSALGRATGDTEIGQRGREQWRLLWRFLESSGAAGDLALDCEPRRAIRRTAIGPSWHPCYGPSSS

SEQ ID NO: 114960 - protein, 135 aa, Oryza sativa
  Clone ID: PAT_MRT4530_18600C.1.pep
MASRRITLELAAVVVVVAAAVAGSLPATTASATAYRVGDDSGWDNGVDYDAWAHGKRFKVGDTLDVEFLYAEGAHNVVVVEDEGSFEACVAPANAPTLSSGDDTVALNQAGRWLFICSFDGHCQSGMKLAVAVTH

SEQ ID NO: 114961 - protein, 118 aa, Oryza sativa
  unsure (1)..(118): unsure at all Xaa locations
  Clone ID: PAT_MRT4530_18602C.1.pep
RGRVGSWHVNAHILAYFAQSHARAQVDRLLXRRFXNADPRPVQQLIIAQHYRVIEESXHERCQYISFKSTALFMVSLLAGKSSIFRSVPGVVIDIACRVSRYRALTFKNDNREELVAF

SEQ ID NO: 114962 - protein, 77 aa, Oryza sativa
  Clone ID: PAT_MRT4530_18603C.1.pep
PYYLATKRHCTVNTPLMMGAHVRALRTGAPQAMANTTLTPWCRGLRPNRRTQRPRTCAESTGLAQSCATAERPPSPS

SEQ ID NO: 114963 - protein, 33 aa, Oryza sativa
  Clone ID: PAT_MRT4530_18604C.1.pep
LSVKISKFLTPSRLWSEFLGVTTGPGKKQYRGC

SEQ ID NO: 114964 - protein, 717 aa, Oryza sativa
  Clone ID: PAT_MRT4530_18605C.1.pep
MMPGFGTSSSMGSASHPARIEYNTSSNVSSQYIYEQGLYYPATNGYAYYAGFEPPVEWSDHTNFVGVDGQNLQLSNENLPYVYCTPGYGFSYYSPDQYTYMPGMVMGVDGSFVGSQQYFASPYQLPGSPSGFFPMSIQPTTDFSSTVSAEPPLLSTGTGTSAVASRLANTSMKNKYQMSGNTAPASQTAPSGSPAVGRPQQAYENESTNKPSNPPDANMSRRDKSSTSLVTVPVDASSTDKDGKSDEGNQSKEHVQSIQVTSGPMSGESGQGKATSNSTLEKIMIHPDQYNKVHFPVDHPDAKFFVIKSYSEDDVHKSIKYNVWSSTPNGNKRLDAAYSDVQGRALGKCPIFLFFSVNASGQFCGVAEMVGPVDFHKDMDFWQQDKWSGSFPVKWHLVKDVPNSTFRHIILENNENKPVTNSRDTQEIPFKSGTNMLKLFKDGPLTTSILDDFSFYEGRQKAMLEEKCRCSGRNFDVRMYVPAFIAKSSVVAVGEPSEVGKGQFSSKDLHSGDVEQDNGACEQPDKLNQMKDILATEALKTDGGAFVGQLEHAKTNQGSLDARVDHQSEHCSCSNPPENGERKPDSLSELVKLNGKSQRDSEAQPGINLSEPNYSSVKKGLPEEFCGQNPSNFMKEGGAGTVEDRKSTKFVTKSQGFPSSRVNKEAKGNGNEMARITTTGVVKVGSVHIKFSELDIEVAIGYRHFALFFGYITSNRS

SEQ ID NO: 114965 - protein, 201 aa, Oryza sativa
  Clone ID: PAT_MRT4530_18606C.1.pep
PRVRPLVRPRVRCEQPDKLNQMKDILATEALKTDGGAFVGQLEHAKTNQGSLDARVDHQSEHCSCSNPPENGERKPDSLSELVKLNGKSQRDSEAQPGINLSEPNYSSVKKGLPEEFCGQNPSNFMKEGGAGTVEDRKSTKFVTKSQGFPSSRVNKEAKGNGNEMARITTTGVVKVGSVHIKVNVAGEPSSKIIGDENGLP

SEQ ID NO: 114966 - protein, 263 aa, Oryza sativa
  unsure (1)..(263): unsure at all Xaa locations
  Clone ID: PAT_MRT4530_18607C.1.pep
RSGWVDGGGDGRGWVDAGGDGDGGDVGRGAGSRRTGGGSGPPAADLATRLPDRASSWRGQQSSRRRGGGSKASSGAGAPVAAAGWRRQPPAGAPGGGAVGGGGRRRRTQYRQRPRQLSAGXLGVAEWWSAGDVCWRQRRRCGRGSWRRRLLAAWWWRATAQRRFAVAVARVGGSGDGGRDCGGGGDVGSGEVVGCEVRMATARWLSVRQQRLRGARSMAAEVGSAREARAAEMEAGLAREARPVXGGRLGAEKHGRRWRRRPR

SEQ ID NO: 114967 - protein, 42 aa, Oryza sativa
  Clone ID: PAT_MRT4530_18608C.1.pep
ISIYILLKSLPPTYLRCIMTRQTAMFKMAWYPYLIVELSLSA

SEQ ID NO: 114968 - protein, 648 aa, Oryza sativa
  Clone ID: PAT_MRT4530_18609C.1.pep
MSTPEAEAEGEGGCILFSKYIDDGILTPLLSSLQVIGDAKSFRGAESSSDLAQLDSIRDMMRELQAIFVKMGENERRIVHLFDPIEELVDDVLNSLAAGGEISTLQPKLAGVGVQIGIIREAISGSYKIKIQEEPSPDRGRDVEDSASAPTMAGIRRCVRDGEQMAHLRRAVHGMDEQLRHCLLCLAAFPEGAVIKKRLLIHWWIGEKFVSSLEDGNELFQQLVDLRFVRTVRRRGHCDTAHACTVHPWIRRMLVAVARSSAFLEIDPDGNGASASNNDFSRTHRACLHDGGLLQGSRFHPQLSTIYNVGQSYVKLSTAWFTYRSQLGTVQLGQWRVADPVDQIAYPRKSHIELIDDHHLKGIGACKNLRYLSLRGISRIMAIPAAIGELAELVVLDLRACHDLQVLAKEITKLQKLQYLDVSECYLLVDMPEGFNKMSQLQVLKGFLVVNSNKRNTCNLGELVSLSNLRKLSISVSKKLKRAEDELKVLANFASLASLKITWGMVSPRDAADESDAAKFNLVLPSNLSKLDLYCFPSRQFGTISSDSLKKLYFTGGKLHSLEIQNGECKVEVLRLRCLKDLQFCWEELRELYPMLEFVEAQHCSGVANWPLDNNKVWTKDAETSNAASAQSEEPTAPDVCPEIVEEG

SEQ ID NO: 114969 - protein, 119 aa, Oryza sativa
  unsure (1)..(119): unsure at all Xaa locations
  Clone ID: PAT_MRT4530_1860C.1.pep
MSQLLQSAGCRAPLVVFGSAGAGSLTSAAHALADVDRLLXDGSLAENVESFLSFFGMGPRDLLGRSMDATEGFGFADVAKARACASEVTCCRFCSVGSLLATGGLDRKVLLWCSESAVK

SEQ ID NO: 114970 - protein, 70 aa, Oryza sativa
  Clone ID: PAT_MRT4530_18610C.1.pep
IEWFCKKKPGALDYISNNLLMFDPLGEGAKGICLVKKYVPVSIQIDLRDQKHVKSSFWTPSPRAYAKFIL

SEQ ID NO: 114971 - protein, 583 aa, Oryza sativa
  Clone ID: PAT_MRT4530_18611C.1.pep
MVRPTQDAIDTFVGITGADEAVAARKLEEHHGDLNEAVNAYFNEGDRTSTRANENPIPTGYDDMELDEPFGPVPTFHMPLGNPFSLLDQGFLERAAAVYGEGPHITHPREVRRIDVEVKDNNTPAGSSGHGPVIEDVTGHEFSHGPEIRGTVLIDEDDDDDNLPSAQDTRLPSNPSTSNYSVPRAPPIANVSDYNNDIEEEMVRAAIEASKRDADGLTNGLRSGERENASRGRDDDEIARAVSMSLETAEQERVLRQVGAHVSDHSDLSDKEDIEGATGTVERQVPTSGKVGTSDQLVDEENFQDDDVEEHSFVRQHSRRVPSGNDESTEALERANSHPSSLLPHNIENNQQFNGVFPSEVWGGISSEEHDEAVMLEAAMFGGIPGRAAYPFSLPDHQNSSRYPTVAHPPSPTLTAQRLLREQQDDEYLASLEADREKELKAEQEAELRRLEAAAEREAAIAKQKQEEEEKRRKQLEEEELESKLAAKQASLPKEPLPDDVGAVTVVVRMPDGRRQGRRFMKSDNLQVLFDFIDISRTFKPGTYRLVRSYPRRAFTDSESQMSLSDLGLNSKQEALFLEQISG

SEQ ID NO: 114972 - protein, 58 aa, Oryza sativa
  Clone ID: PAT_MRT4530_18612C.1.pep
FQLTSRILPQYVYMHQNLVQVLWGHENLCIRWCCMKIDGWPCSVTWNPVNCYIMFDVY

SEQ ID NO: 114973 - protein, 134 aa, Oryza sativa
  unsure (1)..(134): unsure at all Xaa locations
  Clone ID: PAT_MRT4530_18613C.1.pep
DITPVWQFGTAVARWHTTELCVNPRILMTAARRTQRQQPNCIRPYCLGGGXSSSRQQQRRHGFRAFSETVVSHDGIDTRXDGIPNSDDERRSICLQVQPNSLRLCHRVPGVASLEKERNREMRGRRVGLQACKL

SEQ ID NO: 114974 - protein, 1447 aa, Oryza sativa
  unsure (1)..(1447): unsure at all Xaa locations
  Clone ID: PAT_MRT4530_18614C.1.pep
MASASDSDDADADFFDKLVDDDDADTNRRLASDLTPPPSRPEPDQAAPPPPPQPHTAPPPPPPNAEPEAPPPPQLEVKAPAATLPPNPEAASPGSAKDVHMAEKXVQRSASATNSGVVGEDPFREFLGVEGFFVRNNTHTMTGEQRIQASVLLNXGIESAVCIPRSAVTHLTAPWXGPNLAPAKLVGKLFTSLDKSLSRMMGTQPSALSPXQQDSLTERDTYSAPAATNFVNNQPVMAMSSLMSSGSEQSMSEMSGNTGPDRKVTHNQKCLLNQTFGRTPKQGCRIRCCTNTHXVPVVRSSGCVLSQYNGDFYARSPQQANDWGNKNKFYFEEKLKRWVEEGADIPAEEPPLPPGPTKALFQNGIPDQSSNGPGSVSYTANGFSEARPLNPSNQHTENQTAQQANVESLESSKYYHADINTYAHSTSQYTSSEDHQASYKGFGSSTSHQSVYKGFEPSVGHQSTFTSHHSGYNGSESSTVQQAAHQGFKPSTGNQNYKGFEPYSGHQLGYKGYDYSTGQTGHQEFGPSTDSQANHVAYQQLPSHYSSFNGAAKPQDSVPTANMPQMQTRADSDGCMNLPNNYLSTGSSVNFAQQQFISSNALPQQFGYSSHEQRSSAGRPPHALVTFGFGGKLVVVRETISMSTNFDSGNQGNPCGTVSILNVSEIVSDRVDHPSIPSGSALSYFHALCRQPIPGPLVGGSAAAKDVNKWLDEITGGYDSSIREFQGGDDQKLLISLLKILCQHYGKLRSPFGSDPSQEGIDGPEMAVTKLFSSCKSSGAHKGEYGAIVHCMKNIPSENQIQATAKEVQNLLVSGRRKEALQYAQEGQLWGPALILALQLGDKFYVDTVKKMAYHHFVSGSPLRTLCLLIAGQPADVFNAENPVDGNYGNLHIPQRPVEAVNSKSMLDDWQENLAIITANRTKGDDLVITHLGDCLWKEKNEVAAAHSCYLAAELNIESYSESSRMCLIGADHLRCPRTFTSPEAIQRTEVYEYAKVLGNSQYILLPFQPYKLIYAYMLVEVGKVSDSLRYCQACLKVLKASGRAPELEAWKQLFSSLEERIRTYQQGGYGTNLAPAKLVGKLFTSLDKSLSRMMGTQPSALSPVPQGSLTERDSYSAPAATNFVNNQPVMAMSSLMSSVSEQSMSEMSGNTGPDRKVTHNRSVSEPDFGRTPNQAKLGEQNKFYYDEKLKRWVEEGADIPAEEPPLPPPPTKALFQNGIPDQSSNGPGSVSYTANGFSEARPLNPSGPSSGMPPMPPSQNQFSARGRMGVRSRYVDTFNKGGASATGPSYNKPATPSMNPLSGATFFVPTPATVASEQIPDPTVNVHQDQPSSTIALRESSASPPPSVQSIPVQSNIQRYPSMDNIMTPSGSGNGSSFSRSRAASWSGAYSEQLSGNAVSRSPDGQRTMMQSPLIPGQKQSHSRSSSNSSLQFNNGLGEDLHEVEL

SEQ ID NO: 114975 - protein, 80 aa, Oryza sativa
  Clone ID: PAT_MRT4530_18615C.1.pep
MVLLTNAPNIANVLNMVSYLRATMHMGVAEATTTVTNLFAALQVFSIPAALLADSYVKRFYTVILLAPIEIISVEMGKTL

SEQ ID NO: 114976 - protein, 213 aa, Oryza sativa
  Clone ID: PAT_MRT4530_18616C.1.pep
LPRPPASAMVGFGARQNRTEVEMRDGVLHGLRTEAAWLVGDEMRWDGGGGVPAAVEEEEEDEEAAASSRSLLHTTLKRARGMEHYSTKFSNGGGRLVDPMPDRRTLPVYRADSASDVLDLILSKNDPDVDTDSSTQVGFFCGSPPVRANNPIVHDPQFGKNIPSFSPLGSSFGKKSAGRAEVGSPSCGASSPKVRIEGFACGNKEPHCAVTFA

SEQ ID NO: 114977 - protein, 101 aa, Oryza sativa
  Clone ID: PAT_MRT4530_18617C.1.pep
PHRGRSGGVPAAVEEEEEDEEAAASSRYARAKTIHPLGPSYPVHPPRLKLPSPIYLRPSSARRRRPCASASSPTGLCYTLHSREREAWNTTRPSSAMEEGD

SEQ ID NO: 114978 - protein, 239 aa, Oryza sativa
  Clone ID: PAT_MRT4530_18618C.1.pep
MDDIKIHAIFQTSQPIDTTACSVRPLTVRRAARNLAKTRVREGEEDTRRARCGVWFLAALCPRAASSGENPDSPMILPATETPQARTQKKELDPSQEHKRNHQEASHLTCTKTTINNLAAACPLPPRRGFPSASRRPLLPLPPPRPPHPPPRPLNPAANPGPRADNRHHNSDPDEPRTGGRPRTGVPAPPRTGGRSRTGEPPPRSRERRCRRASGRPPKSPPTTAATLEDHAANYCLGR

SEQ ID NO: 114979 - protein, 135 aa, Oryza sativa
  Clone ID: PAT_MRT4530_18619C.1.pep
LSYLVCGVHMTVTRASGGGLQPSSEVGQPWWTRCGVGDAANACGGATWRRRVARTAQPLVVRCGGGGRPLRRPSGAAAWCSAAALPRGLIGRAAAGKIGGEVASQRRHTVAGVVGLRQAATALSCHCHVDPTFPA

SEQ ID NO: 114980 - protein, 367 aa, Oryza sativa
  Clone ID: PAT_MRT4530_1861C.1.pep
MKVEKGRDAPKVPLPSLPVVPSHLPAALLSLPRRRPPPAACAASTVRRPAAPSPPPASPPPPPPRPALRFARRLSLLAGAPSGRAVFSLGLAATSSPSVSPPFRGESTGDASSPAKQWRCRHWSTSGRHCRVSRAPADVATTSLGSATPPSTPAGPRFRRNAVAAPASPSSSSPASFRPPIPPRRLVAPLNHHLLQHRSSAFHAVPSSAQPLLPAIIVSSSPFVLADRRPVGRLARRLAAPPPSSSSLRRVPRRPRPRAAAAGCPRRLLAGPGRRRRRRPLVVPGRRGVRPSVEPFSSVVRIRQASRCSPVLVFVLGSASSSLVPAASRLRPRIAAEAVPSPFVSVVPVCLRRARSSLSFPRLVAWW

SEQ ID NO: 114981 - protein, 83 aa, Oryza sativa
  Clone ID: PAT_MRT4530_18620C.1.pep
MPANGDGPARGSAAAAASLRRRRTTGGAGAGARGGTSTMLQFYTEEAAGCKMSPNAVLIMSIGFFAVVALLHVFGKLYRTSSN

SEQ ID NO: 114982 - protein, 195 aa, Oryza sativa
  unsure (1)..(195): unsure at all Xaa locations
  Clone ID: PAT_MRT4530_18621C.1.pep
RAARNLAKTRARXGEEDARRARCGVRFLAAPCPRAASSGENPDSPTILPATETPQARTQKKELDLSQEHKRNHQEATHPTCTKKTINNLAAARPFPPRRGFPSASRRPLPPPSPRPPHPLPRPPNPAANPRPRADDRQHNSDPDEPRTGGRPGTGEPPPRSRERRCXXASERPLKLPLTTAATPKDHAADCCLGE

SEQ ID NO: 114983 - protein, 241 aa, Oryza sativa
  Clone ID: PAT_MRT4530_18622C.1.pep
SSSNKIYAFELSEQTLVTTRKSDQPNTPSRAARNLTKTRAREGEEDMRRARCGVRFLAAPCPRAASSGENPDLPTILPVNETSQARTQKKELDPSQEHKRNHQEATHLTCTKTTINNLAAARLLPPRRGFPLASRRPLPAPPPPPRPPNLAANPGPHADDHHHNSDPNPGCIGASSLVKAAAEPRTGVPAPPRTGGRPCTSEPPPRSRERRCRLIHRDRAPRPPVEYLGLSDQALPGCHVQ

SEQ ID NO: 114984 - protein, 34 aa, Oryza sativa
  Clone ID: PAT_MRT4530_18623C.1.pep
PGFVKLSPQVHSVSPLNWFDVLCHQNHGLKKNPK

SEQ ID NO: 114985 - protein, 215 aa, Oryza sativa
  unsure (1)..(215): unsure at all Xaa locations
  Clone ID: PAT_MRT4530_18624C.1.pep
MSSLSLFVFFLMVLPFSCVLDPLNDRLRPSLSSAGGLREGGGERDRRENGRWRHREARNGGGREYVERREDGILGTALGREGEVSREAVVRGFAENEANGHARPGAAFGENRSSGEGTCSGAILEPPEGIDLGIWEWGAHWRQGAASERVARWKKXGQVSGMKIPGQAGAVTPGSLPISHDGSAPGNGKRHGQNRMAMTARPKSNDDEGAFLPEF

SEQ ID NO: 114986 - protein, 144 aa, Oryza sativa
  Clone ID: PAT_MRT4530_18625C.1.pep
IKSTSTLTNLEARFWTCTEVKQIMTTPGFDPAAPPEEEDDSTTLSGGKATPKVAVVAGPTNPKLGLHPLSAPYRSTAKAPKLYHLPTSVGTCTLLHQRPPPAVLRVNAANSSTHHNGLPLPPAMPLRALSSTTPLNWARLHAPR

SEQ ID NO: 114987 - protein, 81 aa, Oryza sativa
  Clone ID: PAT_MRT4530_18626C.1.pep
PSFAPLDMWKYGSALQQRPEDRSLNGRGATIKTMHPEPSPRARAADGPGPPGIRGEAALRRALPGSGRLGAVHPSPMVFCG

SEQ ID NO: 114988 - protein, 134 aa, Oryza sativa
  unsure (1)..(134): unsure at all Xaa locations
  Clone ID: PAT_MRT4530_18627C.1.pep
EALFYILILLLLLILCNTFAEGAIKLTQILHFPSLNXLISYSNSSKALQSFYEKLNQQFIPIRTKAFELLHRHYYLNVFFHLLVKYSLPVSLIISLXTANLLREDFFSXNSFTPYDPFISFYNSPFITHIIYHF

SEQ ID NO: 114989 - protein, 64 aa, Oryza sativa
  Clone ID: PAT_MRT4530_18628C.1.pep
MERGSNQQWERTACDGEKYYRLERGEMGNLSGSLAESSGGGPPWKPATRHLPIHHQPSFPPVAA

SEQ ID NO: 114990 - protein, 400 aa, Oryza sativa
  Clone ID: PAT_MRT4530_18629C.1.pep
MESLVLASSCSASPRLPPLSAARRRRPSSQTLPATAAASGRRGAGRSKLVVVAAAAAAARGSGNGFEGLKTNGFASMSSSTNSENMSTGTGSLPPMPPPSSYIGSPVFWIGVGVALSAAFSMVSSMVKKYAMQQAFKSMMTQAPPNTFGSNSPFPFAMPPQAAPAAPSSYPYSQPRKDTSPQSATVDVSATKVEATGTLEEADVAEQPKKKFAFVDVSPEELQQKELQSSLETVDVKSESKQSETMEDTEQKAPTNGTAFKMNEGSASGTTESSNSGPMLSVDTIEKMMEDPAVQKMVYPNNMGGSPDQWDNRMLDHLKNFDLSSPEVRQQFAQVGMTPEEVVSKIMANPEVAVAFQNPKIQTAIMDCSQNPLNIVKYQNDKEVMDVFMKISQIFPQING

SEQ ID NO: 114991 - protein, 418 aa, Oryza sativa
  Clone ID: PAT_MRT4530_1862C.1.pep
MDGHGGGGGGGGGGAGGVGKLTRTPSSLLRSPTVRNCASFQAVVVEDPEPDDKKEQAQAKPPPHLHPHLLRAAAVPAHPLLLLALPLAVLLLLLLLRDDHHHLLLLATAAAAALAAAAGAARLLRGRLRLRRSSGSGSVQWFIGDEDDKPQKRDKGKGGAHGRVVREGVEFYSNGDCYEGEFHKGRCNGSGVYTFFGKGKYEGDWVDGKYDGYGIESWARGSRYRGQYRQGLRHGHGVYRFYSGDCYAGEWAGGQSHGIGAQTCSDGSSYVGEFKCGVKHGLGSYHFRNGDRYAGEYFGDKIHGFGVYSFANGHCYEGSWHEGKKQGFGMYTFRNGDKRSGDWDSGTLKTPLSPTDPSVQRAVQAAQLAAENAFHLPRVDEQVHKAVMAANRAATAARVAAIKAVQNRMDGKFCDTYV

SEQ ID NO: 114992 - protein, 106 aa, Oryza sativa
  Clone ID: PAT_MRT4530_18630C.1.pep
MNEGSASGTTESSNSGPMLSVDTIEKMMEDPAVQKMVYPYLPEEMRNPDSFKWMLQNPMYRQQLQDMLNNMGGSPDQWDNRMLDHLKNFDLSSPEVRQQFAQVGMT

SEQ ID NO: 114993 - protein, 120 aa, Oryza sativa
  Clone ID: PAT_MRT4530_18631C.1.pep
MANFVGAGSLNHPPPQRKGKGALQSTDQVLPFSTSRNNGKEGKARKRVEEALPPYHIYLEWIPPCPTNPEYPSYDTKAPRRELKAINLGTILATAGVPFLSSSSIQAKEEEYACGNLFYI

SEQ ID NO: 114994 - protein, 162 aa, Oryza sativa
  Clone ID: PAT_MRT4530_18632C.1.pep
MSGGPSLGRLLEESDCGEAAGRRRLNHAGQICGAVELAERDLVGSIGPWPKVVAVGSRRSTRTGTTSLKAPFPCGSHSGAELQEKAEVNDGGGKVMLDGVRRTLPLFLCVCLCLFTKNQGAQRQRRDESAISDLAGHGFEEEGYPVVDYESALQAAMSTTVR

SEQ ID NO: 114995 - protein, 86 aa, Oryza sativa
  Clone ID: PAT_MRT4530_18633C.1.pep
MLPTTASKGRGAARSAPPLFGPYLRRIVKWQQMDIEYTFWQMVHLCTSPKVVYASCPQSFLHCSYYLFCYTNAICKFYHGNNKPLV

SEQ ID NO: 114996 - protein, 139 aa, Oryza sativa
  Clone ID: PAT_MRT4530_18634C.1.pep
SVVPGSPPPPVASAAASSGAAGDHRTYSNPAFQVSGSIEEAWYDSFAMSESDGEDDFHSVQDDAFSLNGFENDAALSTRDANGGSFNGSSHSSEQHYRKPRSSELSRGNLENGVRSSVSHEDVASVSAEDSATAVEEGY

SEQ ID NO: 114997 - protein, 218 aa, Oryza sativa
  Clone ID: PAT_MRT4530_18635C.1.pep
MSGGPSLGRLLEESDCGEAAGRRRLGRWNRDGGERELGFGRGRRGPCTPVTELHYIACDLNHAGQICGAVELAERDLVGSVSPTVQPKLSFSTSRHIMLLLLPSPTVTMSCCSSPIGPWPKVVAVGSRRSTRTGTTSLKAPFPCGSHSGAELQEKAEVNDGGGKVMLDGVRRTLPLFLCVCLCLFTKNQGAQRQRSVTEMVRSSSMRFIDCCLSSSVA

SEQ ID NO: 114998 - protein, 505 aa, Oryza sativa
  Clone ID: PAT_MRT4530_18636C.1.pep
METIQEGDVVPGSPPPPVASAAASSGAAGDHRTYSNPAFQGWVGLRAWLGIGIGIGIGMVSGSIEEAWYDSFAMSESDGEDDFHSVQDDAFSLNGFENDAALSTRDANGGSFNGSSHSSEQHYRKPRSSELSRGNLENGVRSSVSHEDVASVSAEDSAHGGGGRILDDCGLLPNNCLPCIASAVGVNEKKRPLSTSPTHSMKMPSLKLSFKKKSGEAHPSSTLLSTKDFLERPLAGSQVQLCLLEKKILNSWSHIDPGTFRVRGSNYFRDKKKELAPNYAAYYPFGVDVYLSPQKLNHISRYVQLPDVQISSKLPPLLVVNVQVPLYPASLFQNEIDGEGMSFVLYFRLSDAYSKELPPSFIENIRKLVDDHVEKVKAFPMETTIPFRERLKILGRVANLEDLPLSAAERKLMHAYNEKPVLSRPQHEFYLGDNYFEVDIDMHRFSYISRKGFETFLDRLKICMLDVGLTIQGNKAEELPEQILCCVRLNGIDYTQYKPLMTHGA

SEQ ID NO: 114999 - protein, 64 aa, Oryza sativa
  Clone ID: PAT_MRT4530_18637C.1.pep
VPPCSTAPAINVDLSTTYSSVGVWLHDRVEIIVNDQGNRTTLCYVESTECERLMGDAFKNQCDM

SEQ ID NO: 115000 - protein, 160 aa, Oryza sativa
  Clone ID: PAT_MRT4530_18638C.1.pep
SKSIIVIEDIDCSLDLTGKRKNKKKKDAAAAKNDTDGDKKESPPSDEEEKDKEGSKVTLSCVLNFIDGLWSACGGERIIVFTTNHVEKLDPALIRRGRMDKHIEMSYCGFEAFKFLAKVYLGIDAHHLFDAVRALLRDVDMTPADVAENLTPKAAGDNAD

SEQ ID NO: 115001 - protein, 389 aa, Oryza sativa
  Clone ID: PAT_MRT4530_18639C.1.pep
MAATKSKAAKKGAPLLGKYELGRLLGRGTFAKVYHARSLAPGADPVAVKVLDKPDLAAAGAGMATRVLREVAAMRRLRHPNVLRLHEVLATRSRLASLPSRRLPEHAAQRVFLQLVSALIYCHARGVSHRDVKPQNVLLDAHGNLKVSDFGLAALPDSLRDDGRLHTACGTPAFAAPEAHRREYALPRWVSQPARRLVSRLLDPNPATPLAVAELATHPWFKRSLSLDSQLGSLLGGQPERELAFQAPPPLNAFDIISMSPGLDLSGLFGESKRRREKRFVTTASPEPTAERLGQGGAKLSSSRMWRSGGIASPVGSLSGRVALSRTTSEASPSRWLFDLFSETRGVGDSGVFGQRKCCEEHRAESRDAMVMAWHGCDRAEKDKEGILL

SEQ ID NO: 115002 - protein, 1305 aa, Oryza sativa
  Clone ID: PAT_MRT4530_1863C.1.pep
MQRWILAGILGCLRAKVEEYEGELAGRDGGGSEVRLDKKKQQQLVVEEPLATPCSAVAPAVAAAREDRRRHRQVAAVLVRPFAAVETRRSFVAVDNPKVAAASFSSPSSSVPFPPPFWSPVCSPRCPLRAGALRWCRGAAVRRRVSAARAVFFVEPPPSSMPRYKPEYLFGVEGFVQELHTMSFVIGFGTAPFYAQIPHDRHEEKCRVKVTLNSNSEEVPSVMFEAGGRNYIHACQEVARIAIGELRDRYSDQLADTEYRYHPRQPQGSDRGSYLETEGIENDVTTKHLVEMLWAMDESRAETVLAAQDREDRNRGKICKLEDKVDRLEKELAALKGEAPPQKAKIRLTARKRALFVPRYQLAPKVRVVEKEVAPAQADPPVIIISSDEEEESKRNNSKIEWVATQDDEDEPSIDLRCLEELDTTNPVEASDWLHAIEKKLDLLQCTDQEKVSFASHQLHGPASEWWDHFRLNRTTAEPITWLEFTAAFRKTHIPSGVVSLKKKEFRSLSQGSRSVTEYLHEFNRLARYAPEDVRNDEERQEKFLGGLNDELSYPLMVGDYPDFQKLVDKAIRQEDKYNRMEQKKRRIAQFKTQQGNNQKPRLNLGPQSMPQGGSSSVVRPQRQFFNNNAGNNIRNQASRPVAAPAQQQPAKREQGSKPVVCFNCGDPGHYADKCGAHLSGPSPSSRRSRRAAAPATVAAPTSPPSPALVDHARACAASPAPTSLSLPLAPAPEMAGIRKSNPASLSSPTPHVGRRFPPLPATLAAVLRRRRRSIRVAEIHPVHPSSVEVLPEPVAVVLPSLIVAVRRRSSLAPAEPLGRLPPFPVNRRPVGPACQPRPSRLVPLPELKSFSVEDVSERLVSSLPSRSRLNQITLEEIPIVREYPDVFPDDLPANELAEVKRQVDDLLQKGYIRPSSSPWGAPVIFVEKKDHTQRMCVDYRALNDVTIKNKYPLPRIDDLFDQLKGATVFSKIDLRSGYHQLRIKEEDIPKTAFTTRYGLFECTVMSFGLTNAPAFFMNLMNKPSPSPLVVGRALAPCALALPSPPPLQPCSAVAPAVAAAREDRRRHRQVAAVLVRPFAAVETRRSFVAVDNPKVAAASFSSPSSSVPFPPPFWSPVCSPRCPLRAGALRWCRGAAVRRRVSAARAVFFVEPPPSSEGALQWIVLCEGYRHNSFPRYRGGIEAHGDMMWGCVLWVQWYTSGQSKTIRIAVPAVMGGGGSSSGSIRVLMLAVEDHAVGSHSAAFDSPTAGVIALHLAWIVSTAFFALSTIVSPRTPTESSLSSAAAAPGGDRDGAAPGCLPSKSR

SEQ ID NO: 115003 - protein, 659 aa, Oryza sativa
  Clone ID: PAT_MRT4530_18640C.1.pep
MVVVTGQATLQVAAGTLPRQRSDYPMANLSTLWVNNRNRLPDSITYDDGSMVRSILLLSPQTFYGPSFAAGFFCTPPCREFIFAVFIVFTSSGALFPVAVNEVIWCANRGSPLGEDATLELTGDGDLVLREKANGRLVWSSGTSGRSVQGMEITENGNLVLFDQRNGTVWQSFDHPTDALVPGQSLLQGMILKANTSPTNWTESKIYITILQDGVYGYVESTPPQLYYNYVVSTNKSKRVPTTVTFTNGCFSIFVQSTQPGNPDGRIALPEAKSIQYIRGILLENNTTSNCYLQLYCLPQSATYSLFFCPYTKQKLQTKTILVSILAAIGALILVVVVAIYVQKRRKYRERDEELDFDIMPGMPTRFSFQKLRKSTEDFSKKLGEGGFGSVYEGKISEEKVAVKRLESARQGKKEFLAEVETIGSIEHINLVRLIGVCVEKSNRLLVYEYMSRGSLDRWIYYHHNNAPLDWSTRCRIILDIAKGLCYLHEECRRKIAHLDIKPQNILLDDNFNAKLADFGLSKLIDRDQSKFGVVLMEIISGRKNIDISQPEEAVQLINLLREKAQNSQLIDMIDKHSNDMVSHQEEVIQMMKLAMWCLQNDSDRRPSMSMVVKVLEGAMRVENCLDYSFFNANSVISVQGIPSTYSAPPRASILSSPR

SEQ ID NO: 115004 - protein, 92 aa, Oryza sativa
  Clone ID: PAT_MRT4530_18641C.1.pep
MPHVKRILLLSSPLNCPGWLLLSRQAPVAFEPLDRKAGRALGISFSSSSYPSMTRSNRAYRLATHAWLGPGQFSVESSSACICKPGPMPFDD

SEQ ID NO: 115005 - protein, 144 aa, Oryza sativa
  unsure (1)..(144): unsure at all Xaa locations
  Clone ID: PAT_MRT4530_18642C.1.pep
MARGRRRNGSTAAVGGRQRACDRSHSDCGRRRAARAGRGAALVAAVGGHKGRAAACGRSKWRGDVGGCRQWKAVDAHGRIGLAAAGDSARLHHAGDLFLEEVLSPYIHVNHXQHHDVLRNATKELLTPLANSTRMRLSINIPAI

SEQ ID NO: 115006 - protein, 99 aa, Oryza sativa
  Clone ID: PAT_MRT4530_18643C.1.pep
MPLLRARIGGIKYIGDTLLRCLPLAPIPKSSMSEGGGEGEDGGGDDGIFVIRAPERPPRPRGGSCGSVDGALGGGCIPLTPSPRAPGGARRDGRTAAAG

SEQ ID NO: 115007 - protein, 74 aa, Oryza sativa
  unsure (1)..(74): unsure at all Xaa locations
  Clone ID: PAT_MRT4530_18644C.1.pep
SLLLLLLLLLACLLPSACSAGKENLNIRKKLILFIXGIHSFIPAASRFDSGAINRRLAGLLFLLVLSFFCAVLC

SEQ ID NO: 115008 - protein, 192 aa, Oryza sativa
  unsure (1)..(192): unsure at all Xaa locations
  Clone ID: PAT_MRT4530_18645C.1.pep
LRSXGXLAGKINQIIKTSGNTIIICTSTFCTHFSMVPSGPHHHQSVIXTSSPXATHSMQHFTHSGSYVIASRLQHTPSIHHVSTSHPTQLALSLATASLHTGSQLPCSHQGHSTIISSIATTAIQIFSAACRSPQYIALXSIVAAIALSHSVSQHITSTRLSPLRHKKCNFQQHTYIKQARWGTFWAPPTNN

SEQ ID NO: 115009 - protein, 103 aa, Oryza sativa
  unsure (1)..(103): unsure at all Xaa locations
  Clone ID: PAT_MRT4530_18646C.1.pep
SPRRRPRRPPPSRRRPAAAAAAPWSSGSSRASSAKKNXSPPPPPSLMISFFLVDGTPPRAPPPXRRRTPPPWRPRTRPRRRRPLPRPTPSPSPSPSPSSCSFP

SEQ ID NO: 115010 - protein, 89 aa, Oryza sativa
  Clone ID: PAT_MRT4530_18647C.1.pep
MSTTRHVNHDPVSDQQFVSTRRSLEQQNPSTTTRPRWRRRRSSRADSANSLAPATPRHARPWLAVASSALENEKERKDTEILSFKSREK

SEQ ID NO: 115011 - protein, 582 aa, Oryza sativa
  Clone ID: PAT_MRT4530_18648C.1.pep
MTLNGLEQPDLTCWLMDRTDPKSMTIDISENKKMVITPWKVKTVLGVPLGGEPLQLPDQDIMSDALADLAIELDLPPKSDITASRLIEEIKNRPKDPSMVRYFIMVIVNKMLLPSTGLYIRPKDAWIGSDTQKVARINWSKAIFDALHDSLVLWHKNKTGPRQQTYIRCCVAFLVLLYIDNLKVPKDSLTVDRCQTPRIQLYTKQLVEDISQEDRVTDSSGNYVFGNLPMSGILGSCYSHPDYDKEKEPHGDNSSTPFADELVSAVEISFPSMFDTVGPHLSGLQDEHKQRVLDALGEYDRQSKGESRNQPPLGPQPQPASHSQPDSQHGPVASPTSEEAQDHHIHNTPDISPTNSPAPQPCRIITLDVAFNTTPQITSTEPHPHLPGELFPTMDKTTIADENQALTPQPDADFQGGCDVGIPLQDGFEGHHDLPDVDDEHGIETDTSMQVNVTTEGTNTAKSPSAHQNDGHHHHPDADVENNSNFDIPTPGFLLIYPYSWETDTGVGVTEGGGGWGGGGVGARVPAVGNRGPGAATARGGLVRLSSRRARSTAGVAAPSREAESAASLGDLTRVDFPILDQ

SEQ ID NO: 115012 - protein, 549 aa, Oryza sativa
  Clone ID: PAT_MRT4530_18649C.1.pep
MKRKGKMPEKVRSVKFIGSQSQPSEGPTTRSKRARADGGSQQGAAKKRGRKNQQDRAVKHAALVEPPATKQSVFTRCSPKFANDACRALSPIHRQALAALGLGELAKMTLNGLEQPDLTCWLMDRTDPKLMTIDISENKKIVITPWKMLLPSTGLYIRPKDAWIGSDLQKVARINWSKAVFDAVRDRLVLWHKNKTGPRQQTYIRCCVAFLVLLYIDNLKVPKDSLIVDRCQTPRIQLYTKQLVEDISQEDRVIDSSGNYVFGNLPMSGILGSCYSHPDYDKEKEPRGDNSGTPFADELVSAVEISFPSMFDTVGPHLSGLQDEHKQRVLDALGEYDRQSKLSADAIAKQIRLVQTCHARVSDHIVSIIRGESRTQPPLGPQPQLASHSQPDSQHGPVASPTSEEAQDHHIHNTPDISPTNSPPPQPCRIITPDAAFNPTPQITSTEPHPHLPGELFPTMDKTASADETQALTPQPDADFQSGCDVGIPLQAGIIDITMTFEGTYTTQSHTVDGIEGHHDLPDVDNEHGIETVISKQGCLRFQFFFPTA

SEQ ID NO: 115013 - protein, 227 aa, Oryza sativa
  Clone ID: PAT_MRT4530_1864C.1.pep
MATETYKIMHVIPPLILLVFGLLNLEKSRRQNLLGNAINKRKKARKFKYGSGATMEAICREAKLNERNPEGRGGEGTRTLGWIGVEWEIGADLGLVEEGAVARHGDGESTTRCSNGGYGTETAKTTATVVPPPLPLPVGLDAKGEGTAAIGDDNSDAASRLRAGCTPTAHIGGLMLHESGRRCLIVLVLATAAAVVGVGVGAPHMPNHPIFFLVAGGSGQWTAAGGG

SEQ ID NO: 115014 - protein, 1183 aa, Oryza sativa
  Clone ID: PAT_MRT4530_18650C.1.pep
MPRKNVVAWTSVMSGYTRNGRPEAALAMFADMVESGVAPNDFACNAALVACADLGALRAGEQVHSLAVRAGFAGDAWIGSCLIEMYSRCGSLPAAKEVFDRMDSPDVVGYTSLISAFCRNGEFELAAEALIQMLKQGLKPNEHTMTTILTACPRVLGQQIHGYLIKKIGLRSQSVYSSTALIDFYSRNGEFKLAKAVFDSLHCKNVVSWCSMMQLYIRDGRLEEALQVFGDMISEGVDPNEFALSIVLGACGSIGLGRQLHCSAIKHDLITDIRVSNALLSMYGRTGLVEELEAMLNKIENPDLVSWTTAISANFQNGFGEKAIALLCQMHSEGFTPNGYAFSSVLSSCADVASLDQGMQFHCLALKLGCDSEICTGNALINMYSKCGQMGSARLAFDVMHTHDVTSWNSLIHGHAQHGDANKALEVFSKMRSNGIKPDDSTFLGVLMGCNHSGMVEEGELFFRLMIDQYSFTPAPSHYACMIDMLGRNGRFDEALRMINDMPFEPDALIWKTLLASCKLHRNLDIGKLAADRLMELSDRDSASYVLMSNIYAMHGEWEDARKVRRRMDETGVKKDAGCSWIEINNEVHTFASRDMSHPNSDSIYQMLGELVAVMQDFDELEPFDVRGGRMIKLPLCIYQSPKVSSFGRRHHSSSSSFMNSGGGRRTHVAAVPPSLLPQHQQIENHGDLNSGSNQDVWAILSVEVASNLSKSVVSLTLSDGNTLIYACSGIAIECQEGSGTIFLTSASLVTAFYDTEEVYDNLKIEVRHEGNEVLKGYLAKYDLDKNFAVVYTMESLDVHIVLTENSRDRYINKKLVAVGRDKHGVLMAKSVMVAGCRDSNRSEDSKEIRLISEDWEGGPLFDFDGKFVGMNRFSVMDRTSVLSWVSILIILKHYLPSLQNRILKRLQNVKRVRCWHCVMHWYDPFYLWVGVLLQGWRETHRKKEVFCMHGFFIEWKGCTTILTSASLVRESDDGNKIDENLRIEVLLPNKQLREGTLQHYSLHYNVALVSVKDKDFHARPANIQLDHNHGPGVAAVGRCFESGKLMAARTDVVDWSGTLDCEMFLIRSSCKITKAGIGGPLVDLEGKVIGMNFYDKKIGTPCLPWNVILMVLACFEKENSGGEVGSGSDPCGAPGWKIPRDESVRLNRWPVPLPYWRPHDDVDEQEPPEGCEHIYTYINGER

SEQ ID NO: 115015 - protein, 158 aa, Oryza sativa
  unsure (1)..(158): unsure at all Xaa locations
  Clone ID: PAT_MRT4530_18651C.1.pep
TLSKIQRIEQGNTFWQGIMGVREQFYRFCKKKVGDGKNTMFWVDNWIGGKPLAEKFPRLYNISLSKQVTETKVLNAGWDALKFRRSLVGEKMIDWQNLQHLCQPIVLTAXVIRVVWKLXKKNGNFTVKEFLLLFRIQLGGEVLDVALHEGHKLLLVKR

SEQ ID NO: 115016 - protein, 82 aa, Oryza sativa
  Clone ID: PAT_MRT4530_18652C.1.pep
MAASAAHIQGGDRRTWSSRLARRGSGEWAAPLSEGGRPHPWPWLATAHPPAERQQDGLELLRCYCRCDMACRSAVGTGHAAD

SEQ ID NO: 115017 - protein, 168 aa, Oryza sativa
  Clone ID: PAT_MRT4530_18653C.1.pep
MLVYQDLLTGDELLSDSFPYREIENGILWEVDGKWVVQGAIDVDIGANPSAEGGGDDEGVDDQAVKVVDIVDTFRLQEQPPFDKKQFVTFMKRYIKNLSAKLDAEKQEEFKKNIEGATKYLLGKLKDLQFFVGESMHDDGGLVFAYYKDGATDPTFLYFSHGLKEVKC

SEQ ID NO: 115018 - protein, 155 aa, Oryza sativa
  unsure (1)..(155): unsure at all Xaa locations
  Clone ID: PAT_MRT4530_18654C.1.pep
DSVFVVGSERSAGGEAGGGGQXXEAEAAMVAATPANSGAGGGLVRFSEARGVPXVATAKARAPWSGGAPCGWLRPNRAATPGGSAGSIPAMDWMCNERGNGLRNEGNTEAGSWRCRPCIRSSFVLVRARASVWHAWCYKTGPEITPETKPRKKTP

SEQ ID NO: 115019 - protein, 35 aa, Oryza sativa
  unsure (1)..(35): unsure at all Xaa locations
  Clone ID: PAT_MRT4530_18655C.1.pep
LPPYSTMGKRKTHINIXVIGHXXSXKWTTTGHLIY

SEQ ID NO: 115020 - protein, 147 aa, Oryza sativa
  unsure (1)..(147): unsure at all Xaa locations
  Clone ID: PAT_MRT4530_18656C.1.pep
SKIDEERNNASTVVYSLRRRRRDPVRRRRRSGLPPVSASPPSASPCRRRPRPHLRFARRPPELRRPRHPEPRRRLPPLRPPFSSSSLSRGEPWTVPFVSPFPPLSRVPLRRAVGRRRRPSGRGCAAXRRPCRRGRLQTASRGLPIGP

SEQ ID NO: 115021 - protein, 110 aa, Oryza sativa
  Clone ID: PAT_MRT4530_18657C.1.pep
AKKGARNKTKHRINKREKEQYTGRRGKGGKKNGQAKAPQETPWGGHGDTEAETGGLKGDFYTEKSTPGKLRGKKAGGGEKMGEKFAKRFVKGEITGERARNISPIPKGGG

SEQ ID NO: 115022 - protein, 77 aa, Oryza sativa
  Clone ID: PAT_MRT4530_18658C.1.pep
EGPSLVCLTVPTGWEELLDRTSSCLRNKIIDFSAPTYANLQHQWLHIAECHAMRNCGLWRQQNLKHQQYHQVNYKEP

SEQ ID NO: 115023 - protein, 82 aa, Oryza sativa
  Clone ID: PAT_MRT4530_18659C.1.pep
MSDKCGNCDCADKSQCVKKGTSYGVVIVDAEKRYIHTGFSSPSHPQYLLINSTTTPISKKTQIKWRCDIIPNSLYYIIPYIS

SEQ ID NO: 115024 - protein, 1185 aa, Oryza sativa
  unsure (1)..(1185): unsure at all Xaa locations
  Clone ID: PAT_MRT4530_1865C.1.pep
MTSSFVDNSVNTGPIQGVSTSTMLVWTQVGEIVFSVYTTVLISAGPSMTGNENAVAITPGDSMSKDPPAVAENGTSTSYEPEKVPSAAKPCPSDKNHEPTRTTSETKNHDFSSCKVLLRAMKTPLPKVQQSEISLKDADKEQGATLISNRFIGVINIDPHEPSVLHLLEDYGSSSSSTPRDVFAIGGTSTSMHTNAETGNQANEERGGRSNEDRLHDNRHNRHDRDDREQQTPDDTGRGRRHDGDDNGDRRQENNGGRRQNSREPERRSRNRTPEPSDPSSSSSSSSGRHPRRTYDRQHPTAPSAGCRAFNRSLRDVRWPERFRPGAIEKYDGSTDPEEFLQVYSTVPYAAGADDNALANYLPTALKGSARSWLMHLPPYSISSWADLWQQFVGNFQGTYKRHMIEDDLHALTQNPGESLRDYVRRFNDCRNTIPEITDASVIRAFKTGVRDRYTTLELATRQITTTRRLFEVVDRCAHADDALRRKNDKPKAGGEKKPAKDAPEPSKKKSGKSGKRKAQAEVFASEYERPPKHPDPQGSDTKRIWCPIHKSDRHSLEDCLIFKKSLEKQLVLKKGKQVRVVEKAVEATTQDSDSAYPDSDLHVLHIFGGSTAYSSKREYKKVEREVCSTWQGAAPKMKCTLDAMGIPRSELTPTDQPFHGITPQSSSKPLGKITLPVTFGQASNFRTEQITFDVAEFDTAYNAIIGRTALAKFMAASHYAYQVLKMPGLKGTTTIQGNAKLTVQCDKRSLDMVEHTPSLPATAEPPKKPSDMPGVPREVIEHKLMVRPDAKPVKQKLRRFAPDRKQAIREELDKLLKAGFIREVLHPEWLANPVMVRKANGKWRMCVDFTDLNKTCPKDHFPLPRDILTKPSVKEANDEDSPVAPDISSGATEAERAVADIETTDDWRTPLIKFISSDELPEDDAEAEKITRQAKIYCMIGNDLYKKAPNGVLLKCVSSDDGKHLLLDIHEGICGSHAASRTLVGKAFRQGFFWPTALKDACDMXTTARYTRSIPTRTGRLQIPXVAIDKFTKWTEATPTGEIRADNAIKFIKGIFCRYGLPHRILTDNGSQFISADFQDYCIGLGVKICFASVSHPQSNGQVERAKGIVLQGIKTRVYDRLMSHDKKWVEELPSVLWAVRTTPTTSNKETPFFLVYFSEAMLPTELRHQSTRVQKYSDEDQEE

SEQ ID NO: 115025 - protein, 60 aa, Oryza sativa
  Clone ID: PAT_MRT4530_18660C.1.pep
MQPAATARRCAVCWEAAALRRPSRGRPPQAGARRRSPTARRAVPARVGRTGRMPLLCSAC

SEQ ID NO: 115026 - protein, 216 aa, Oryza sativa
  Clone ID: PAT_MRT4530_18661C.1.pep
MRKVRGALSPSAQGSSPSIRHPWSGRRRTAPLSANPVRGAPNESKNHQLPLPATPESKQSSVATAQPRHATRRRNHTVLLFFGLLFPVFPVPCYTASSAWAAPRRPTPPTRPPAVSLPPPHGKSIVRARQCTCVCVCVCVCVAACLPGRVSPGKKRKEGVAEALLVGRRTTRVPHAALSVEAERVRTRQHRVFVSHRGDMTAIATAYSAGRRRQSP

SEQ ID NO: 115027 - protein, 87 aa, Oryza sativa
  Clone ID: PAT_MRT4530_18662C.1.pep
SPPPWRPLFGPSPWQPRWKNFCLFLFTPKVVNPIDPCFSVPCNVWMYKKLVISYLAITSLDMLQVKKTLPLEKKKKDFRNKPDVNFL

SEQ ID NO: 115028 - protein, 802 aa, Oryza sativa
  Clone ID: PAT_MRT4530_18663C.1.pep
MRRSPRAAAAAVLPVLLPLLLLLLNWAAAPVGAATAAETRALLEFKAAVTADPGAVLANWTLGGDPCRDFGGVSCYPASGAVQRLRLHGEGLEGVLSPSLARLPALESVSLFGNRLSGVIPASFVGLAATLHKLNLSGNALSGEIPAFLGTFPMLRLLDLSYNAFSGEIPATLFGECPRLRYVSLAHNALTGRVPPGIGNCVRLAGFDFSYNNLDGELPDKLCAPPEMSYISVRSNSLSGAIDGKLDGCRSLDLFDVGSNSFSGAAPFGLLALVNITYFNVSSNNFAGEIPSIPTCGDRFAYLDASRNKLTGSVPETMANCRNLMLLNLGANGQGLTGGIPAALSQLKNLNFLDLSENALTGVIPPELGDLSNLAHFNVSFNNLTGSIPSSPLLQQFGPTAFMGNPFLCGPPLDHACPGRNARRLGVPVIVAIVIAAAILVGICIVSAMNIKAYKNKRRREQQQHDDEEEILVSDSAAIVSPGSTAITGKLVLFRKNSSASRYEDWEAGTKAVLDRNCLVGVGSVGAVYRASFESGASIAVKKLETLGRITSQEEFEREMGRLRGLTHPNLVTFHGYYWSPSTQLLLSEFVDNGSTLYDHLHGSRRRAGPASTGGDGGGLPWERRFRIAVATARALAYLHHDCKPQVLHLNIKSRNILLDNEHEAKLSDFGLSKLLPEPSNLPGYVAPELASSSMSSRHGGDKCDVFSFGVVLLEMVTGRKPVSSRHGRQGTVLVVVLRDYVREMVESGTVSGCFDLSMRRFVEAELVQVLKLGLVCTSESPSRRPSMAEVVQFLESIRGSS

SEQ ID NO: 115029 - protein, 70 aa, Oryza sativa
  Clone ID: PAT_MRT4530_18664C.1.pep
FDMFPFFQSNSGTLSLREFHERYWSPDFKIGRSFRGCHFNCRSHELLWTHGRSCIHLIGDHVNAIFSCWP

SEQ ID NO: 115030 - protein, 84 aa, Oryza sativa
  Clone ID: PAT_MRT4530_18665C.1.pep
KVVERRQRRMIKNRESAARSRARKQAYTLELEAEVQKLKEMNKELERKQADIMEMQKNEVEEMIKDPFGRRKRLCLRRTLTGPW

SEQ ID NO: 115031 - protein, 80 aa, Oryza sativa
  Clone ID: PAT_MRT4530_18666C.1.pep
KYNPCAYILRTNHTLYDNNILRILIAPTRIYIIRISEPLARWHCPDYCNLISLDISKGDRVKLGSAWTRWLHRASFDKPA

SEQ ID NO: 115032 - protein, 79 aa, Oryza sativa
  Clone ID: PAT_MRT4530_18667C.1.pep
LGLRSYADHDICTDAIAELVNEKLPVNGDLPHGVLAEAHGSLSLFLLPVVGEDGVVLVVAVPVVGQINPGLGDWVHQEG

SEQ ID NO: 115033 - protein, 478 aa, Oryza sativa
  Clone ID: PAT_MRT4530_18668C.1.pep
MEFGNGGSSSSERRAAAEGATLARQGSVYSLTFDEFQSALAGGGGGGGGGSGFGKDSGSMNMDELLRSIWTAEESQAMASASGSAAGVGVAVGAPPTSLQRQGSLTLPRTLSAKTVDEVWRNLVRDEPPPVGAADGGDMPPQRQSTLGEMTLEEFLVRAGVVRENPPAAPPPVPPPMPPRPVPVVPKTTAFLGNFPGANDAGAAALGFAPLGMGDPALGNGLMPRAVPVGLPGAAVAMQTAVNQFDSGDKGNSDLSSPTEPMPYSFEGLVRGRRNGGGVEKVVERRQRRMIKNRESAARSRARKQAYTLELEAEVQKLKEMNKELERKQADIMEMQKNEVEEMIKDPFGRRKRLCLRRTLTGPWPFTVLHPGLVLWDGTLDFCCRGARTRVSSRNLVSMLSDAGLRQNDVASRGEDWRHARCGRRGFAHACPRSEIQGRNPRYALQIHSHHSKIQGGLAISSDGTAAATRVPDEQGGA

SEQ ID NO: 115034 - protein, 258 aa, Oryza sativa
  Clone ID: PAT_MRT4530_18669C.1.pep
MPAASDLGRDVVVVPPAGIMDDDDESTWSPWPDLQPELAGMVFCRLLSHGDRLRFRAVCRRWRLAAWQQHPLPPALPWLNLDGRITYQSLPDGEVHRIPVPDELQAGGTVVCRGSFDGWLLYDRSEQLECFLMNPISKARIDLPYHWHCDDDDDAILPDYGEEKEGQRTMCFGENAVRKIAVCSPDLVAAVIAGSGVFFYRPGMHSTWLFASGGPCFARDIAYYNGKLYSISSDGELFVHEFSDSISADIVIGIAPQA

SEQ ID NO: 115035 - protein, 42 aa, Oryza sativa
  Clone ID: PAT_MRT4530_1866C.1.pep
FLQARRFSCCWGSHLDYPPPRPLNRPHSLHHSHRPRHRQHPR

SEQ ID NO: 115036 - protein, 184 aa, Oryza sativa
  Clone ID: PAT_MRT4530_18670C.1.pep
MVGGGGGGGHGVRTPANFPPRQKARLPRGPAHEKSLEQQKKGPSSSSPSVSSNKSPLQLAAAIVQPQKPLESPQHMVTPVRLQEAPGPRTIPCSSGSVGSGSGAAPFDICIKRDDKCSIKLSRSLLEINREKRREREQLSKEAAPLQYLRPGMVLLKKFLKHDDQVDIIRRCQKLGIGSGGFYT

SEQ ID NO: 115037 - protein, 374 aa, Oryza sativa
  Clone ID: PAT_MRT4530_18671C.1.pep
MGRDQAAAAVMHEKVKLFIGVLALQFLLAGFHIVSRAALNMGISKIVFIVYRNLISLALLAPFAYFLEKKDRPPLTFSLLVEFFLLALCGITANQGFYLLGLYHLSPTYASAIQNTVPAITFAMAAVLRLEQVDLGKRHGVAKVVGTVVSIGGATVITLYKGLPLFNHNLNIKSLSSSSLILNWTLGCVFILGHCLSWSGWMVLQVPVLKRYPARLSVLSLTCIFGLLQFLVIAAFTEEDLSRWKVNSGSELFTILYAGLVASGVAFALQIWCIDRGGPLFTAVFQPVQTVAVAVMAAIILGDQLYSGGIIGAVLIVIGLYFVLWGKSEEKKSKNNNLQDQPVQGGGDDIRRHLLGQEDASRKDEEAAVTDELA

SEQ ID NO: 115038 - protein, 72 aa, Oryza sativa
  Clone ID: PAT_MRT4530_18672C.1.pep
MANGTLYNLSELKMECHMGTHVDAPGHMNQGHFAAGLDVDKLDLDLLNALDQILYLKSHEFITNIVTCVSNR

SEQ ID NO: 115039 - protein, 267 aa, Oryza sativa
  Clone ID: PAT_MRT4530_18673C.1.pep
MGHRARNGTAARYEVHAVRSDAVQCTYVRAPCGDHTLPPPTRSHTVECSRRGRSAAADFSFRRTARSINTLTEVFCMATGYVYRRSRYTVWFPASVTLTRLYHAKDLRFHPHARSHVRFELTRARYIPRTARTHAAPPHRTHARSSPAPHARTPSSATRHVPARATSTFTSEQILETGGSTRVDYSMAYVRAEVLDCVGCRAGSRGREIQASNQASARQVTAYQPIDLHLLPWILLFLPAKTQHDTVHSFSTPRVSSVQLEIVSSSV

SEQ ID NO: 115040 - protein, 450 aa, Oryza sativa
  Clone ID: PAT_MRT4530_18674C.1.pep
MEAERRSDREGDYGGWMAAGSSSGAMVRRETRRSEVGLEKSSSLPPPLPKEAVKIDKKKTKKRSDYSIEDILKILDMSEEELAVVKEEWAEMEAKEKEEAPKVKETMVEWEARVKKRIEEENKAYREMMRSQDDDESSWDAIQYRKSWNARWSGTRGSFEDTTRIPPMRFTHKPALDYSAAATPTLQVFFVKVAVAKGALQWPLDVFGIVAMRDVLDRNRNIVFHRTRDNCQTLTEEDRNLVLVGPTRAVALWMPEPVIIDVELKVKGTTESEDKGLSNLAVPLLCDDTSYSYTSKLSTLEFRLGYITSSVEATIFIRVIQGSWPDGLSAQFAAFTTGFYGKGMACRDSNMSIDDERIVLLDSRGEKVVVTSDGNIKLSRRVVSVESNTELKVSVKAWKADNNVVENENVFTALEAGVSYATLDIAFCKLEISVAWSLISQYPVSANSVL

SEQ ID NO: 115041 - protein, 104 aa, Oryza sativa
  Clone ID: PAT_MRT4530_18675C.1.pep
MPGSQDASVPVERPEERADLGGDDDEVDFWGKTFEFIPFGSGRRVCAGLPMAERVVPFMLASLLRAFEWRLPDGVSAEELDMRHRFTIANFRAIPLKAVPVVVS

SEQ ID NO: 115042 - protein, 72 aa, Oryza sativa
  Clone ID: PAT_MRT4530_18676C.1.pep
PVMVFRYAPATQLWRGSIFVMGGSKEDRHEPELEHWSIAVKDGKALENEWMSEIPIPRRGPHRAFVVANDKL

SEQ ID NO: 115043 - protein, 166 aa, Oryza sativa
  Clone ID: PAT_MRT4530_18677C.1.pep
MELTAATAGATRATGGFLGTSRRRPQSSRGDSAPGLRFWFAIGGVVDSRRVSSENRETLYLMNIYKYMRAPAGVRLLPSREMLNEKIRQIQVYASRKWRRFDFQSAPIDEKEASHREVSNLLGTPPANRSMYSKQRIYHRIIHRNITERDKSDFFPKFGSCDPTLR

SEQ ID NO: 115044 - protein, 66 aa, Oryza sativa
  Clone ID: PAT_MRT4530_18678C.1.pep
SQPPERDHADDALEHAPERRRPAEDIKNTENAYFLPRRRFESAAVAMVDPAFSSEPLSDSLHMKHP

SEQ ID NO: 115045 - protein, 46 aa, Oryza sativa
  Clone ID: PAT_MRT4530_18679C.1.pep
IHIVGCRYNAKTRMQGTEIKPRSILSGHMSMSLVREPYYKRQSSIS

SEQ ID NO: 115046 - protein, 979 aa, Oryza sativa
  Clone ID: PAT_MRT4530_1867C.1.pep
MEETTMKEEEETYRANSTCEVEGGRPEVVPAAISGGCKRIEGRRSAAVTPRGEVRTRGGRRGRRCPGGCEREEIVKRWREWGTGGRARGGGKKRRARSSGGNAARGSERRGAAETAATRGSEVAAGLGEWRGRVGMAEGGGRRKQRQPWLSSISSSPAANAGSNGDEKANGKWRMCVDFTDLNKACPKDHFPLPQIDQLVDSTAGCELLSFLDAYSGYHQISMAKEDEEKTSFITPFGVFCYVKMPFGLITTGNTFQRTVQGALNDQLGNNVEAYIDDIVVKIKTSDSLIDDLRETFDNLRRYCLILNPEKCTFGVPSGKLLGFLVSGRGIEANPEKIKAIKNMKSPTRLKEVQKLTGYMAALTIKSQVLADFVANWTMPENRSDSQIDNETWIMAFDGALNSQGVGAGFILTSPSGDQFKHAIHLNFRATNNTAEYEGLLAGIRAATVLGVKRLIVKGDSELVANQVHKDYKCSSPELSKYLAEVRKLEKRFDGIEVRHVYRNDNIEPDDLARRASRREPLEPGNFLDVLTKPSVKEANNEDSLVAPDISSGAIVMRTSTPSIHPRPPMYSMMDECPRGRVDAHHKFAATIGDERAVADIETIDDWQIPLIKFISSDELPEDDAEAEKITRQAKIYCMIDNDLYKKAPNGVLVKCVSFDDGKHLLLDIHEGICGSHVAGRTLVGKAFRQGFFWPIALKDACDMVQRCEAYQFRSKHTKLPVQALQTIPLTWPFSCWGLDILRPFPRGQGGYRFLFMAIDKFTKWIEATPTGEIKANNAIKFIKGIFCRYGLPHRIITDNGSQFICADFQDYCIRLGVKICFASVSHPQFNGQVERANDIVLQGMKTRVYDRLMSHDKKRSSETTMSTYSRNIEKESPSEQPATNRPSADTTRSASEHAHFRSVTTSSDGFKAKQGETSSHPNGKDRYKDYQEGQRQSIDWNTFSASGAIDFAKLSISAGVLRERENPPWRNSRCSCGR

SEQ ID NO: 115047 - protein, 360 aa, Oryza sativa
  Clone ID: PAT_MRT4530_18680C.1.pep
MQAAAAAVHRPHLLGAYPGGGRARRPSSTVRMALREDGPSVAIVGATGAVGQEFLRVISSRGFPYRSLRLLASERSAGKRLPFEGQEYTVQDLAAPGAFDGVDIALFSAGGGVSRAHAPAAVASGAVVVDNSSAFRMDPEVPLVIPEVNPEAMAHVRLGKGAIVANPNCSTIICLMAATPLHRHAKVVRMVVSTYQAASGAGAAAMEELKLQTQEYAFNIFSHNAPIVENGYNEEEMKMVKETRKIWNDKDVKVTATCIRVPVMRAHAESVNLQFEKPLDEDTAREILRAAEGVTIIDDRASNRFPTPLEVSDKDDVAVGRIRQDLSQDDNKGLDIFVCGDQIRKGAALNAVQIAEMLLK

SEQ ID NO: 115048 - protein, 105 aa, Oryza sativa
  unsure (1)..(105): unsure at all Xaa locations
  Clone ID: PAT_MRT4530_18681C.1.pep
RDERQRDDQPAAGEDRAPTPPTRRATAARRRTPRTATPTPRRSRTRARPPPGGAGRCTPRTRGSSXTXPPRTPRRPPTPAPPPPEAATPRRHRARTGRHPRSPKK

SEQ ID NO: 115049 - protein, 353 aa, Oryza sativa
  Clone ID: PAT_MRT4530_18682C.1.pep
MSADEDAASRGGGGGGKRKAVAEGGSPSPLSVLADDVLLQILGRLEGDPRDWARASCASPRLAALLRAACLPPRLTRALPAELLPPPSPDGAPRAWAALHKLSVCCPGLLRAGVLLEPSDDFGLELDIGPDLSVPAPSPSSSSLDHASTATSAPAPPPDSSSSSAAAATTWSLYDDLYLDTAYDCSPSEAAQISNTAATPAPAAARRGVASGSRRRARRWLGTVGAHLASGSWTLSREQGNKLLASRFRGDRLYICDWPGCVHAEERRKYMVFRGVFHDFPRSQVRRALRDTRRPTVAVDCAFCGCTEAWDLYAAFCLRSFYGYHDDGEPVVRAYVCENGHVAGAWTERPLYS

SEQ ID NO: 115050 - protein, 113 aa, Oryza sativa
  unsure (1)..(113): unsure at all Xaa locations
  Clone ID: PAT_MRT4530_18683C.1.pep
AKEKPVVSKNPTRGTKSGQXRTXTTRYPRHPWWDSSRAQHQRRHPHLAAVRKHTQPLSLAPRIPNSPNQVEENEVLLLLHQAASSFSFLLDLPHKSMHVQAIWMDGKLRXTRI

SEQ ID NO: 115051 - protein, 253 aa, Oryza sativa
  unsure (1)..(253): unsure at all Xaa locations
  Clone ID: PAT_MRT4530_18684C.1.pep
MARVHHKNGRGGGGGGGGGKGKGKGKWKMPASVARKQQAAMANVDQVTGDKIPKSFVFSRXKLPSTLRHLQQDLRKVMLPYTALNLKEKKRNNLKDFVNVSGPLGVTHFFILTNPKSSPHLRMAKTPQGPTYTFQIKEYALAADIANSQKRPRCPPEIFKNSPLTVLSGFGGLGEPFKSLVEYFRHMTPAIDPVTVKLSTCQRILLIHFDREKEMINFRHYSIKLQPVGVTRKIRKLMQNNQVPDLRDLXDVS

SEQ ID NO: 115052 - protein, 417 aa, Oryza sativa
  Clone ID: PAT_MRT4530_18685C.1.pep
MMEHLIVHIVPQIMEIGPLYIHQMWAYERYMSVLKGLANGLASLVTSWQGYDIGGYRFYTMFKDKKSAAQNSGVRVKAFDASGEKKSYYGIIQDIWELDYGLNIQISVLRCQWVRDTTGVSIDNYGLTVVDHSKLGLKDDPWVIAERVAKVFYVNDPSDDKMVIAVLGKQNFIGIDSIKDASNYNQYDDIPLFIDFPKRIKEVETTLDEDLISSVRKDVAARQIQAAAASPLLLPPHRRLLSSTGDAADQIQATSPHPRPPPARSGPRASSPLHTRCRRLLSSSHSPPATTSSSPTPQDLGRRPSPRHPPPPRLLISFLHRPRAPPLTPCPPPSTASLPSLSSIPLAASLPSLPLAVATSLTPDLLPQAGTDHLPLTDDLNDPAFLLTEHVAQAGANELPQAGTDIFPKQGGADISL

SEQ ID NO: 115053 - protein, 930 aa, Oryza sativa
  unsure (1)..(930): unsure at all Xaa locations
  Clone ID: PAT_MRT4530_18686C.1.pep
MDRTWMYNTKRAHPTFLKEAAKFVELTKAHAARENLRSIFCPCKVCKNEILLQDPNEVLSHIVERGFKKGYEIWTFHGEAGIENEGIDFELEDMLRHVEPEVLTGTRRGLDNWEALENSAKELLYDEAKGYDKDYSVLRSVLELLILKARHGWLDTSFNDLMDLLRVMLPKPNLLPTNTYQAKKLICPLSLGVQKIHACENHCILYRKEFADLDSCPTCGTSKYKTGNGASDGEVVDKDDALVDENKKISRMVMWYLPVKDRLKRLYSNRDDAELMRWHQEGRKIDGPRQPGINIDVFLEPLMEDMQELWEEGLRMWDEYRREHFTLHAIIFVTINDLQANFSLSGQFKGKFGYLICIDKTSYKYLTSSTKGVYMRHRRFLPQRHRWRAKARLFDNTVENFLAPETRTGRSVFDLTKKKPVKRKKRTDQDTTDAPLEENLEVRHAIDVMHLEKNVFDSTIGTLLDIPSKTKDGFKSRTDFVNLDIRHELHPKELPNGKIEIPPACYSLTPDEKKSLCRCLHSVKVPTGFSANVRKLVSLKDLTISGYNAHDCHKMLTVFLPIAIRVVKPVHTQLVITKLCYLFNRVSQKVFDPEELGPLQTFAIETACQLEMFFPPAYFNMMEHLIVHIVPQIIEIGPLYLHQMWAYERYMSVLKGYVRNRAHPEGSMIEGYTTEEVVECCIDYMKDAKPIGVTPPLHEGRLAGTGIVGKKRFYDEDFKDEKDLPLGDSLEEKTLRRLANGPTSLVTSWQGYDIGGYRFYTMFKDRKSAAHNSGVRVEAFDASGEKKSYYRIIQDIWELDYGLNIQIPVLRCQWVRDTTCVFIDDYGLTVVDRSKLGHKDDPWVLAERVAQVFYVNDPSDDKMAIAVPGKQNIVSIDSIEDVSDYNQYDDVLLFTDFPNRXHRIKEVETSLDEDLFLSARKDGVSKIVKH

SEQ ID NO: 115054 - protein, 889 aa, Oryza sativa
  unsure (1)..(889): unsure at all Xaa locations
  Clone ID: PAT_MRT4530_18687C.1.pep
MDRTWMYNMKRAHPTFLKEAAKFVELAKAHAARENLRSIFCPCKVCKNEILLQDPNEVLSHIVERGFKKGYEIWTFHGEAGGRNEELDDFCFDDAENFIIEDMSQGNIPEYSGSGIENEGIDFDLEDMLRHVEPEVLTGTRRGLDNWEALEKAAKELLYDEAKGCDKDYSVLRSVLELLRLKARHGWSDTRFNDLMDLLRVMLPKPNLLPTNTYQAKKLICPLSLGVQKMHACENHCILYRKEFADLDSCPTCGTSRYKTGNGASDGEVVDKDDAPVDENKKIPRMVMWYLPVKDRLKRLYSNRDDAELMRWHQEGRKIDGKIRHPADARQWKNFDALHPEFAKDPRNVRFALSTDGMNLFGDLSGTHSTWPVLLTMYNLPTWICQKRKYILLSILIQGPRQPGINIDVFLEPLMEDMQELWEEGLRMWDEYRREHFTLHAIIFVTINDLPANFSLSGQFKGKFGCLISIDKTSYKYLTSPSKGVYMRHCRFLPQRHRWRAKARLFDNTVENFLAPETRTGHSIFELTKNIKVVFGKPKKKPVKRKKQESNQSFKKHSIFFRYLDYWKDLEVGHAIDVMHLEKNVFDSTIGTLLDIPSKTKDRFKSRTDLVNLDIRHELHPKELPNGKIEIPPACYSLTPDEKKSLCRCLHSVKVPTXIEIGPLYLHXMWAYERYMSVLKGXKDLSLGDSLEEKTLCRLANGPTSLVTSWQGYDIGGYRFYTMFKDRKSAAQNNGVRVEAFDASGEKKSYYRIIQDIWELDYGLNILIPVLRCQWVRDTTGVFIDDYGLTVVGRSKLGHKDDPWVLAERVAQVFYVIDPFDDKMAIVVPGKQNIVGIDSIEDASDYNQYDDVPLFTDFPNRIKEVDTCLDEDLFSSAWKDGVSKIVKIY

SEQ ID NO: 115055 - protein, 301 aa, Oryza sativa
  Clone ID: PAT_MRT4530_18688C.1.pep
MSGGTRNTRQFFESSSSGGGGRTSIDEGRGVRDGGGGRVAAARGSGVNTGILDEHVLSLVFRSINWDPQAVCTAACVSRRMRAVAERVLWRELCISRAPRMVASLAGAGAGGAAPPPGRIVGGWPALAKMLFFCCGAAGPGVPGHFTRMSRFSKTSGRSFLSRRCRSDLLYVSDPCEHAVAGAGDDLGAYRGVFRGFMRSRTRACLVGRQAALDPRVRCPYCGARVWSMVAAGMVPRTAWRRLGCLEGRLEYYVCVSGHLHGNCWLARLTSSEGEHDAGSGSDSDASTQGGGSDDDGHVAL

SEQ ID NO: 115056 - protein, 921 aa, Oryza sativa
  Clone ID: PAT_MRT4530_18689C.1.pep
MDQTWMYNTKRAHPTFLKEAAKFVELAKAHAGYEIWTFHGEVNGRNEELDDFCFDDAENFIVEDMSQGNIPEYGGSGIENEGIDFDLEDMLRHVEPEILTGTRRGLDNWEALEKAAKELLNDEAKGCDKDYSVLRSVLELLRLKARHGWSDMSFNDLMDLLRVMLPKLNLLPTNTYQAKKLICPLSLGVQKIHACENHCILYRKEFADLDSCPTCGTSRYKTGNGASDREVVDKDDAPGKFGCLLCIDKTSYKYLTSSTKGVYMRHRRFLPQRHRWRAKARLFDNTVENDLAPETRTCGSVFELTKNIKVVFGKPKKKPVKRKKRTDQETTDAPLEESNLPFKKHSIFFRYLDYWKDLEVRHAIDVMHLEKNVFDSTIGTLLDIPSKTKDGLKSRTDLVNLDIRHELYPKELPNGKIDIPPACYSLTLDEKKSLCRCLHSVKVPTGFSANVRKLVSLKDLTISGYNAHDCHKMLTVFLPIAIRAVKPVHTRLVITKLCYFFNRVSQKVFDPEELGPLQKFAIETACQLEMFFPPAYFNMMEHLIVHIVPQIIEIGPLYLHQMWAYERYMSVLKGYVHNRAHPEGSMIEGYTTEEVVECCIDYMKDAEPIGVTPPLHEGRLAGMGIVGKKMFYDEDYKDKRKFPEWLKEKDLPLGDSLKEKTLRRLANSPTSLVTSWQGYDISGYRFYTMFKDRKSAAQNSGVRVEAFDASGEKKSYYRIIQDIWELDYGLNIQIPVLRWQWVRDTIGVFVDDYDLTVVNRSKLGHKDDPWVLAERVAQAATSFPPLLLPSCRRIFSSTPRLPPPPLLPVRRRRLYSPSHPDLSRRRRLLHVADLPKTVDADLRAKSPTPPTSSPSCRRRRPRPQAADTDLLPKSPTPSTSSPCCRLHRPHPQAASSPTSAAGLPDHLPKPPADHLLRDDDL

SEQ ID NO: 115057 - protein, 740 aa, Oryza sativa
  unsure (1)..(740): unsure at all Xaa locations
  Clone ID: PAT_MRT4530_1868C.1.pep
MDLGKSSSTSASLKKIQEDGALPGRGTMEREAGGTNPQPVLGRMVAIEDYILCGFLPPPSEFLLLVMNFYGLSLLHLNPNSIAFLSIFSHLCEAYIGVEPFLDLFRFYYELRWMEPNRVSGCVGFRLRDGLKSRYIPFQCPSSRSKWWTRWFYLQIKDSDPVFVVPEEQPDKIPSWTAKPPLTPSLQSFIDIVDDLRALPLTDIIGPLADHQVTASLKEKVAKEASDAAAATTSGGNVPTKGRKFSSVSGHRRKASTPSASDASLPPPRRQRLVTXRELSHRAARAKAVQDESGGTSGVSPTAASTDVVLAPGRREATPSGPVSNPAAGRGPPAAILTWEELQVEMGRLLEAGAPGIGREIAEARSAAASANECADRQVREWAEAREDLKKMRELVAGNERQRQGLEDRMSKLGNNLSEIRGSLRVTHTGLHQLAGECGIKSTIPANPDEFSLTSSLAELAAAMREIPSKHAARIGEETSNGIYTGACHVLACVKLAHPELDLREILDQGAASNTHKEVMEEVGDLGESVLPLFEEDVDDEDVQQRGQPESPAIIPVLAFEPHASPDNVDQTLATGTEMATTSLDLESALAGQDRRIQYWKTKFEVAELERTMLAVKKEQAVETLRGHEVCRELRVPHGDPEESAAGYISWLNGACAQLDGVGKRIDEALKQECRRSSRYAGGHVLACLRDHRPHLDLDFLREGFAHSRRTPAEIDHLARSMAPLAEKIFQSMDWRWPSW

SEQ ID NO: 115058 - protein, 520 aa, Oryza sativa
  unsure (1)..(520): unsure at all Xaa locations
  Clone ID: PAT_MRT4530_18690C.1.pep
MDRTWMYNTKRAHPTFLKEATKFVEVAKTHAVRENLRSIFCPCKVCKNEILLQDPNEVLSHIVERGFKKGYEIWTFHGEVGGRNEVTDDFCFDDAENFIIEDMSQGNIPECGGFGIENEGLQKIHACENHCILYRKEFTDLDSCPTCGTSRYKTGNGASDGEVVDKDDAPVDENKKIPRMVMWFLPVKDRLKQLYSNRDDAELMRWHQEGRKNDGKIRHPANARQWKNFNALHPEFAKDPRNKRKYILLSILIQGPRQPGINIDVFLESLMEDMQELWEEGLRMWDEYRREHFTLHAIIFVTINDLPVNFSLSGQFKGKFGCLICIDKMSYKYLTLSTKGVYMRCRRFLPQRHRWHAKARLFDNTVENDLVPETRTGGSVFELRKNIKIVFGKPKKKPVKRKKWMDQENTDAAAEESNLPFKKHSIFFRYLDYWKDLKVRHAIDVMNLEKNMFDSTIGTLLDIPSKTKDGLKSRTDLINLDLRHELQPKELPNVKIDIPPACYSLIPEEKKXLCRCLHSV

SEQ ID NO: 115059 - protein, 89 aa, Oryza sativa
  unsure (1)..(89): unsure at all Xaa locations
  Clone ID: PAT_MRT4530_18691C.1.pep
WCPFAGMCLWRRCVVRPSNCAFPEAHTTISSEGXSGSKSVKCCWLSPRRLVVRAQLRSISYXTVQCRCXQCCEHCDVPVWLESLWYGFE

SEQ ID NO: 115060 - protein, 796 aa, Oryza sativa
  Clone ID: PAT_MRT4530_18692C.1.pep
MAVRSDTPLMLDSGKTLMHYTRNLQRTREMYLDYWKDLEIRHAIDVMHLEKNVFDSTIGTLLHIPSKTKDGLKSWTDLVNLDIRHELHPKELPNGNIDIPPACYSLIPDEKKSLCRCLHSVKVPTGFSANKVFDPEELGPLQIFAIETACQLEMFFPPAYFNMMEHLIVHIIPQIVEIGPLYLHQMWAYERYMSVMKGYVRNRAHPEGSMIEGYITEVVVECCIDYIKDTEPIGVTPLLHEGRLAGTGIVGKKRFYDEDFKDVAEAHSSVLQQLAIVEPYIQEHMNEIRARNPRRTAIWICKEQKRKFPEWLKEKDMPLGDSLKEKTLRRLANCPTSLVTSWQGYDIGGYRFYTMFKVKKSAAQNSGVRVEAFDASDEKKSYYGIIQDIWELDYGLNIQIPVLRCQWVRDTTGVSIDDYGLMVVDRSKLGHKDDPWVLAKRVAQVFYVNDPFDDKMAIAVPGKQNIIGIDSIEDASDYNQYDDVPLFTDFPNRIKEVETSLDEDLFLSARKDGGLGQKFLSPGVFSTDAARLPKSPAALTPPKPLLPPPPPPLLLFSSPTPPPPLHLPPPAPPTSSTTAQNPTKDPGRRRLSADPAIFPEPPAYHLLPKPLTTPTPPSSPIEDAADHLLPKQAPPTDDAGDHLLPELPADHLLPDLLRCLASMFLKAGAGCLSLTFRGAFNRGRASGRPEVGKGEPRGSCHRAPAAADDEQLKGRGRSGPERPSYVTYKYSCSFPAFIAVSWKRGEAEAGMRWPEGVKQSLVLALTVTVCPFLTTPPGNLPAGAFKRWCRPVLPHP

SEQ ID NO: 115061 - protein, 383 aa, Oryza sativa
  Clone ID: PAT_MRT4530_18693C.1.pep
MTVRFDTLPMLDCGKTLKHYTWNLQRTREICLICIDKMSYKYLTSSTKGVYMRHRRFLPQRHRCHVKARLFDNTVENDLAPDTRTGGSVFELTKDIKVVFGKPKKKPIKRKKRTDQENTDAPVEESNLPFKKHSIFFRYLNYWKDLEVRHAIDVMHLEKNVFDSTIGTLLDILSKTKDGLMSWTDLVNLDIRHELHPKELPNGKIDIPPACYSLTPEEKKKLCRCLHSVKVPTGFSANVRKLVSLKDLTISGYNAHDCHKMLTVFLPIAIRAVKPVHTRLVITKLCYFFNRVSQKVFDPEELGPLQKFAIETACQLEMFFPPAYFNMMEHLIIHIVPQIFEIGPLYLHQMLANGPTSLVTSWQGYDIGGYRFYTMFKDKKSTA

SEQ ID NO: 115062 - protein, 1206 aa, Oryza sativa
  Clone ID: PAT_MRT4530_18694C.1.pep
MASRPPRERSRHGPACRSGHAAPTDLGSCLIMPRSSCASRHRFRLVCRRWRDLLDERTPRIHARAKPLAFFTRGRHAAQPGSSAYVYDDDLSGEFVCCRQVWCGGAAVAAGLIMFGCRNGILAMLDERTGDITLANPATGETLAVPPPPRLPRNCAFHRTAVGFGYHPTTGRYKVVHLPVRGEASAFGVVEVFTLRGSNATWREGDIVGALMVHYGVVVAQAPTAPTLSPPLLTVIQRRLAVAITASDVTVIETDTPTVEVWVLHKGRRKQRWINQYRVVGMDTYHKQLTRPYFFFSHGEHYMIITWRFPYISMRAHRLKKGDGEPKEMALLEQGTSIQVFSYVETTETLRRAISGSAWNQVNAGVRLLAARDNRLPRAMHNTKRAHPTFLKEAAKFVELAKAHTVRENLRSIFCPCKVCVQKIHACENHCILYRKEFADLNSCPTCGTSRYKTGNRASDGEAVDKDDAPVDENKKIPRMVMWYVPVKDRLKRLYSNRDDAKLMRWHQEGRKNDGKIRHPADARQWKNFDALHPEFAKDPRNDMQELWEEGLRMWDEYRREHFTLHAIIFVTINDVPTNFSLSGQFKGKFGCLICIDKTSYKYLTSSTKGVYMRHRRFLPQRHRWRAKARLFHNIVENDLAPEIRTGHSVFELTKNIKVVFSKPKKKPVKRKKRTDQDTTDAPLEESNLPFKKHSIFFSTIGTLLDIPSKAKDGLKSRTDLVNLDIRRELHPKELPNGKIDIPPACYSLTPDEKKSLCRCLHSVKVPTGFSANVRKLVSLKDLTISGYNAHDCHKMLTVFLPIAIRAVKPVHTRLVIIKLCYFFNRVSHKVFDSEELGPLQKFAIETACQLEMFFPPAYFNMMEHLIVHIVPQIIEIGPLYIHQMWAYERYMSMLKGYVRNRAHSEGSMIEGYTTEEMVECCIDYMKDAEPIGVTPPLHEGRLAGTGIVGKKRFYDEDFKDVAEAHSSVLQQLAIVEPYIQEHMRKIRARNPRRTAIWICKEQKWKFLEWKKLYAGEQNGPTSLVTSWQGYDIGRYRFYTMFKDRKSAAQNSGVRVEAFDASGEKKSYYGIIQDIWELDYGLNIQIPVLRCQWVRDTTGVFIDDYGLTVVDRSKLGQKDDPWVLAERVAQVFYVSDPSDDKMAIAVPGKQNIIGIDSIEDASDYNQYDDVPLFTDFPNRIKEVETSLDEDLFSSARKDGVSKIVKH

SEQ ID NO: 115063 - protein, 403 aa, Oryza sativa
  Clone ID: PAT_MRT4530_18695C.1.pep
MSHGTIPEYGVSGIENEGIDFDLEDMLRHVELEVLTGNGASDGEVVDKDDAPLDENKKIPRMVMWYLRVKDRLKRLYSNRDDAKLMRWHQEGRKNDVENDLAPETRTGGSVFEMTKNIKVVFGKPKKKPKHSIFFRYLDYWKDLEVRHAIDVMHLEKNVFDSTIGTLLDILSKTKDGFKSRTNLVNLDIRHEHHPKELPNGKIDIPPACYSLTPNENKSLCRCLHSVEVSTGFLANVGKLVSLKDLTISGYNAHDCHKMLIVFLPIAIRAVKPVHTRLVITKLCYFFNRVSQKVFDPEELGPIQKFAIKTACQLEMFFPPAYFNMMEHLIVHIVPQIIEIGPLYLHQMWAYERYMSILKGYVRNRAYPEGSMIEGYTTKEVQIEVGPYGLDKVYLNFSMPGQL

SEQ ID NO: 115064 - protein, 110 aa, Oryza sativa
  Clone ID: PAT_MRT4530_18696C.1.pep
MARRGDRQRLKTLRTRRRRGRFADLQDTATMGPSANGSHHASSEELIWMPSPGVGGRRRREGDTVATAAHGGGGSRHPALARNYVNLDHGMPHGPCALNRPRCEKYDPSF

SEQ ID NO: 115065 - protein, 57 aa, Oryza sativa
  Clone ID: PAT_MRT4530_18697C.1.pep
FFFFASNYWVNSTSHPTHHLMVTRMAPISNIHQGHHPSSHEHTLLPKEGSRSHSRDP

SEQ ID NO: 115066 - protein, 126 aa, Oryza sativa
  Clone ID: PAT_MRT4530_18698C.1.pep
MVIPPPERAARITRFLKPYLLRMHFSNKYVSAQVVHTPTATVACSASSQEKLLRPNMESTRDVAAAAKIGKLLGERLLQKGIPAVCIHMKREQKYHGKAKSERCRIRQEIFISVLRARWPMWRCSW

SEQ ID NO: 115067 - protein, 52 aa, Oryza sativa
  Clone ID: PAT_MRT4530_18699C.1.pep
AQPRKVLLHLLLRPMGPLSIPPLAKSIGWLINLSTSVYKVPPHTMEMLTPSL

SEQ ID NO: 115068 - protein, 100 aa, Oryza sativa
  Clone ID: PAT_MRT4530_1869C.1.pep
QPFKPEYIAPLVLALGRGKGPKNPPGGLYKVGRGWAGQTRWEGPGGQGFPVDVPPPPEEVLKPWKDFVPFDSGAAPPSKAQDSMEKFLSPMENKSGPEKV

SEQ ID NO: 115069 - protein, 98 aa, Oryza sativa
  Clone ID: PAT_MRT4530_186C.1.pep
VLYLPLFIMLTGSYIKTSRAEIHCPMTISNWIPLPLDNDLTYQRSRARTTHTKDRRQKNKKATGPCRRICRRRRRSAQNLATQMCTHIDSTLFRAISH

SEQ ID NO: 115070 - protein, 70 aa, Oryza sativa
  Clone ID: PAT_MRT4530_18700C.1.pep
MAACKAFDQRSPLALRFVSCYVVVSKKFEQLKPCMIIDKIKVTFPAGLYDSAAMHKYNEIHLVRKQNNDE

SEQ ID NO: 115071 - protein, 45 aa, Oryza sativa
  Clone ID: PAT_MRT4530_18701C.1.pep
ATLFSGSFMLLYIYIVVCMLLLCIPISEHLGTAIHGQLHIFHPRA

SEQ ID NO: 115072 - protein, 107 aa, Oryza sativa
  unsure (1)..(107): unsure at all Xaa locations
  Clone ID: PAT_MRT4530_18702C.1.pep
RRRRRRRRDGLRPAPAGAPGGPPRXPPTTPXDEQKXAGXPPREPQXRXXQRNXAXXTXGGGTQRXXXXXHEAPPTGAPEAXXAAXQXXEPXKAAEEDQXGXRXAKNR

SEQ ID NO: 115073 - protein, 85 aa, Oryza sativa
  Clone ID: PAT_MRT4530_18703C.1.pep
MFTEGNCMYENLEQLQSKLRPARRARDYEKLVHIIICKFYNFIEMDRCSASQSGCEGIGDPHIRVIPIVTLNTGLYFYIFIINFE

SEQ ID NO: 115074 - protein, 85 aa, Oryza sativa
  Clone ID: PAT_MRT4530_18704C.1.pep
RRPPDLSWQWSSDPSIHPVTLSPSYTCIPPCASMASSSSSSSISCTICIYLPVASSMARPYLNTIKKLKNLKPQEFSSSSGIFLH

SEQ ID NO: 115075 - protein, 203 aa, Oryza sativa
  Clone ID: PAT_MRT4530_18705C.1.pep
FESLKTPTSKERPAEFVASRANYSKDVEFSPIPENLGTVADEDLWMQLNKGCVTDLEMLEMTPGFKCAPSLADDKASVATPDEEPIDARCQRLEKDCTADRQQLEDSKAWRAALEEERDTLKRENSSLLDALAKARQDADHLVADRLEALRELDMEKSRMDELKQEIKLFSQAFSLRQGQLTSLYTKSKAIVENCKTSQLALP

SEQ ID NO: 115076 - protein, 978 aa, Oryza sativa
  unsure (1)..(978): unsure at all Xaa locations
  Clone ID: PAT_MRT4530_18706C.1.pep
MAIYYLEREGLTHNMPMHGHFYTPLPLNHWHADTTNAADMTRGPMRMWAPHVSGMNFIFFISKEKVLMRVEMVSSPDVLIIPSPPFPSGNTRGGGGGGGGSSPARGPQPAPPHPAPGQHPPLLQPARRARPQAAGGPPGVLAPQPARSAPPPAAPLPRLPRRRLRGHCNRAAQRAADTEPARAPGAEHTARRRQPHPRPLRRHGGHDQAADATDRAHAAAAGGGXQFGAVAPEMSPFSPALHASAEAASPISSRPPPAASSPSPAAQQQQHRTRTNFDELAGGDXRGGGGGFPDAEALAAAAVGEEGASGGAGGNRWPRQETLALLKIRSDMDAAFRDATLKGPLWEEVSRKLAEEGYRRSAKKCKEKFENVHKYYKRTKESRAGRNDGKTYRFFTQLEALHGTAAGVVAAPSPVTSLAPPPATAVGVSGGVRAPAEPPPAVVMGNVMSFSTSNTEEYSDEEDSDDEGTEDMGGGGGDERGKRKRLSEGGAAAGVGGGGGGGGGSGKMMRFFEGLMKQVMERQEAMQQRFLEAIEKREQDRMIREEAWRRQEMARLAREQEILAQERAMAASRDAAVVSFIQKITGQTIPMPPIIAAPAITVMPPPAPSQXPPPVPQPKRRGQPQPPPPPPQPPPITSAPHQQQQQQPQLKXTKSPLPVTPRXQHATCGLMTRRQAAEGHDDNCGVRGGGGGQPSSSRWPKAEVHALIQLRSNLDNRYQEAGPKGPLWEEISAGMRRLGYSRSSKRCKEKWENINKYFKKVKESNKKRPEDSKTCPYFHQLDALYRNKAALNSSSSSAAAAAPXALPPPEHAEPAVTVAAPISQTPPPPPPQPVTTTKNGNGTSSTNGANGEGGGGGSGGMQMQASNGSVVAGNKFFTGAAAXAKAEDIVKEMMEQTPQQFTTDGTDSDNMDEDDEDDYDDDDDDVKMQYGIQFQNQNPAAASTAXTAGGNPGTRGPHHGADEHPPTTGSGSFLAMVQ

SEQ ID NO: 115077 - protein, 59 aa, Oryza sativa
  Clone ID: PAT_MRT4530_18707C.1.pep
NIKAINTNDVSSYFLAPDEISDNVLLVLADGLFDLSTNLRVLQLSHCAFSFASPPFIGC

SEQ ID NO: 115078 - protein, 553 aa, Oryza sativa
  Clone ID: PAT_MRT4530_18708C.1.pep
MEEGRRGDREGKSAAGWTALSTTKTTLEEKRRLQANGSVGGDAGTSGFRRIVRLFFACMVAGGIQYGWALQLSLLSPYSQTLGISHSYVSLTWICGPIAGFVVQPIVGYYSDRCTMKMGRRRPFILVGCLIICISVMIIGFSADIGRHLGDTKEHCSTYTGPRWSAAMVYIVGFWFLDFANNTVQGPARAMMADLSAGHHGPNVGQSIFSLWMAIGSVLGYLSGANGKWHDICAVLANYGVRSIAPFVRWFPWLKTAACCDACANLKGAFFTAVLLIVVSMTVTMYLADEMPLDKQDVDTSGGGGCAVFVDLFKSLRNLPPAMFKVLAVTAVTWLSWFPFIQYNTDWMGREIYHGEPQGTAAKADVYDAGVREGAMGLLFCSVALGVTSFVIPKLCRRLTSKVVWSISNFLVFALMAVMVAVGMVSMRGYRPSLAAGLTGPDPTLKAVALVVFALIGIPQAVLFSVPWAVASEVTAEEGGGQGLAIGVLNIAIVVPQLVIALTAGPIDGAFNKGNTPAFGIGGAFAFICGVLALIWLPKTRGVSNAAVVAGGH

SEQ ID NO: 115079 - protein, 296 aa, Oryza sativa
  unsure (1)..(296): unsure at all Xaa locations
  Clone ID: PAT_MRT4530_18709C.1.pep
GLDKESAMYLNTSTGGSFAHKTTLESRELLDCILENTSFVRCETVLKIKNTREEPSTTELKVEEIQPLKFPFQFDDDLFEHYGNTSNYSYQKRPPVPCNSPAPLDENLFKETVQKLTTIMSDEWLMEMEVSSEVIHISSQSLTIPYLMSGKMVFFILILRLKNSMMEPIPDSEPIEEVMAISPFEAPESLLENDANAFVEEXDDHREMIELPKTDPHSXPPDELKSLLSGFPYTFLHGDTESPVTISDKLSTDETSNLKDVLEKHRSVLGYSLQDLKGIGLDQRSTITGASLLVLL

SEQ ID NO: 115080 - protein, 976 aa, Oryza sativa
  unsure (1)..(976): unsure at all Xaa locations
  Clone ID: PAT_MRT4530_1870C.1.pep
GRRRPRRAQAVGHVGERVAVQLQDVGKQRRGDIHRGGGGSEPAAAAAXAAADKVFVAVAADVKYGKSALQWTLQNLAKDGAKVVIAHVHCPAQMIPMMGAKVHYTKMNTKQVNDYRNKEREKAEEKLDEYLLICRKLKVSCEKLIIEEDDIAKGLTDLVALHGVTKLVMGAAADKHYSRKMNTPKSKTALKILEAADPSCKIWFTCKGHLICTREANTTVPAIPPSPAHTVASTLSSSSISSRMRSMSLHPSESEASSSSGSPRHNLNRSRTEVAKYPSQGSGTAPSQLFGHSDQDVNDQPTRTAMGSIDSWDEFERSQNSCYDSSRNSDTVRVSGSAMQQPMYEPDDDHFVSPRKLENSGDDADIYGRLQEALSETQDLKRETYEESTKRRNAERNLISALQKASHFASKVKELENLYQKEVMHRKITEEALEKQIQETEETERHCNALYDKLHDVEEQKLMVEQHITEMEAVLKEREDRLHDVEEQKFTVEQRITEMQAVLKEHKDKLHDVEEQKLMVEHRITEIRSVLKEREEKLAESKYLLQVLQADKEKLQQERDAAVSESQDLRLKNKQRISMPGEDLNTEFSSYELEQATRGFDXELKIGEGGFGSVYKGTLRNTTVAIKLLHPHSMQGQSEFDQEIAVLSRVRHPNLVTLIGSCREAFGLVYEFLPKGSLEDRLACLNNTPPLTWQVRTRIIYEMCSALSFLHSNKPHPIVHGDLKPANILLDANFVSKLGDFGICRLLIQTNTGAAAAATTRLYRTTTPKGTFAYMDPEFLTTGELTPRSDVYSLGIIILRLLTGKPPQKIAEVVEDAIESGGLHSILDPSAGSWPFVQANQLAHLGLRCAEMSRRRRPDLATDVWKVVEPLMKAASLTAGRPSFVARPDDSPPPSYFVCPIFQEEMNDPHIAADGFTYEAEAIKGWLDSGHDTSPMTNLTLEHRELIPNRALRSAILEWQQQRQRHQPQEEDDDCT

SEQ ID NO: 115081 - protein, 84 aa, Oryza sativa
  unsure (1)..(84): unsure at all Xaa locations
  Clone ID: PAT_MRT4530_18710C.1.pep
ISGMGMFKVIRADQKRFFFSLGSNNRGHFLRIFXVAGADRFSIILPLSGLKQFHEMVGPFVNIKKDRLEGITGANVRPVESRQK

SEQ ID NO: 115082 - protein, 138 aa, Oryza sativa
  Clone ID: PAT_MRT4530_18711C.1.pep
MIKPIRRHERCRSPLLSCCLHNRGHGYSNSFTLIRDVPHSALFRDHSLPLITRGNGVPSDPHGLLAVQETTPDDDVRRPAMRTNGGAARLDDGGGVPAACDDGEGATEVLLHRANPAAATDSDDGDASGGAARSGATG

SEQ ID NO: 115083 - protein, 116 aa, Oryza sativa
  Clone ID: PAT_MRT4530_18712C.1.pep
FFFFFLPYQIINHNFYIANSRTGKKTEQGVHQHGSSCKCIFRRPNYEETVSYLQCTYDSLVTACHALECTSQSRTKTKNFPRRKSLKKNLCICIRVSSHNVRLRHYTALFDGPLLT

SEQ ID NO: 115084 - protein, 25 aa, Oryza sativa
  unsure (1)..(25): unsure at all Xaa locations
  Clone ID: PAT_MRT4530_18713C.1.pep
KREGDDVDYPDTWGPSGSXXDSAAT

SEQ ID NO: 115085 - protein, 92 aa, Oryza sativa
  Clone ID: PAT_MRT4530_18714C.1.pep
TWSDSSSSGLTVSPSPEALMATVATITSAHTSESGMRFTDTQCHRAVPASRVDAPPPVLDRTLTSRQRVQSLIRPPGTLPLRLHSSQPTHDA

SEQ ID NO: 115086 - protein, 540 aa, Oryza sativa
  Clone ID: PAT_MRT4530_18715C.1.pep
MVQLPSSGKRPAEPAMAAASAAGATVKLEADEMLHGGEEDGGPLSKRAKAGVQMPAPPPPPPPPQQQDMYHNVLDEPSPLGLRLRKSPSLLDLIQMRLSQANSTAGQSSADDCSSEPPKKKDLKSGTSTAGERLKASNFPANILRIGTWEYISRYEGDLVAKCYFAKHKLVWEVLEGGLKSKIEIQWSDITALKASCPENGQGTLDVVLARPPLFFKETDPQPRKHTLWQATSDFTGGQASMNRRHFLQCPSSLLSKNFEKLLQCDQRLNQLSQQPDIILDSPVFEPRCSIFEDPVESKCQGFTNLKDEHELSGFSGSLSPCAGSSMSAKIEVNDSIATQAGFLAQPGNPGPSAVNVQGVSRNVNGAPELNIPSWWSQLKVPGLRPSMSVDDLVNHLGNCISEQITSVNPTLPSNEVPTKETLEEIAQYLLGDAQGPPASTSDERSLMARVDSLCCLIQKDTPPVAQPKPEPNDSDSIGGDGTEGSDEEFSSAASTVKTTGPAQPPAMSRKDSFGDLLMNLPRIASLPQFLFKIPEDSEN

SEQ ID NO: 115087 - protein, 1041 aa, Oryza sativa
  Clone ID: PAT_MRT4530_18716C.1.pep
MEFATGVMSTLLSKLAELLKEQYDLQKSVKEGVTFLMAELKSIQAALEKVSKVPLDQLDEQTKIWAWDIRELSYDMEDNIDTFMLRVDGLEPAKKHNFTCLVDKCQKSLSKIKICNKIANEIKDIKSQVKEVMERRDRYKIDDVATNLSTFVDPRILTLYGNVTKLVGIDKARDDLMKRLSVGDEALKKLKMVSVVRIGGLGKTTLSKVVFDMLKLQFDCAAFVPVGQSPEIKKVLKDILVELNKQKYMSFDVTAVSERHMINELREYVDNKSEVAEEFGGVYIMEPLSDDNSKKLFYSRIFGSTYNGSTEDHLIGMDTLIWKWVAEGFIQEEQDKELFEVGKRLSSQRTNVRRIALHDNWNQLKNNDLDVALTQLRSFNAIECLKELPSTICKLSKLMRLCVAGGMSVPMGVGNLSSLQYLKLGWDSIKSNKYFAMEVGKLMELRILNICVDNEIDESMKKALLESLCGLRKLQNLVIDFDLIFWNTMSVWEGWDHWEPPRQLRDFHISSMYLPRLPAWVNPMCIPYLSDLQLYVIAMEARDLDMLARMPALRTLILRTRQRISWTVGGTGLFPNLRFCEMNIALTFLQGAMPMLTELQFELWAAEDGAAAGDVGLGQLPLLNYIGLLLMCTGATGRQVEEAEVAWRRMDEEIYMDQPNGFVVEGQEGKVCKLLKSLYGLKQAPKQWHEKFDRTLTSSGFAVNEADKCVYYRHGGGEGVILCLYVDDILIFGTNLEVINESHYVEKILNRFGYIDSKPSPTPYDPSLLLRKNKRIARNQLEYSQIIGSLMYLASATRPDISFAVSKLSREDAVLQSILERTHLCELDCWSQSMKILGESSRKLTKDLGVSGTSAFDVLHREKVVIKFLGSVLRDCFQFVRDGSSSPSLVCCAPSSTSTTASDSCRATATFILNTVLAPSLGLPSSPQAAKEAEKVLFRSLGLIESMWLKGNAKFLLGNPQLSIADLSLVCEIMQLEVLGDSERDRILGPHEKIRSWVQNVKKATSPHFDEVHELIFKMKERMAAKRQSEPSKDLKTASKL

SEQ ID NO: 115088 - protein, 94 aa, Oryza sativa
  Clone ID: PAT_MRT4530_18717C.1.pep
MAAAVACERVQNPTLRPEDSSMLPPPALDLAGTVSLVLPPCLSVALGAASSGPELKGAGSGRPELKRTGSGYPELAPNKSKDEGKRSIGWRQWQ

SEQ ID NO: 115089 - protein, 388 aa, Oryza sativa
  Clone ID: PAT_MRT4530_18718C.1.pep
MTKHGAVVVPEDAVVAAAAVGRHFSFPPPRTGGVGGDSCKKLAAQQIDLGAAVIGSWLDSMKASSPRHRLVAPAVAAAAADAEHDEWMEKHPSALGKFEALAAAAKGKRIVVFLDYDGTLSPIVEDPDRAVMTDEMRDAVRGVAARFPTDTCASFSLRDPGEPSIVSGRCRDKVLSFVGLEELYYAGSHGMDIQGPTNAAASKGGEEEEESVLCQPAREFLPMIGEAYAALVEKVEGVIPGAKVENNKFCLSVHFRRVDERRWGAVADQVRAVLRGYPRLRLTQGRKVLEVRPAIKWDKGEALRFLLSALGFSAAGDVEDDGDDDDAFPIYIGDDRTDEDAFRVLRARGHGAGILVSRFPKDTCASFSLRDPGEVKDFLRKLVTCAAA

SEQ ID NO: 115090 - protein, 49 aa, Oryza sativa
  Clone ID: PAT_MRT4530_18719C.1.pep
MPARDAISAKHEDAASGRRSNTATQSFRSASRRPSARRLALTVSPRASA

SEQ ID NO: 115091 - protein, 376 aa, Oryza sativa
  unsure (1)..(376): unsure at all Xaa locations
  Clone ID: PAT_MRT4530_1871C.1.pep
MDISRTNEGYTSCGPVVEMSWHRAGVLLLGAQSCLPVPGVPAVGGIGSATVGIAKSSLSSSAASPSPKIAGAPSPPSTRSPPPFQPRRRRRPLLLRRSFASVCRPSRRAAAAGGDVIADVIVALSREPSTRLRSGGDKPTGVARESMPLVFEGGDYDPGMWYTSGQSKTIRIAVPAVMGGLSNPGMVVQDGWACAAFMLQELLFWVWEKLSKTEYNHHRTGNPTLGPSSSQANPGQPFHLLVVKQPRGEGARTGSTGVGPTRQPHGPRWTGCTRLTPAGAVGPMRQPHPRARAADGRAPHGSRGTRPKAATPAQPTGGGALAPRWSPPATTGAAERRPKEGREGGSESAVHGSPRVDGDDGNGDXRSGGRRRRGSG

SEQ ID NO: 115092 - protein, 112 aa, Oryza sativa
  Clone ID: PAT_MRT4530_18720C.1.pep
MKDRAISNDEDDIRKEYMGNKREWLSGYWTGFKSPEQISRIRTPGGKPETIKPAGEAMTTLAESDKPDRSVKKTLELRREKIETGERIDWAVGGVLAYAALIIEGNHGWLCG

SEQ ID NO: 115093 - protein, 67 aa, Oryza sativa
  unsure (1)..(67): unsure at all Xaa locations
  Clone ID: PAT_MRT4530_18721C.1.pep
VDQGPLDGVVLVHVRSLQWXFKGNDTVIVVQYTVQVLWIVHGWIFSGGPAAQAVLVFEPGAPPPDEN

SEQ ID NO: 115094 - protein, 92 aa, Oryza sativa
  Clone ID: PAT_MRT4530_18722C.1.pep
MSIPTGHNKGKKGKDRTGLSSASIATHWKLKLLDNAHELWERLLLDSSGARAKLESSLRQVELEQLVGSGSVRRACSARAAKPQSIKAIKLG

SEQ ID NO: 115095 - protein, 565 aa, Oryza sativa
  Clone ID: PAT_MRT4530_18723C.1.pep
MARANDSHSVTIPDGMFPTPHMEDAAAGASSDTKPAAGTNTPTSTPKDDGSKPAAAQDNVLSASANLAQLLPTGSVMAYQALSSSFNNHGECYTSNWWLTVSLVTFLTVFCIFFAFTDSITHKGKVYYGVAMSERLRIFNIEVGDSIADEEGKLIIMPEQGKDLTQEQREVLNQLKKRKLHWLDGVHAFFTAVVFLSVAFSDVGLQKCLFPHAGHDTMELLKNMPLGMSFLSSFVFMIFPTTRHGIGFSDSSTTASSKDASRKVADIYTMTSDQNRRESSNNAASNVANHKNINGNEENANSKPAAQDKVLSASANLAQLLPTGSVMAYQALSPSFNNHGECYTSNWWLTVSLVTFLTVFCIFFAITDTIYYNGKVYYGVAMRGGLKIFNKEDNDPNFYIEPDNKKENENKNGTATELQAVGQQKSPSSSNESEHNGEKKGKLTWLTSIFEKKGGEKVKQDNKLTAEKELKDKLERMKLNWLDGLHAFFTAVVFLSVAFSDVGLQRCLFPDAGHDTMELLKNMPLGMSFLSSFVFMIFPTTRSGIGFSNPTSKGDDKAKPHANAK

SEQ ID NO: 115096 - protein, 600 aa, Oryza sativa
  Clone ID: PAT_MRT4530_18724C.1.pep
MDDYLARFAYLTVLKVPATFTIGLIPYNGPRPEKHNHVPLRLQRMPLAIKLYRLTEQTIGVSNIDDLVKVFYHWSHLSVARKWLEWVVDYHQCTLESLEKDLAVRVKWGSNQHAVISGYDMGTGEETPFKDNMDVAHALFVRKSDRKLILFVDVEDKPIQLMTNSVVSEVNEVAMGEVVTDRQGDVQECSSCIDWDSLEIAPIPHNQVPQLAIDWDALEIEPIPQHQLGSSMPSMEEDEMHTFVGLRAEDGRAEQARLEAKRQRNSVPTPEMILRWKLEAHICRPYLSIDSTALNGSWNGQLGSATSIDGHNWMFPVAFGFFQSETTGNWTWFMQQLHKAIGKQPHLAISSDACKGLENVVKSVFSTAEHRECFWHLMQNFIKKFHGSVFGNMYPAARSYMTDRYEYYMNKIHEAKSDVKPYLETYHGLLWMRIRQLNAMTRDLGHLKVVQEHTCTCREWQVSGKPCPHALALIISARNPRMADYLDPCYSVEKKSRAKQGRPLGSTSDAAGSSTPKRQKVAINDSSNASPGPVTRRWDQGKTVPEKKRKIENEKEKEKDGQEQKKNVAPSKRKSQKDKTMGGKSCNDEVQNSSKKMKKN

SEQ ID NO: 115097 - protein, 1018 aa, Oryza sativa
  Clone ID: PAT_MRT4530_18726C.1.pep
MWVPFRRRLRMGYGIQFVGSHQMWAPTVHPTPPIAATDHSNAAAAAAASEVRSSKRRMEHSPHLFDGAAPKFRRDERMAAPPREATWVILACVPSVSSSDGDFEAGDHLAFDWRDPPGVSLLTLRQSDSVFVSPAPRDFCPDRDDHPYVVAVDSAGGLLLRGARRSAHDFGPGVALGFDPAPSCANDGGYILCHATLRMAYLYPPCSDEYRLLYAGNVGMIRRTAADGDHPIRLLAELQIESGNGIHRATLLRYSQELGLGGWASTKVNYPPGRRSWCGDGVIVHAGMLWWVDLSFGLLTCDAFAAKPDMRFVPLPEGCKLPYSSDADHAKHRCVNVSDGELAFVQIHDYDTAAGRGAPSTIMISMWTLQQSDAGEESVWSLRHRVRVDEIWDHVTYRKTMMPRRVPVLALLHPKELGVVFFFQITSRNSWMFAVDLVTRIVLECKKYKMPQLPTMYHSSRHNLTDELDLNFSRDKADELLSTTGRLFINPRFQELRNATAFPKYLSFVIVKATDAYEASCLMRDFVSHVSMDGSNIVPRVSVHPTPPIAATDHSNAAAAAAASEVRSSKRRMEHSPHLFDGAAPKFRRDERMAAPPREATWVILACVPSVSSSDSDFEAGDHLAFDWRDPPGVSLLTLRQSDSVPVSPAPRDFCPDRDDHPYVVAVDSAGGLLLRGARRSAHDFGPGVALGFDPAPSCTNDGGYILCHATLRMAYLYPPCSDEYRLLCAGNVGMIRRTADRDHPIRLLAELQIESGNGIHRATLLRYSHELGLGGWASTKVNYPPGRRSWCGDGVIVHAGMLWWVDLSFGLLTCDVFAAKPDMRFVPLPEGCKLPYSSDADHAKHRCVNVSDGELAFVQIHDYDTAAGRGAPSTIMISMWTLQQSDAGEESVWSLRHRVRVDEIWDHVTYRKTMMPRRVPVLALLHPKELGVVFFFQITSRNSWMFAVDLVTRIVLECKKYKMPQLPTMYHSSRHNLTDELDLNFSSDKADELLSTTGRLFINPRFQELRNATAFPK

SEQ ID NO: 115098 - protein, 79 aa, Oryza sativa
  Clone ID: PAT_MRT4530_18727C.1.pep
MSKKNNLAKRKKQHEFDLQREKEAKEKLAKKLQAKKSKMKIDGDVKRKGGKFKVGKKKVKTKLSALTKAKAAQALEVDK

SEQ ID NO: 115099 - protein, 90 aa, Oryza sativa
  Clone ID: PAT_MRT4530_18728C.1.pep
MVASDDGCLWRGSMVVAAVEPPPYVTGREASWNNVGVETGTREEVEQTWWAGALVQGVEDRCLETPKSIKTKRTGTREVHRIVYLLKSSF

SEQ ID NO: 115100 - protein, 196 aa, Oryza sativa
  Clone ID: PAT_MRT4530_18729C.1.pep
MASSPYHAAVGVAVLAILLAAPAAEAGAPTAAPLANYSLEDACKKTGPHYGLCIVTLSADRSAKSSDTVGLARVAVLAAQKNASETATYLSSIYDDDSIEKKTVQLQQCLEDCSERYEAAVEQLTDATVALDTGGYEEAMALVAAGQAEVKMCQRGFKAVPQHRNILTLRNREVDQLCSIAFTITKLIRVSPSAEE

SEQ ID NO: 115101 - protein, 259 aa, Oryza sativa
  Clone ID: PAT_MRT4530_1872C.1.pep
MEREVFGSNPQPILGRMVAIEDYVLCGFLPPPSEFLLLVLNFYGLSLLHLNPNSIAFLSIFVHLCEAYIGVEPFLDLFRFYYELRWMESNRVSGCVGFRLRDGLKLRYVPFQCPSSRSKWRNRWFYLEIKNSNPVFVVPEDQPDKIPSWTAKPPLTPSLQSFIDIIDDLRVRGLSGYEVVADFVGLSGETVERRVGQVMISGPTTASDIPMPLCEKGAAERDEAINVASSLKVKVVKEVSDAATTSGGSVPTKPRKFSS

SEQ ID NO: 115102 - protein, 481 aa, Oryza sativa
  Clone ID: PAT_MRT4530_18730C.1.pep
MEAAGAGGRRGTVKQLNVGGKLFALEASSLPISLSLSPSPNPIFVDRDPALLSAILSAIRAPSAAPAFPAGVLLDEAHSYGLQDQLLAALSPPPLLGFSASRASTLSPPSEPFPTALAPRHDGSLCLAHGAGLLTHYSPALEHLTTFRTHLHRITSLRQLPPGLAVAGSSLSPGLHVYDLLKGRHVASVQWSDPTDLRVQKAKVIAIAARPAADAADKNSPILATFECPHRENCILVFDPVTLKPIQEIGRQTGSAAKSSAPGRVVHLQELGLVFAASVSSGAFGYSGYMRLWDIRSGDVVWETSEPGGVGRSSRFGDPFADVDVDVKQQILYKVCSKSGDIGAADLRCLGKDPWVYMSSGPRGSGGGHGSVLHCYKSQAAVSRKDGLEVWSRLEEQSNGTANLAEQTRAKENINNEGINENCFRSCYVDTEEDADRGMIHIMEGGGDRLFVTREEMQGVEVWETSQLAGAISLSLSSLLV

SEQ ID NO: 115103 - protein, 50 aa, Oryza sativa
  unsure (1)..(50): unsure at all Xaa locations
  Clone ID: PAT_MRT4530_18731C.1.pep
RFLSPCXXCAAGLLLNITYSLPCASXIKLYLFXILSXHKQLLGSTHFKSK

SEQ ID NO: 115104 - protein, 788 aa, Oryza sativa
  Clone ID: PAT_MRT4530_18732C.1.pep
MTAQPKKRSVIESGDGGLGLGLALFISNGEDLGPIIRHGFDSGKPEALMQNLRSIVKKKEVEIEELCRLHYEDFILAVDELRGVLVDADELKGMLTGENIHLQKVSSATLLNLDELFELYSIKKNIGEAITTLKICVKVISLCMACNGYIAEAKFHPALKTLDTIEKGYLKNIPLKLLKKVVAKHIPLIKMHIEKKVCSEFNDWLVHIRRMAKQIGQVSISQASMARQKDEEMRARKREAEAHSDARSDEHVYTLDVENTDEESTLNFDLTPVYRAHHMHICLGIGEKFRDYYYKNRLMQLNLDMQISTSQPFLESHQPLLAQVAGFFIVEQRVLRSADGLLSESQVESTWETAIAKITSILEDQFARMSIASHLLLVKDYVTLLGTTVSKYGYQIAQLIQVIAKYKDKYHQLLLIESRKQIDDILANDSYEQMIIKKEYEYNMNVTAFHFEPDDVVPEFPYVAPFSSGVPDICRIVRSFIGDSVSYFSYSARTNIYEIVKGYLDRLLIEVLNDSLLNMVYARSLAMSQMMQLAGNISVLEQSCDMFLLYSAQLCGIPKRIAQRSHSGLTAKAVLKASQNAAYNSLINLANFKIDEFMVLLDDVNWIVEEAPDNPNEYMNEVLIYLETLVSTAQEILPLEALYKMVSGAMSHISDSIMTTLLNEGVKRFTVNAVMGLDIDLKLLEAFAEEKFYRTGLVDLGKETTFADCLVEIRQLVNLLLSSQPENFMNPVIRGRNYGSLDYKKVAIVCDKYKDFADGLFGSLSNRNKQDARKRSMDVLKRRLKDFS

SEQ ID NO: 115105 - protein, 147 aa, Oryza sativa
  Clone ID: PAT_MRT4530_18733C.1.pep
MVNLRTQKRLASAVIGCGERKIWLDPNEQSEISNANSRQTIRKLISDGLIIRKPVTQHSRSRARELNLARREGRHRGYGKRKGTADARMPSQVLWMRRLRVLRRLLVKYRASGKIDKHLYHELYHSSKGNAFKHQRALVDHIHRAKA

SEQ ID NO: 115106 - protein, 126 aa, Oryza sativa
  Clone ID: PAT_MRT4530_18734C.1.pep
MSASKHSSLAGAGVLPPGDGTLVPTSMFPRRACLRRKWRWSRYDYGSVAVLVPRLQMIEGHLLTGSQPVDRSDLSYICFKWSSYDYCLVLDQRCSVSPTTSTLSGRVTTTAWSSTSDVASLRLLPL

SEQ ID NO: 115107 - protein, 87 aa, Oryza sativa
  Clone ID: PAT_MRT4530_18735C.1.pep
GPKRANFNGQCNNRNDRGQNLTRTKRARFLKCKFGKPPLNEGYFFLGGALGTLAPGGALFSTFLMTPTTTGWLMAPPGKPPKGGAPK

SEQ ID NO: 115108 - protein, 46 aa, Oryza sativa
  unsure (1)..(46): unsure at all Xaa locations
  Clone ID: PAT_MRT4530_18736C.1.pep
DDLSSLADGFMCNIDTIAHQAICCTLTRCCHSXFFNQXLLYXXFFK

SEQ ID NO: 115109 - protein, 139 aa, Oryza sativa
  unsure (1)..(139): unsure at all Xaa locations
  Clone ID: PAT_MRT4530_18737C.1.pep
KTKKXPXFPXSXNPFPPKKGGRGGFPPXPFXPXXPXKXKKPAQKEKPKKKTPXXKXKIXPPAPGPGPAPARPXPNPQKTXXGGPPPNPTXXQXFXFXPRGXPAPPXPGALPQNQKNQKSPFKPLAPHSLKEIFQPNFKF

SEQ ID NO: 115110 - protein, 50 aa, Oryza sativa
  Clone ID: PAT_MRT4530_18738C.1.pep
NGRDHKPFRHAATAGGLILVTLSKCTCHVLPLNLNFFSRGSAIYITKFSV

SEQ ID NO: 115111 - protein, 76 aa, Oryza sativa
  Clone ID: PAT_MRT4530_18739C.1.pep
SGRARPLICVVHAQWGSHNFSSDSDHPRPTQLDPGRFPRPAAIPMTYCSSPASVDCKTGRPRHTPSLTSNQQKSFP

SEQ ID NO: 115112 - protein, 169 aa, Oryza sativa
  Clone ID: PAT_MRT4530_1873C.1.pep
MAWHAWWMVGGGLPGTERSPHTIQNYYSRWTTACWNVVEEEPAAKAAESLPTFGLQLQGGDSFQSQTVNQIEKERESLPTPGEAPPLHFRLYRADPSRGTQGRMVLDSIHRSGRRRSNGRRLQPPSPPRRRWLRSAPRGWTHGIVCAAAALKPPQPIKLSSWAFGSHAA

SEQ ID NO: 115113 - protein, 116 aa, Oryza sativa
  unsure (1)..(116): unsure at all Xaa locations
  Clone ID: PAT_MRT4530_18740C.1.pep
TSGQPPWLPPAVAAHDCRRIRPPPPLRTPTPGRGTPPVARHRRXSHGRTPPLVPPASPRYAAPRHPLHFPPPPPEPPSHREAKPHLSPPPLPPPAAPHRLSGPPRAAPSPYPAPQP

SEQ ID NO: 115114 - protein, 149 aa, Oryza sativa
  unsure (1)..(149): unsure at all Xaa locations
  Clone ID: PAT_MRT4530_18741C.1.pep
QRHDCLGRLAEGVGDGSIXPARRRLVEGSEAGLAQKGAANGSGGRLGARGVSGGEGGRLGARDAADGGRPDXRERRVRWRRPAWHERRGLQWRRRPRCEEELPVDVARXLAHDGWPAGDXVQGSHMSTELVWWWNIGVLVVDSHVVSGG

SEQ ID NO: 115115 - protein, 480 aa, Oryza sativa
  unsure (1)..(480): unsure at all Xaa locations
  Clone ID: PAT_MRT4530_18742C.1.pep
MHFLNVHASHRASLTPSSSTLPWTADRRAVGSQSGIDEPSHQCRIRDANGCELRSTTLLKRWNNSKAEYNHRTQQATPMMQTCKGIQGRVSPPLLARQREVPSCAAVNPAAGQPDTPADPTPSHPPSPPVPRKGTSYTLDQAVTHSCLXISTKRTVADVNKGSRRDMRVPHVSDTRGRAHSEHGPRGRDDXRGPGPRKWSTGATYIGKRGGWLVGQPDKAAAAHAGRPPATAARRGQGGGGGGEKGGEMEGELTERHGGEGQQAAGTPSREDGTGGLGRRPAVRNGRLRRGTTXEGGREVRMGKGGPRQRGRRSGCRAAHDGCGAGXRRRRSARWTREAMRRGXGGNGGGERWXTGRGRDRHSDADDGGGAARRPLGRQXRAAGGGEWRXWLGLAVGRWFRRWRRKMKWMPRCGIARRSRWDQRRRAAVALAAVAXTGGSPASGGARGRRGESEGGDGKLGGGGKTNEGSTGRVYIGSGG

SEQ ID NO: 115116 - protein, 154 aa, Oryza sativa
  unsure (1)..(154): unsure at all Xaa locations
  Clone ID: PAT_MRT4530_18743C.1.pep
AGEDGDVGWHTGTAEGAAGVGADETEGEAARATAFRRNSVDAVAWPGKRMAPRCRGRRRRRQPPHRRGGTGGWRRWSGGDTTXVDEDTVSASFGRGDGEAGEGGGIAEPREATEGVPFYMMGEGAGHGRGGNGGGKVGWRPWKAAGIGAGVSGD

SEQ ID NO: 115117 - protein, 108 aa, Oryza sativa
  Clone ID: PAT_MRT4530_18744C.1.pep
LFVVLVGSFLAAAALLLLGGAGASYGRGAMDAATGGEHLAQHERRGAALGGVNGATGLAVWSEARRRATEWHKLDTQGTRYQSIPRYQDLIPRYQGLIHRYQLDTQGT

SEQ ID NO: 115118 - protein, 843 aa, Oryza sativa
  Clone ID: PAT_MRT4530_18745C.1.pep
MGRGCLAALLGGAVAVAVLVAVVHCAVTYDKKAVLVDGQRRILFSGSIHYPRSTPEMWDGLIEKAKDGGLDVIQTYVFWNGHEPTPGNYNFEGRYDLVRFIKTVQKAGMFVHLRIGPYICGEWNFGGFPVWLKYVPGISFRTDNEPFKNAMQGFTEKIVGMMKSENLFASQGGPIILSQIENEYGPEGKEFGAAGKAYINWAAKMAVGLDTGVPWVMCKEDDAPDPVINACNGFYCDTFSPNKPYKPTMWTEAWSGWFTEFGGTIRQRPVEDLAFGVARFVQKGGSFINYYMYHGGTNFGRTAGGPFITTSYDYDAPLDEYGLAREPKFGHLKELHRAVKLCEQPLVSADPTVTTLGSMQEAHVFRSSSGCAAFLANYNSNSYAKVIFNNENYSLPPWSISILPDCKNVVFNTATVGVQTNQMQMWADGASSMMWEKYDEEVDSLAAAPLLTSTGLLEQLNVTRDTSDYLWYITRVEVDPSEKFLQGGTPLSLTVQSAGHALHVFINGQLQGSAYGTREDRKISYSGNANLRAGTNKVALLSVACGLPNVGVHYETWNTGVVGPVVIHGLDEGSRDLTWQTWSYQFQVGLKGEQMNLNSLEGSGSVEWMQGSLVAQNQQPLAWYRAYFDTPSGDEPLALDMGSMGKGQIWINGQSIGRYWTAYAEGDCKGCHYTGSYRAPKCQAGCGQPTQRWYHVPRSWLQPTRNLLVVFEELGGDSSKIALAKRTVSGVCADVSEYHPNIKNWQIESYGEPEFHTAKVHLKCAPGQTISAIKFASFGTPLGTCGTFQQGECHSINSNSVLEKKCIGLQRCVVAISPSNFGGDPCPEVMKRVAVEAVCSTAA

SEQ ID NO: 115119 - protein, 40 aa, Oryza sativa
  Clone ID: PAT_MRT4530_18746C.1.pep
MARQSKCGQGLKNGLLGNSRTDPQSHTQLHRQFHPQWNGD

SEQ ID NO: 115120 - protein, 63 aa, Oryza sativa
  Clone ID: PAT_MRT4530_18747C.1.pep
AQKFFGNNLSTLYASVICLLSHWIAEHSDFCSGTHKNKSDTTRGERVTLSISHGGTGTSYAGG

SEQ ID NO: 115121 - protein, 73 aa, Oryza sativa
  unsure (1)..(73): unsure at all Xaa locations
  Clone ID: PAT_MRT4530_18748C.1.pep
PFITHISLHNSLFLSLTIYLINNHNPFSTTNPQPSXSTIYKNTLPSLLHFPPPPPPNYQIIPKTNPPPPLIXT

SEQ ID NO: 115122 - protein, 66 aa, Oryza sativa
  Clone ID: PAT_MRT4530_18749C.1.pep
MTVKAKPKKHTAKEIAAKIDAATTNRGGGKAGQNDRLVHDKGRHAKLECPLCKSTRHDIKFMQIHH

SEQ ID NO: 115123 - protein, 1160 aa, Oryza sativa
  Clone ID: PAT_MRT4530_1874C.1.pep
MAGNENAVGTTRDDSMSKDPPAEVEIETSTTSEPEKDSSAAKPCLSDRNHEPTRITSEVYSTVLYAAGADGNVLANYLPTALKGSARSWLMHLLPYSISSWADLWQQFVANFEGTYKRHAIEDDLHALTQNPSESLRDYVRRFNECRNTIPGITDASVIRAFKSGIRDRYTTQELATRHVTTTRRLLEIVDRCAHADDALRHKNDKPKTRGEKKPAKDAPKSSKKKNHKSRKRKAQSEVLATEYADPPKRPDPQGSDAKKIWCPIHMSDRHSLEDCLVFKKSLAKHMALVKGKRVLVVEKDAEAVTQESDSAYPDSDLHVSHIFGGSTAYSSKREYKKGAAPKMKWSEQKIEFSEEDHPRTAVIPGQYPIVVEPTIRNIKVARVLIDGGSSINLLFASTLDAIRIPRSELTPTNQPFHEITPQSSSKPLGKITLPVTFSQANNFRTEQITFDVAEFDTAYSAIIGRTALAKFMAASHYAYQPSDMLGVPREVIEHKLMVRPDAKPVKQKLRRFAPDRKQAIREELDKLLKAGFIREVLHPEWLANPVMVRKANGKWRMCVDFTDLIKACPKDHFPLPRIDQLVDSIAGCELLSFLDACSGYHQISMAKEDEEKTTIITPFGVFCYVKMPFGLITAGNTFQHMVQGALSDQLRNNVEAYVDNIVVKTKTSDSLIDDLRETYNNLRRYRLMLNPEKCTFGVPSGKLLGFLVSGRGIEANPEKIKAIKNMKSPTRLKEVQKLTGCMVALRRKLCHYFQAHRVTVVSSFPLGEVVRNKDVVGRIAKWVVELSQFDVRFVPRTAIKSQVHKDYKCSSPELSRYLAEVRKLKKRFDRIEVRHVYRKDNIEPDDLAQHASRREPFEPGTFLDVLTRPSVKEASGEDSPVAPNISSGATEAEHAIADLETTDDWRTPLIKFIDSEELPEDDAEAEKISRKAKVYCMIGNDLYKKAPNRVLLKCVSSDDGRHLLLDIHEGICGSHAAGRTLVRKAFRQGFFWPTALKDACDMVQRLMSHDKKWVEDLPSVLWAVRTTPTTSNKETPFFLVYGSEAMLPTELQHQSTRVQKYSDEDQEEQRYDDVNLLEEHRERVAVRAASYQQALRRYHEKRIRARTLSIGDYVLRRVQSQAGGNKLSPKWEGPYTITQVLRPGAFKIADGDSRELANS

SEQ ID NO: 115124 - protein, 48 aa, Oryza sativa
  Clone ID: PAT_MRT4530_18750C.1.pep
NPLCNTHISWLVTVLRINSLLVGMIRLSACVSSRGGGAYLVHRLVLPV

SEQ ID NO: 115125 - protein, 94 aa, Oryza sativa
  unsure (1)..(94): unsure at all Xaa locations
  Clone ID: PAT_MRT4530_18751C.1.pep
MAGADVVLVEGQTGADFWGKVGESVEEVEGNRFYAVWARGREREDXRNRRRRGRQWRHSGFGSGGRRCPPKPRPTTLAPARSLPVPWLPSMTSS

SEQ ID NO: 115126 - protein, 500 aa, Oryza sativa
  Clone ID: PAT_MRT4530_18752C.1.pep
MPPPPLTPLSSSSSRFFFLLVLVLVLSCSLPANGRTHRSPAAAASPSPGPGPSPAPATPRVVPPAPAPATGGGGGGGGIFSSNGSLAVTPAAAAAAVAPSPPLGAVAAMEQRQHHHFHKELIIAIGLASVAGMAIVATVLYACILCRHSHRAHDSKNIRSSSDTARVALVPMLNKFNSMKTNKKGLVAMMEYNTLETATGKFSESNLLGAGGFGCVYKANFEGGLVAAVKRFGHRGQDCEKEFENELDLLGSIRHLNIVSLLGFCIHEENRFIVYELMENGSLEAQLHGPSHGSALSWHIRMKIALDTARGLEYLHEHCNPPVIHRDLKSSNILLDSDFNAKISDFGLAVTSGNHSKGSLKLSGTLGYVAPEYLLDGKLTEKSDVYAFGVVLLELLLGRRPVEKTAQSQCQSIVTWAMPQLTDRSKLPNIIDPMIKNTMDLKHLYQVAAVAVLCVQPEPSYRPLITDVLHSLIPLVPMELGGTLRISPESPCATRKQSPC

SEQ ID NO: 115127 - protein, 110 aa, Oryza sativa
  Clone ID: PAT_MRT4530_18753C.1.pep
LPPSGGAFFPPRLGGSGPIPVFPPPSCQTTLWGFGLFRFLVTPTEMGMCFFPYSLMWGFSDFDCWFFFKKLFADSFLLLVLTWSVQYQKKKKNVTNKCKKKKKKKKKNKK

SEQ ID NO: 115128 - protein, 162 aa, Oryza sativa
  unsure (1)..(162): unsure at all Xaa locations
  Clone ID: PAT_MRT4530_18754C.1.pep
XSLFWIXPCSVHWAPRPPAGGNLSXFWGNXXGGGGSLNLCSWAWLLLMXVPPWYELARSLHGNFVVRLRSASVLLSLLLXPWRLFWFLIWVXAXLPSPCVLLXSSAQDLLRLAALAGWVLLWLYCYVVRVFSYLPSGLDLLGDXWGYQVRVVCPQCLVGRVQ

SEQ ID NO: 115129 - protein, 313 aa, Oryza sativa
  Clone ID: PAT_MRT4530_18755C.1.pep
MEVFENARSVRLRSHLGTYLCAADDGGGGGGEAVTHGYRRNCRGTVWAVETSGDDYVRLQGHRGLYLCATELPAALDGGCRGSAACCWVIQAGSPPSPNDGAFLWTPRREGEHLTLTGLYGRLLRARFGLTPRENAVTVDRDAAPEESSWVVEVVPESEAPPPRCRALSCDARLEAATSEPDTAFTTAFVRFYSAKELKVVKPPPPPEEGEEEEEPPSEAAPGALVARTIFYNTARDDGRVDDFDQGTWRYFTFKEQSLAALRRRLEEEARREDFVVCRRRCAAPPPGLFPVVLDLPPGNRDMEFVLVLHSSR

SEQ ID NO: 115130 - protein, 51 aa, Oryza sativa
  unsure (1)..(51): unsure at all Xaa locations
  Clone ID: PAT_MRT4530_18756C.1.pep
RGEEEVITEEDLQNIXAKLRDEHYYCLYCGCKYESAEALANECPGPNEDDH

SEQ ID NO: 115131 - protein, 64 aa, Oryza sativa
  unsure (1)..(64): unsure at all Xaa locations
  Clone ID: PAT_MRT4530_18757C.1.pep
DTVTITQAANDTGLSDLYLFEFKALLHASVDCRRKLLDNXVAYTDLXDFTVIEAPNAYKASCNL

SEQ ID NO: 115132 - protein, 133 aa, Oryza sativa
  unsure (1)..(133): unsure at all Xaa locations
  Clone ID: PAT_MRT4530_18758C.1.pep
QIGSKIFLSPATVSRLLRTLAPPPTPPSPPXPPLPPLPPRPPPPPPPSLPPPPPPPSLYTNRRRPSSSSPPASSPTRTAAPTPDADLPDRRRPPPSPAPPPRTPPLPRPPPPPPNLPPPPSPVPPPPTQVSPP

SEQ ID NO: 115133 - protein, 461 aa, Oryza sativa
  Clone ID: PAT_MRT4530_18759C.1.pep
MESKTAKIVAGAAAAVLLVLELALYLRFRLSRPFFLSTAVIVSAALSAAAAALLHHAAGERRRAARMARRLPSMEDERIRVEYSYFRKVAGLPRKLTLESLAAATDGFQYAVGRGSSGTVYKGILDDGTAVAVKRIDGGADHADKEFKSEVSAIASAQHAHLVRLVGFCLVPRGPRFLVYEYMEHGSLDRWIFSPHSGDRRRRRYLPWAARYQVAVDVARALAYLHHDCRSKVLHLDVKPENILLDDGFRGVLSDFGLSKLVGKEQSRVVTTVRGTTGYLAPEWLLGVGITEKSDVYSYGLVLLEMVGGRRNLMQAENGDDGSSASPRWTYFPKIAGDMAREGRVMEVLDRRVVESGEAVEEAAVRRLVHVALWCAQEKAGARPTMARVVEMLEGRGAAAEAVEAPPPSDMIVVDLLALDPAARGPGPFGLPPPAAASDGGMQVTSSGISNSFALSYLSGR

SEQ ID NO: 115134 - protein, 760 aa, Oryza sativa
  Clone ID: PAT_MRT4530_1875C.1.pep
MDLGKSSSTSVSLKKLQEDGALPGRGTMEREAGGTNPQPVLGRMVAIEDYILCGFLLVPSEFLLLVLNFYGLSLLHLNPNSIAFLSIFSHLCEAYIGVEPFLDLFRFYYELRWMESNRVSGCVGFRLRDGLKSRYIPFQCPSSRNKWRTRWFYLQIKDSDPVFVVPKEQPDKISSWTAKPPLTPSLQSFIDIIDDLRVRGLSGYEVAADFVGLNSKAVERRVGQVMISGPTTASTIPVPFCEKGAAERDAAINVAASLKEKVAKEASDAAAATTSGGNVPTKGRKFSSVSGHRRKASTPSVSYPVVKSYSQKNFALLRIDHFSGLGHVSPASTTTTPCDGWREVEMGRLLEAGARGIGHEIVEARSAASSANKRADRLAHELSEAREDLKKMRELVAGNERQRQGLEHRMSELGNNLSKIRGSLRVTYTGLHQLAGECGIKSTIPANPDEFSLTSSLAELAAAMEEIPSKHAARIGEETSNGIYTGACHVLACVKLAHPELDLREILDQGAASNTRKEMMEEVGDLGESVLPLFEEWGLLDVDDEDVQQHGQPESPAIIPALTFDQHASPDNVDQTLASGTEMATTSLDLESALAGQDRRIQYWKTKFEVAELERTMVVVKKKQAVETLRGREVWFNSYLKSCCTSMAKVCRELRVPRGDPEESAAGYISWLNGACAQLDGVGKCIDEALKQECRRSSRYAGGHVLACLRDHRPRLDLDFLREGFARSRRTPAEIDHLARSMAPLAEKIFQSMDWRWPSW

SEQ ID NO: 115135 - protein, 78 aa, Oryza sativa
  Clone ID: PAT_MRT4530_18760C.1.pep
MAWRLSSEWLRGDPSVRGGVVMHPAAGYVVHGVPPGRFREHTSRRPAAVVALKQRSSRKGGEGCFPPCAAATVFRPGD

SEQ ID NO: 115136 - protein, 342 aa, Oryza sativa
  Clone ID: PAT_MRT4530_18761C.1.pep
MCGGSILGDLHLPVRRTVNAGDLWGDAGKGRDGGDGLKKRKGSSWDFDVDCDDDDDDDFEADFEEFEDDYGDDDDVGFGDDDQESDMNGLKLAGFSTTKLGLGGSRKRKTRYRGIRQRPWGKWAAEIRDPRKGVRVWLGTFGTAEEAAMAYDVEARRIRGKKAKVNFPDAAAAAPKRPRRSSAKHSPQQQKARSSSSSPASLNASDAVSKSNNNRVSSAGSSTDATAAAIAIDDGVKLELLSETDPSPPMAAAAAAWLDAFELNDLDGSRCKDNAFDHQIHKVEAAVADEFAFYDDPSYMQLGYQLDQGNSYENIDALFGGEAVNIGGLWSFDDMPMEFRAY

SEQ ID NO: 115137 - protein, 277 aa, Oryza sativa
  Clone ID: PAT_MRT4530_18762C.1.pep
MDLIDEEDSTSDCTGASKSQTDYEDYKSGKDVSLGALLKTKDGALPLAFDDYVLGDKSEESGPVHPPAAAKNNVLGASPSSKSSRSPSGEKSRGSRVKGKVKDFMKIFSPESSPKSKRDRTSSGKNGSKSGPEDQFSISNSEVDDHVRTANMNKQNVFPPVPSPISEAQDRTEIPVFTVDNEMDSKADFGRKEVTPPSFDESSDAQTKYKVDEITDLAEGPVEDLEECVVEDVSEDFILRNNEEKEQIKISESKIWEWSQGKERNIRSLLSTLQYVL

SEQ ID NO: 115138 - protein, 278 aa, Oryza sativa
  Clone ID: PAT_MRT4530_18763C.1.pep
TCDFALVLGGIPPPSCFSVFSMKIATWNVRGLGCDKKKALIFQSLAENKPDIVCFQETKLDTICPLLAASFLPRNLRNFSFQPSLGSAGGLLTAWSNLFSATVLSSSPSHLTTSFCSSSDNTSFSIINVYAPCDDQHRILFFDELSTTTLNLTGSVMILGDFNIYRYPHEKNNDNINWSEMETFNDWINSESLLDIDIPNRTFTWSNKRRHPTLVKLDRVFINPLWSQSFPLTEAKAVTATTSDHTPILVHISDSAPRSAIFRVENFWLQMPEFKNLV

SEQ ID NO: 115139 - protein, 63 aa, Oryza sativa
  Clone ID: PAT_MRT4530_18764C.1.pep
AHAPLSCSNQPKGIYVSAYIRTIRLSSIVEQFQLIWLFFIKSAINKKMVSCEEMSERVHIDQS

SEQ ID NO: 115140 - protein, 308 aa, Oryza sativa
  Clone ID: PAT_MRT4530_18765C.1.pep
MATAERWKKLKSELLEKMFEDICNTGAEYWSLGQGTIPTSTTHAIHIADNEIDKETYKDEPTVKRKRDGGGSKMDKGKKSKSGSQKMVEEMSKSNDLSAQTLSSIQSFAWSREDPPGCSIKDVMALVEECGAVEGTNEHFIATEIFIKNDQREMFVNSLHTPVGRFSWLKKKYEMSSDSEDGSSHEEYEYDELTMHLFETVASNLSSTRKAVESYNSLFLEQALPRTLHLNGMGWVQETLATRGECYKMLGMNGNTFIALHDLLVRKYYLVNAGYPNRPYYLAPYNGQRYHVPERKILLLTLEFAHYH

SEQ ID NO: 115141 - protein, 55 aa, Oryza sativa
  Clone ID: PAT_MRT4530_18766C.1.pep
NHVEAFPEYQGRHWHLIMCLSALSIMSLHEWVDRSGALVAHQLLSDHSVFYYRII

SEQ ID NO: 115142 - protein, 650 aa, Oryza sativa
  Clone ID: PAT_MRT4530_18767C.1.pep
MAMLQDCIEPIPSLSPENHYFLGPIGNLDPTEFIIVETNRIHFRLANPNLSHWKNTFTSWPSLEKTTPEKSWAVWYKRVSASKQVHCDELGISQALDLTIANSAKDEPLMAAATYFWSNTINAFLFNQRPMTPTLLDITMITGLDVTSSANPMSLNTKNQFDFRTKSIGGWSGYVAAYMGKGPVTSREHVAFLLMWLEKFLFCGSSCGPTTNWQFLAKALETKRQFPLGKILLDYLYQMLNNASTKIAVGLVVSAGRPWWLLQTWLNLVAMKAVNRPAVTEAEFPRLEPITDDDGEERTHRRYLFPDVIPQSNSGKDIEYAPGLLPNGGGLTPPIIGYHALKTSSLLQGQMREPADVGRKRKTKELALDPSALAPKKKTKKNKPKPADDLPALDPSIEQALDEEETEEDVDQAAAEARSHNIEEEEQPAAPAIPDYFDKEAEEETTSTALAPLDETVKKTLEDIYLRLGSSLDSLVADCGSIWARFAEIQALIPEDLANIITPAIYLEQHQFKLEKAQQRIADRRERKVIEATIQANRQLVHEEKAKLDQLSIGPIQSNIDRLEARKIDLIAQLKECNAELDLEKQKLPDLPSAIEEQKSRLKSAIRNVADMTKSLKVAPGTDAQDAQAIEEIEQIRQQAVSAIQRYLSQ

SEQ ID NO: 115143 - protein, 113 aa, Oryza sativa
  unsure (1)..(113): unsure at all Xaa locations
  Clone ID: PAT_MRT4530_18768C.1.pep
NPKQDLQPNPQPDPKPTPQRDPXQDPQLNPQPSPKFGHKPNPKRKPHXVNDPRSLDGPKAXPQPDPSPHPKPIPNRNVEPHPDLYPDPKRHPXPYVPNPPSLSXTITIFVSGN

SEQ ID NO: 115144 - protein, 103 aa, Oryza sativa
  Clone ID: PAT_MRT4530_18769C.1.pep
SWLSRRFSGDSFSVKHNGFPDLRRLWMEAPKIPRVSIENGGMPHLTSLKLISEDVEGLPVASINELTYLTEIILGNVNDQTRRAWEDEAKRHINRPMVESAAR

SEQ ID NO: 115145 - protein, 1446 aa, Oryza sativa
  Clone ID: PAT_MRT4530_1876C.1.pep
MSASFWCPPFASSRRRSPASMRARAAEPPPVVTSSLTSSSSSLVIPTFPESPFSQEKNLKSSKASKATPGLEWYIPGLKIELCSRDGCSEWLGLCNRIPHDRHEEKCRVKVTLNSNSEDIPSVMFEAGGRNYIHACQEVARIAIGELRDRYSDQLADTEYRYHSRQPQGSDRGSYLETEGIENDATTRHLVEMLWAMDETRAETVLAAQDREDRNRGKICKLEDKVDRLEKELAALKGEAPPQKARICLTARKRALFVPRYQLAPKMHIPSGVVSLKKKEFRSLTQGSRSVTEYLHEFNRLARYAPEDVRTDEEHQEKFLEGLNDELSYPLMTGDYHDFQKLVDKAIRQEDKYNRMEQKKRRIAQFKTQQGNNQRPHLTLGPQSMPQGGYSSVVRPQRQFFNNNAGNNIRNQVPRPVAASTQQQPAKREQGSKPVVCFNCGDPGHYADKCPKPRCVKVVPAQSNSTVSASKARVNHVAAAEAQGAPDVILGTFLVNSVPATVLFDSGATHSFLSMSFAGNHGMEVEDLRCPLMVSTPSNQALSLQRSPSVRIEIQGVPFLANLILLESKDLDVILGMDWLARHKGVIDCANRKVTLTSNDGRVVTVHALSSESLRSILNQITLEEIPIVREYPDVFSDDLPGMPPKRDIEFRIDLVPGTTPIHKRPYRMAANELAEVKRQVDDLLQKGIDDLFDQLKGATVFSKIDLRSGYHQLRIKEEDIPKTAFTTRYGLFECTVMSFGLTNAPAFFMNLMNKVFMEYLDKFVVVFIDDILIYSRTKEEHEEHLRLALEKLREHQLYAKFSKCEFWLSEVKFLGHVISAGGVAVDPSNVESVTNWKQPKTVSEIRSFLGLAGYYRRFIENFSKIAKPMTRLLQKDVKYKWSEECEQSFQELKNRLISAPILILPDPKKGFQVYCDASKLGLGCVLMQDGKVVAYASRQLRPHEKNYPTHDLELAAVVRALKIWRHYLFGTRTEVYTDHKSLKYIFTQPDLNMRQRRWLELIKDYDMGIHYHPGKVNVVADALRRKGYCNATEGRQLPLELCKEFERLNLGIVSRGFVAALEAKPTLIDQIREAQINDPDIQEIKKNMRRGRAIGFLEDEQGTVWLGERICVPDNKDLKDAILKEAHDTLYSIHPGSTKMYQDLKERFWWASMKREIAEYVAVCDVCQRVKAEHQKPAGLLQPLKIPEWKWEEIGMDFITGLPRTSSGHDSIWVIVDRLTKVAHFIPVKTTYSGSRLAELYMARIVCLHGVPKKIVSNRGSQFTSNFWKKLQEEMGSKLNFSTAYHPQTDGQTERVNQILEDMLRACALDFGGSWDKNLPYAEFSYNNSYQASLQMAPYEALYGRKCRTPLLWDQTGERQVFGTDILREAEEKVKIIQERLRVAQSRHKSYADNRRRDLSFDERDYVYLRVTPLRGVHRFHTKGKLAPRFVGPYKIVSRRGEVAY

SEQ ID NO: 115146 - protein, 162 aa, Oryza sativa
  unsure (1)..(162): unsure at all Xaa locations
  Clone ID: PAT_MRT4530_18770C.1.pep
LVYLEKLSLRSNSLSGTIPASLSRISSLRAVYLQYNSLSGPIPQSFLANLTNLQTFDVSGNLLSGPVPVSFPPSLKYLDLSSNAFSGTIPANVSASATSLQFLNLSFNRLRGTVPASLGTLQDLHYLWLDGNLLEGTXPSALGNCSALXXXWRGMRAWRWRR

SEQ ID NO: 115147 - protein, 39 aa, Oryza sativa
  Clone ID: PAT_MRT4530_18771C.1.pep
PLTTAQKNSVSSLTTHGAFFVLLRGQIFCVTSYGLSHLR

SEQ ID NO: 115148 - protein, 469 aa, Oryza sativa
  Clone ID: PAT_MRT4530_18772C.1.pep
MPREIITIQVGQCGNQIGMEFWKQLCLEHGIGKDGLLEDFATQGGDRKDVFFYQADDQHYIPRALLVDLEPRVINGIQNSEYRNLYNHENIFVAEHGGGAGNNWASGYHQGEQVVDDIMDMIDREADGSDSLEGFVLCHSIAGGTGSGMGSYLLETLNDRYSKKLVQTYSVFPNQMETSDVVVQPYNSLLTLKRLTLNADCVVVLDNTALNRIAVERLHLANPTFAQTNSLVSTVMSASTTTLRYPGYMNNDLVGLLASLIPTPRCHFLMTGYTPLTVERQVNMIRKTTVLDVMRRLLQTKNIMVSSYARNKEASQAKYISILNIIQGEVDPTQVHESLQRIRERKLVNFIEWGPASIQVALSRKSPYVQTTHRVSGLMLANHTSIRHLFSKCLGQYEKLRKKQAFLDNYRKFPMFEDNDLSEFDESREIIESLVDEYKACESPDYIKWGMEDAGEANVAAALDSKLVV

SEQ ID NO: 115149 - protein, 600 aa, Oryza sativa
  Clone ID: PAT_MRT4530_18773C.1.pep
MDLLCDNMVEEILVRLPEEQHLRRASAACRRYGDIIRRPGFATRHRELHSPLLSGGVVLHGVRRRCPRVDGTAAHVRGSYAFFLPAGAGDASASSSLELDLAGLLPSPTDRELAYLLSTGAADPDAARRSVFIVHSSSSAGLLLCCRGYVNPVHYYVCDPVARRCVALPELPWPPAFDKSGMLSVAAGGGGGFQVVLFEKRGFAHGGGHLDLEVFSSDSGEWPAMRIPRPQDLAGFRCFAPPHLRHDGAAAYWLGFEPRDRAVVYGAADHSIRLIPVPRRVHDPSALNRFVGERRGGALLRYAHFDAAEFEVWDTDDATPTRWALVHRAALKDVVARSPRAVAAKFVHGRIVRHIHHHDANWNWCSSFKLIGFDPVHDDDVFLFGATNGSGCVAAYSLTLGKLSLRCKIDTADGSSSLCGCDMFPYVRAYIYIYIYTYIYIYIHIYIYTYIHIHIHIYTHIYITYTYIYIYMYIYIYIYIYTYICIYTYIYIYIRIYTYIYVYIHIYTYVYTYTYVYIHIYTYVYIHIYTYVYIHIYTYIYIYTYIYIYTFSYIYIYIYIYIYVYIYMYIYIYIYIYICIYIYMYIYICIYIYVYIYIYV

SEQ ID NO: 115150 - protein, 71 aa, Oryza sativa
  unsure (1)..(71): unsure at all Xaa locations
  Clone ID: PAT_MRT4530_18774C.1.pep
VLPSSCRCKHIFNSKFQLXFFXNKTIVSHQIFRVRNXSLPAIEFYDFYHLCTINIIRKYMPLLAKIEKNFQ

SEQ ID NO: 115151 - protein, 62 aa, Oryza sativa
  unsure (1)..(62): unsure at all Xaa locations
  Clone ID: PAT_MRT4530_18775C.1.pep
FLLFFFFFFXLLFFFFXIWAGETICISRLINFTGXSPXSLHYTNLYVDTRICVEPTSXLINL

SEQ ID NO: 115152 - protein, 126 aa, Oryza sativa
  unsure (1)..(126): unsure at all Xaa locations
  Clone ID: PAT_MRT4530_18776C.1.pep
MSATVYLPRDLSGSGGRWVQHGELCGHHPPPIDLSKNRLAGRILDKIRITNSQKKKETLAAAAALPAARPPAGASTTAXAAARPTGPLPAGAPPQSRRLPGPPCCPGLRAADQEVGRMGGKGGEAL

SEQ ID NO: 115153 - protein, 56 aa, Oryza sativa
  unsure (1)..(56): unsure at all Xaa locations
  Clone ID: PAT_MRT4530_18777C.1.pep
FFFFFFFFFFLYYTTLILYRXTPTYFRHISQQIXLHTLXTVYTTCXTPPKNXLQHG

SEQ ID NO: 115154 - protein, 281 aa, Oryza sativa
  Clone ID: PAT_MRT4530_18778C.1.pep
MSSWNSPYYDTSSYGAGSGGGGGGGRRSSSPPRGAGDKKETKTKDYQSYTSNNNNNGSDDDKDKNKHKITSSHKHKDDEKDRNNHSKDSHGGGNSSNYNKDSYGGNSGNPNNYYGSSTGVVAGSGSYYGGGGGYGGGNTSYGGSLSYGKDGGYGGSNSPYGGGSSIIISGAAPIPHNNFGGGGTGWPVPPPPQDGGSGAAPVFIRAEEVKVIYHHTPPGHGSSSSSYSPSPKYESEGDRRRSGGAGSGSGSNSGGGGGGFFGPAFHAVGGYIDRKFGLDKD

SEQ ID NO: 115155 - protein, 88 aa, Oryza sativa
  unsure (1)..(88): unsure at all Xaa locations
  Clone ID: PAT_MRT4530_18779C.1.pep
EAPGLEAVAMAPSLVVAAEPDIPRGRNEPYARRIREEWGKEVAFVGFAGEQPGFFRGXDPWSEGADGLGRLIRRFVVGPMGSGEQSPS

SEQ ID NO: 115156 - protein, 600 aa, Oryza sativa
  Clone ID: PAT_MRT4530_1877C.1.pep
MACDHDGDLPEWRRRLERRRRTARPAAMTAAHGCTVLGLYRQREAKARVAAGSGGLGGPFIGARGRRRSPTAAGDEKESFRVREERGIRIELKSDDFQSDIDDASKRKKSFIDIIDDLRVRGLSGYEVAADFVGLNSEAVERRVGQVMISGPTTASNIPVPLCEKGAAEHDDAINALPLTDIIGPLADHQVAASLKEKVAKEASDAAATTTSGGNVPTKGRKFSSVSGHHRKASTPLASDASPPPPRRQRLVTIGEKAARVKAVQDKSGGTSGASPAAASTDVVLAPGSREVTPSGPVSDPAAGRGPPAAVLTWEELQVEMGRLLEAGARGIGREIAEARSEAALANERADWLVHELAEAREDLKKMRELVAGNERQWQGLEDRLSELGNNLSEIRGSLRVTYTGLHQLAGECGIKSTILANPDEFSLTSSLAELATAMGEIPSKHAARIGEETSNGIYTGACHVPACVKLSHPEVDLREILDQAAASNTHLENALAGQDRRIQYWKTKFEVAELERTMLAVKKKQAVETLRGREVWFNSYLKSCCTSMARVCRELRVPRGDPEESAARYISRLNGACAQLDGIGKRIDEALKQECRRSS

SEQ ID NO: 115157 - protein, 91 aa, Oryza sativa
  Clone ID: PAT_MRT4530_18780C.1.pep
MASPPVVWLLFSSLPLPHFRVLGTRWLQRGMLTCCERSGVLDGDGVGVGTWEDGVRNLSTSWGAAWNFHCDDESGGRVVWRHRAIATVLDE

SEQ ID NO: 115158 - protein, 247 aa, Oryza sativa
  unsure (1)..(247): unsure at all Xaa locations
  Clone ID: PAT_MRT4530_18781C.1.pep
SEKKKDLAPLCFSLAKRKNRRKNRRVQFELMNNNWLSSFRQITSVEEIHELVQLGGLLNSLRXVDDIVWNWTESGTYTTKSAYIXYQFAGSYTAIDFTTLCKAQAEPKMKCFGWLVLHQRTLMAQNLLRRYWSCNWIYCLCTSAFEDTNHLFADCPFVKQVWTTVCMWQNLPLALNSLPSRISTWWDELKGAEREGQKTLARGALLTTWXNIXLERNSRIFQNLASSELSVAYRVKQDIDLRKVAFR

SEQ ID NO: 115159 - protein, 543 aa, Oryza sativa
  Clone ID: PAT_MRT4530_18782C.1.pep
MARRAAAGLLRRHLGPLAAGETLQARGMYPKQYGAANHAFSRFYSIQGQQRSLYGFRTNVETDDTQQSARMNFEVQKRSFSSAAAHVQRNPAYSVLNSDDVSYFKSILGDSGVVQDEDRVSVANMDWMGKYKGSSQLLLLPKSTAEVSKILSYCNSRRLAVVPQGGNTGLVGGSVPVYDEVNGILTCEAGCVLENLSSYVENKGFIMPLDLGAKGSCHIGGNISTNAGGLRFIRYGSLHGSVLGLEVVLADGTVLDMLTTLRKDNTGYDLKHLFIGSEGSLGIVTKIAILTPAKLPSTNVAFLSCNDYISCQKLLLAARRSLGEILSAFEFMDRHCINLAMKYLEGVHNPLPVSPFNFYVLIETTGSDESYDKAKLEAFLLRSMEDGLVADGVIAQDISQASNFWRIREGISEASVKVGAVYKYDLSIPVEKLYDIVEEMRSRVGDMGQVLGYGHLGDGNLHLNILSTKYSDKMLAQIEPFVYEWTSKQRGSISAEHGLGLMKAEKIHYSKSSEAVQLMASIKKLLDPNSILNPYKVLPQSVL

SEQ ID NO: 115160 - protein, 225 aa, Oryza sativa
  unsure (1)..(225): unsure at all Xaa locations
  Clone ID: PAT_MRT4530_18783C.1.pep
MWRWMAAVRGTCTPSVAACSRRRRRRRRHRPPSPAAPLHLHLHLSAPAAASVGGRAAPAPPRSGLRTTARNSPCSPVASTQPSPAAAAPPPAPTSPSPPPPHHCRSSPDEPSKEAFLRRPMRRRGXEEARGPPPVPRSHFLEQLPRPRRAVAPPPPRXAVVPSPIPARRRRRVGRWLVVGGYRENGGKRHRYGTARHEQPAHPRRLLDSVFPSRPPFSEYGGAID

SEQ ID NO: 115161 - protein, 91 aa, Oryza sativa
  Clone ID: PAT_MRT4530_18784C.1.pep
MQLGEREREERVAAGAAEKGGREIEEVVLWLGAQWPRIYQQFDQQQVAVRRPPIDRLIAIDADADQCDRSSCRYAWFSVSVRRRPSSNCHN

SEQ ID NO: 115162 - protein, 202 aa, Oryza sativa
  Clone ID: PAT_MRT4530_18785C.1.pep
MSSTNSSGDPAAVRVVGGWASPFMNRVVVALKLKGVEHEMLQETVGKKSELLLRSNPVHKKIPVLLHHGKPIAESLIIIPPGIRVLRGSVEEDKDKAAGEMSTALQHLEEAFVKCSQGKQYFGGDNIGYLDIALGSFLGWIRAVEKIAGVELLNETKVPNLAAWADRFCAHPAVVDVVPDADRLVEFTVQHAALLRAVNVPK

SEQ ID NO: 115163 - protein, 276 aa, Oryza sativa
  unsure (1)..(276): unsure at all Xaa locations
  Clone ID: PAT_MRT4530_18786C.1.pep
SCNPTQGFPDCRGRGYRAPAVSTVTARRLPRYLYYRTPAVSSVTARLPTTSANEKKRNFTETVEAHVMLGVDPRRGDQMVRGALTLPHGTGKTVRVAVFAEGPAADEARAAGADVVGGDELIEEIRTGGGKLSFDKCIATPMYMPRLSKVARILGPRGLMPNPKLGSVTNDVSGAVKAAKSGRVDFKIDKTAIVHVGLGKINFSDENLRENIGAFVHALLLAKPVGLKKTSKYVGYVKKFTLSSTXMGPGFPVTIPSLSAAADHYNIARCKPANEI

SEQ ID NO: 115164 - protein, 102 aa, Oryza sativa
  unsure (1)..(102): unsure at all Xaa locations
  Clone ID: PAT_MRT4530_18787C.1.pep
KKTKNTASTTPLSSSLPTTVTVTVXLPLSTLLNTSXXAQQGHNLAPISFWSATLPNQSGXVQHPAHVFFVXFCVASQSIPSEQISFNQEAAGCXHIPLTEAG

SEQ ID NO: 115165 - protein, 519 aa, Oryza sativa
  Clone ID: PAT_MRT4530_18788C.1.pep
MPSPLPCNLLTRRRALTACAAVAALTAAAALFLLATPPTEDPTHPYLLASLLHNNTSNQPDSAAASQPPLPSTSILQLQTNLPSGFTTVPSMFLVPSPSPAENLDDGSMEETDPPDLKENPPAESAPFLQEVPIPLWSTAADEELIYAKKEITIAPLVSNDPDLHAPLFRNVSVFRRSYELMERLLKVFVYHDGAKPIFHSPELKGIYASEGWFMKLMEGNQHFVVRDPNRAHLFYLPYSSRQLEHNLYVPGSNTIEPLSIFVKKYIDFISTKFPYWNRTKGADHFFVACHDWGPYTTKLHDELRKNTIKALCNADLSEGVFIHGRDVSLPETFLRSPRRPLRGIGGKPAAERSILAFFAGQMHGRVRPVLLQYWGGKDADMRIYDRLPHRITRRMNYIQHMKSSKYCICPMGYEVNSPRIVEAIYYECVPVIIADNFVLPFDDALNWSAFSVVIPEKDVPKLKQILLAIPDDQYMAMQSNVQRVQKHFIWHPNPIKYDIFHMILHSIWYSRVNQIQIE

SEQ ID NO: 115166 - protein, 621 aa, Oryza sativa
  Clone ID: PAT_MRT4530_18789C.1.pep
MATAVLTYLQSLWPLSALLREDDLRASARLLRGVPVPEETKQFVLALRDREPGSGSRGGVIYILAAQNLSERSASDADSLIRRVIKRCVTEKRSKDQYVKAAACQVLQEIFGVGFYGHVLAAKRAAEETGSCFLLLESPYERNCNGGASGGQSTMEEGSGQQLASRCSLAQSSTDDGTGGQSQGSCLLTQSTSSIVSSHVRKICLVDDIGGQLVKSLAPTVNLLMSQAISSDGVSECKLAECKPSDRYEAPPFAQTVYPLLADLYDIFVDIPSIGKAMASAQELLRQVHDGKPISTEMLSDVYVFRIAIEALRIGLNNAGRSHIDTRDNHGSKKLDFSELNSEEKCHILLVQALRSQVREFGSVVAVVDASCLAGIRRHWDTPVPSEIAQLASSCFKQYGNKNDSEDNELPSSVDSTDKKSWVAEKPVVVVGAGGTAILGFSSLSKTVQASAFLKLAPYKTPVVLKYGLIQLQRHASIVLSKVLSNGVFSASSNASVLQFTASSEKIRAVTHTVISSAKRTSLMAMRTSFYEIMQKRQKQPFRITPWATFGCSMAACAGLLMHGDGIECAAEVAPSVPMIATLGRGLEILRLTSQEVRQTRGQHIKEALGALMSNLKKTAK

SEQ ID NO: 115167 - protein, 85 aa, Oryza sativa
  unsure (1)..(85): unsure at all Xaa locations
  Clone ID: PAT_MRT4530_1878C.1.pep
MSSLRRSMASQTVPLLLLILMLEAAATGXASAAVQCGQVTQLMAPCMPYLASTPGMTPYGICRNSLGSRISDFVVGGRFCIPMTS

SEQ ID NO: 115168 - protein, 660 aa, Oryza sativa
  Clone ID: PAT_MRT4530_18790C.1.pep
MATAVLTYLQSLWPLSALLREDDLRASARLLRGVPVPEETKQFVLALRDREPGSGSRGGVIYILAAQNLSERSASDADSLIRRVRPAAVVTQLAHTAADDVRAEEECLEGGGAGGVPASPFQVIKRCVTEKRSKDQYVKAAACQVLQEIFGVGFYGHVLAAKRAAEETGSCFLLLESPYERNCNGGASGGQSTMEEGSGQQLASRCSLAQSSTDDGTGGQSQGSCLLTQSTSSIVSSHVRKICLVDDIGGQLVKSLAPTVNLLMSQAISSDGVSECKLAECKPSDRYEAPPFAQTVYPLLADLYDIFVDIPSIGKAMASAQELLRQVHDGKPISTEMLSDVYVFRIAIEALRIGLNNAGRSHIDTRDNHGSKKLDFSELNSEEKCHILLVQALRSQVREFGSVVAVVDASCLAGIRRHWDTPVPSEIAQLASSCFKQYGNKNDSEDNELPSSVDSTDKKSWVAEKPVVVVGAGGTAILGFSSLSKTVQASAFLKLAPYKTPVVLKYGLIQLQRHASIVLSKVLSNGVFSASSNASVLQFTASSEKIRAVTHTVISSAKRTSLMAMRTSFYEIMQKRQKQPFRITPWATFGCSMAACAGLLMHGDGIECAAEVAPSVPMIATLGRGLEILRLTSQEVRQTRGQHIKEALGALMSNLKKTAK

SEQ ID NO: 115169 - protein, 49 aa, Oryza sativa
  Clone ID: PAT_MRT4530_18791C.1.pep
ACFSECLACLVDTNGGERRGSQFASELMLRRQFALQLGSSRWFRMFQTF

SEQ ID NO: 115170 - protein, 66 aa, Oryza sativa
  Clone ID: PAT_MRT4530_18792C.1.pep
SHPVRNRGIPSCQMAKRFGLRALCIKKVSNWPFPKQKQILGQGTINTAPWFPISDLKRLEFFLPRE

SEQ ID NO: 115171 - protein, 74 aa, Oryza sativa
  unsure (1)..(74): unsure at all Xaa locations
  Clone ID: PAT_MRT4530_18793C.1.pep
MAASALHQTTSFLGTAPRXDELVRRVGDSGGRITMXRXVKSAAQSXWYGPDRPKYLGPFSEXTSSYLDRRVPVR

SEQ ID NO: 115172 - protein, 479 aa, Oryza sativa
  Clone ID: PAT_MRT4530_18795C.1.pep
MPQPKCPTERKKADHLQLIPCGAPAGSCGGSCWITMDYEFETYKKRQRGQQQMDFELKTYHRKRQRRRGHQQTVELPDEIVREVLIWLPVKSLARFKSVCKAWLSIISESCFIREHLQCSKLKRYWNPSSFLITPHIPLKPGDSIFAAFSTDIRFYQWSLQEDTRAAATLLYRRHFPAGEFEPVLPMAHCDGLVLLPTKTKAYVFNPATRDVLALPESNRNMRQRDNLGFDASTGKYKVARSFYRSREYNPMGIAAMGFEVFTINGEESCWRETLVDPPYPVLYSKIVTHCKGCLFYYIDKKNQQNPPQALLRFSLQDETFGVTPLLTDTYPQVEDDEVTITELGGQLCATFFCNTLQQVCIYMSGDVMDPDWNCWHIINFMNCYPIASLGSGRILLRRGSLVFCTNLKSYSIEDKLDIDDIRNNLSALKITKIDPAASVVGGKLTWQTAARPRRLPLSAKITFSPLPPFGAKCNFGSP

SEQ ID NO: 115173 - protein, 104 aa, Oryza sativa
  Clone ID: PAT_MRT4530_18796C.1.pep
KKKKKKKEGKMIKKKKKKKKKKEVRFFRYLTAILPHTLLHNLLLGGALFGVPCFLPSLSRPTSLFLGPPLFYSWGGFSPFRRGETPWAPPLWPFCTNIPFSPGG

SEQ ID NO: 115174 - protein, 106 aa, Oryza sativa
  Clone ID: PAT_MRT4530_18797C.1.pep
PDKKFAACSYAIASGKSYSHILQFTVCLGQLYGCLVYFITAYLDGFNFWTSPFYFWAYFIGANSSWVVIPTMIAIRSSQFYSIPSVPPNFRFDPFYTPPVRFPFDL

SEQ ID NO: 115175 - protein, 378 aa, Oryza sativa
  Clone ID: PAT_MRT4530_18798C.1.pep
MVRPTDSVLLAFSGGPASRVALQFIHEMRCKAIESWDVSNSQALPVFGVGVAFVDESVLCSKPRDEIEMAIEDIRSIVSSLSTGVKAMHIARLEDVFSTESEDGERRLREAVDMIGDDTGREDFLRCLRMLSLQKIAMENGYAKIMLGSCASAIACHVLSATVKGQGYSLPADVQYVDTRWEIPVVLPLRDCLAQELTLLCELDSLKTQQHLDRPSNGINSLVASFIKRLREENPSREHTIVRTAQKLKPFSFNKFSADGYHDFLPSRLRPKFQKFDSDESTFSEILCLMCGSPFSESELQNLESTKHKAQKKIDLYTAHCCQSCYFQILPAGENLNEHFFSLLPKLWTGKMDTISDSHSLLRDQIEEYLLEENDDGN

SEQ ID NO: 115176 - protein, 61 aa, Oryza sativa
  Clone ID: PAT_MRT4530_18799C.1.pep
MSYVIMRISDILLRYHAASTTPRRRTMVGERTIDLRPPCAIAAVVITLTSLSFVHMGTLLG

SEQ ID NO: 115177 - protein, 686 aa, Oryza sativa
  Clone ID: PAT_MRT4530_1879C.1.pep
MAEQAKAHDLSPSVSGDDGEPNPRRRARTPPPPPQQNPKQGEALERVEKSAASPVAGGAEERRDGKRRLLVYGDGSTPQGALQAVGALLRHPPIVPDPESPAQRWLDDVANLVMTAQQRLSAGGRSATTRTSGAATTGSVSSRRRARRAAAAARHSATTPSSAPPTREDQHEEPDARLDIERRRSDRRAPRATEGASSSRVSPRHGREDQPSVPPVGGVGCRAFVASLRNVRWPPRFRPTITEKYDGSVNPTEFLQVYTTGIEAAGGDDRVMANFFPMALKGQARGWLMNLPPASVHSWEDLCQQFTMNFQGTYPRPGRRDRRRKKRSVHSGDEGHVLAVEGAPRATRKGRPASDKKKEAGTPSRERPASKWCSVHNTSLHDLADCRAVKNLAERTRKWEEDRRQERREGKSAAVPSGKRRSEAKQKAPAVDIDDGDDDLGFQEPGATIATVDGGACAHVSRRSFKAMRRELLAAAPTHEATRRARWSEVALTFDQTDHPPCVARGGQIAMVVSPTICNVKLGRVLIDGGAALNILSPAAFDAIKAPGMVLQPSQPIIGVTPGHTWPLGHIDLPVTFGGSANFCTERVNFDVADLSLPYNAVLGRPALVKFMAAVHYAYLQMKMPGPGGPISVRGDLKVALACMEQRADHLAAATKPEGGDERLGTSAPTAPRQRIATCDEVPVKE

SEQ ID NO: 115178 - protein, 582 aa, Oryza sativa
  Clone ID: PAT_MRT4530_187C.1.pep
MKALRRSSTSSSSSASSSPRAPSSPPPWVQLRSLLVASSSSSSSSSSLAASGNSASPAAAAAAASASFSPASYSPHSDRGGTKSPWSRRKRKRPLSCRHWNHLFSSDGKLRDGGRKFLKKVRGGGVEPEIRAKVWPFLLGVKLLPQIQGKDWPFLLGVYDLNSTEAERNVIQTNKRNDYEKLRRKCHHVLHSYKGSGLNVINEAAACEYHSCNEESEPLNLESVSTRSSPSPKGLKSLRCGISRQENATEGIDEDTSELTYVDPYLAESESSDSGTSDEEDLDRMSVSANTEVNRDQGPKFVRSASSKSGFFRNNKTPEDFATWQRIIRLDAIRTDPEWALLSHNRAEVSKEKALQYARSVGLKDYDHLEPYMIYHAARLVAVLEAYALFDPEIGYCQGMSDLLSPIIVVMEEDHEAFWCFVGFMRKARHNFRLDEVGIRRQLKIVSQIIKRKDSHLYRHLQKLQAEDCFFVYRMVVVLFRRELTFEQTLCLWEVMWADQAAIRAGIGRSTWSKIRLHAPPTDDLLLYAIAACVLQKRKLIIERYSSMDEILRECNSMAGQLDVWRLLDDAHDLVVNLHDKI

SEQ ID NO: 115179 - protein, 1233 aa, Oryza sativa
  Clone ID: PAT_MRT4530_18800C.1.pep
MYNPIGSAEAREPAELPAAVAAELERLEGRLRQLAGAEARRHLAVLGEAGAARVLRAVAESRRVRTLPGFIKYLAKREAAITRRDARGVPTALSAPAFISGPSREEESVYTQLFDNEVQMYDQSPSNEMATSLSNHGMVEVGSPNQQMPFHLHGNGGSVRQIARLVPQLAQLTVESPCGHTSSVSQNQGCIEVGTPTQAMIDSPARAMAPAVPNDVMMQVGSPCRCMPSGLQNYIEIDSPIQPMISTPRRVSTPSSVQDISRLIENMAGPSVSPPSPITAMPQNPTTTCHTTDNALREAASPQMLALEELGFRKIFMVFAYLASEKIENVLSVDYIRSLKFLSMAQFESQIWRTFGHKYIAASDRAKNLDSDPGMTKVYHCNVAIRGDTVVKIFKGPYIENTRTHLQKVVGDDNVLVVKFMGKLSDTKTDFSTYCEHYHKVAEDGIVLGLRRYRFFVYKDGGKEEKLKQEKIEDKNKCTSPVMCYFVRTESGWNMDEPYILSGRTVGQARELFMHISSAPTLAKYMARFALILSKTITWDADLSAVYVRRIKDEPCMDRHGNVVHKDQEPLIHTDGTGLVSVDLALNCPTSIFKGKFLKPQGIATCDESETVMRPNSLKRHRSLTAEHPLLMQFRLFYNGSAVKGTVLVDRRLPPATILIRPSMVKIETHPELSGVRSVNSSEIVSARNAKKSLSGVQSVNSFEIVSTSNRPRRTLTSRFLITLLCYGGVPEEYFLELLQSAIEGAENACYDYEDALRIAFSYADMEDSMSARMILSGIPLEESYLQHRLDFMAQQERKGIKQGKIPIDECYYLMDTTDPTGTLRPNEVCVILENGQFSGDVLVYKHPGLHFGDIHVLKATYIRDLEKEYVGYAKYAILFPISGPRSLADEMANSDFDGDIYWVSKNPKLLEHFKPSEPWVQAIKPKKTKQKKPQDCNESKLERLLFHEFLKTRFTPSFALGTAADSWLAYMDRLLTDSLDEIEKKLIEEKMLKLVDLYYLALDAPKTGNKVNIPSDLMVKQYPHFMGRSFSYHSSSILGQIYDKAEDVESLRSCNVQPIGVSLLPCFMEREAPPAARHLWQHRYEEYLTDSTMLYRAMVDKEERNMKFQELYEKYKHMLYDASEFEQTQRDPDDVFSEACVIYQIVYEKARWSNDASRCGFAWKVAGRALCHFYALKNEGDTALCSLPLLRKIIKKDHRSVQCDNGHKYASLLVCKMDSMDSVWYEVISVGN

SEQ ID NO: 115180 - protein, 72 aa, Oryza sativa
  Clone ID: PAT_MRT4530_18801C.1.pep
SLKTKTQIVAKQPKGTKGGKIKLDFSWGEAIPRTLKGLKHPNTKVGETYPDQILAKREKKKKKGKRPKSLDF

SEQ ID NO: 115181 - protein, 42 aa, Oryza sativa
  unsure (1)..(42): unsure at all Xaa locations
  Clone ID: PAT_MRT4530_18802C.1.pep
SGVIHNISHXKXTSQNLXNFHMNFNTXXPLQICNFNFPQKKI

SEQ ID NO: 115182 - protein, 196 aa, Oryza sativa
  Clone ID: PAT_MRT4530_18803C.1.pep
RAAGIRHEGGSAGGKGAWRDGAVTYLHLLFYIAISGGQIFFNKWVLSSKEINFPYPVALTLLHMVFSSVVCFAITKIFKIVKIEEGMTTDIYISSVIPIGAMFAMTLWLGNSAYLYISVAFAQMLKAIMPVAVFLLGAAFGLEEMSCKMLAIMSVISVGVIVASVGEITISWVGVVYQMGGVVAEALRLIFIEIFL

SEQ ID NO: 115183 - protein, 215 aa, Oryza sativa
  Clone ID: PAT_MRT4530_18804C.1.pep
MAGAPSRSRGDFDHLIKLLLIGDSGVGKSCLLLRFSDDTFTTSFITTIGIDFKVRTVELDGKRVKLQIWDTAGQERFRTITTAYYRGAMGILLVYDVTDESSFNNIRNWIRNIEQHASDNVNKILVGNKVDMDTKRVVSTAQGQKLADEYGMKFFETSAKTNQNVEQVFFTIARDIKQRLTETVAAAAEPPTIQISRQEPDQAAASSRWSACCNT

SEQ ID NO: 115184 - protein, 702 aa, Oryza sativa
  Clone ID: PAT_MRT4530_18805C.1.pep
MADGANEDGGGSAAGERPMVAIKRKREKVPGLAEDGDSSPSSANRSVDMEVEEKLDYSCAGAEEDVSSGCSIEMEDVGEQRQVEPTWEDKVLRVLHIVRRNQFAEYDPKEGGIVYTRFCIHNIALFDLDKESTIGPGPPINSLDPSEYWWLDDSLNIIAIKVAESDVGYPVRIYGTVLARDQQDYRCVYLFRRSRDNPQLITSPEDSLTLTGPYRALASKDIIIFEFNLKILGDGDVDRDFGKAAATAANMAEAEAGERRRATVIGGGDADAATEQSLRELASEEEEEEKARAYNSLFGGENGKKKRDTSSRRGSRSKRMEVGGMVEKKSTRSPPASSGLVASAQGSSGGGGGNGEMGKVNCNEKHTYGEEKEKEKVVETRSELKPKPRRRKNWEEEKLTWEEKVLKVLHIVRSIWEVTEFDPKMEWFEPTRLCLFNAAFFDLHKESEAGLGPPIDSLTYSVYPDLQTSVNIISIKVIKSDVGYPISVFGTVLARDQYDYRCVYLFRRGRDDPQIINSPAVLHWQDLLAKIAADSNTTDQSLTTPVTRAVSALVLEMTRKTDILRMKVHRQFKNNVNGGKFHEALSSILGFSKNNQGIKRHKALQENDQSKGFCDNSTHLVNHTNPADCNFTNRGHNNPNTDDRHDSKHFTTHFFKAKGSSKEKHSYWHYNFPTKSKYMILVNKVTFIKEKEFADISGNNDG

SEQ ID NO: 115185 - protein, 411 aa, Oryza sativa
  Clone ID: PAT_MRT4530_18806C.1.pep
MERTAAEAAAGGKGAWRDGAVTYLHLLFYIAISGGQIFFNKASHQSNPSISRHHPLPSSLPPRFSGGFCLRVRVIRRRRARLYGAAGGGFSVAARFCFWCCTWVLSSKEINFPYPVALTLLHMVFSSVVCFAITKIFKIVKIEEGMTTDIYISSVIPIGAMFAMTLWLGNSAYLYISVAFAQMLKAIMPVAVFLLGAAFGLEEMSCKMLAIMSVISVGVIVASVGEITISWVGVVYQMGGVVAEALRLIFIEIFLKKKGVRLNLISMMYYVSPCSALCLFIPWLFLEKPKMDESASWNFPPFTLFLNCLCTFILNMSVFLVISRTSALTARVTGVVRDWSVVLLSAAIFADTQLTFINIIGYAIAIAGVVAYNNRKLKPKPQGNEQQSADSKANPGSPQDVETSISTKEAS

SEQ ID NO: 115186 - protein, 61 aa, Oryza sativa
  Clone ID: PAT_MRT4530_18807C.1.pep
MEDLDDVFSDMCLHVDLRTHRHQSRAAESFINAFGCLNLHLMEAPFGGLNIKLADLSRSII

SEQ ID NO: 115187 - protein, 78 aa, Oryza sativa
  Clone ID: PAT_MRT4530_18808C.1.pep
KKKKKKKKKKKKKKKKKKKKKKKRKKTYTNMQKGRLFYRVPSFLMRVCDVLHFFLLAQNLSYLAFFFHRPYWLTPVVS

SEQ ID NO: 115188 - protein, 83 aa, Oryza sativa
  Clone ID: PAT_MRT4530_18809C.1.pep
MEDGGVANAVEGGGGSGAVEDGGGGGGAVEAVRRRPSAMGVRQCHINIMQVKSALVWPKQGKVNGIKKLRRCRYTILKLKGEL

SEQ ID NO: 115189 - protein, 606 aa, Oryza sativa
  unsure (1)..(606): unsure at all Xaa locations
  Clone ID: PAT_MRT4530_1880C.1.pep
MVLLERTPLVVPEAAAAAAAASSPLRRPSPRVLREVPPPPLDPILPYLRSINKAMDELRTGPKFEAAALDRLKICVMECIDKYGDDYQYSTDPRLLKIWILYADAIGDFDKAYKQLEEKRMFLEHALLYDAYALFLFSKGKVLEAGKVYEVGISRKAEPLDHLKKMHTIFLKHLEKIVEEADADAQLWSVGHKADKLAAVRTKNCFDIVSYMIFLCGGTFVFPKKPKPSKIQKKEPILLDPWSESTMNNLLENINVDLKKFAGYHKSNKVYHGKVPLTSPQNVLRNKVIELGGRKYQIKGSPGTGAFAKVYKASVDGNTEDLVALKIQKPPFPWEFYMYRQLDTRVSDIERPSFGYTHEVHVYADVSVLVCDYLPYGTLLDVINSHLVLERHMDEVLCIYYTIEMLRMLETLHSVGIIHGDFKPDNMLVCYPSMXGEITDETFKGETRSERNQDSHSXGLCLVDWGRGIDLNLFPSGAEFYGDCRTSGFSCVEMQEQRAWTFQADTYGLCVIAHMMLHGTQMSIQKTPRPDGSYMYQPTSPFKRYWNVELWKNLFSTLLNATSNGSDAAVLRSLRMSFQEYLCSNRQLVGKLNQQLAKQKTSLCLS

SEQ ID NO: 115190 - protein, 91 aa, Oryza sativa
  Clone ID: PAT_MRT4530_18810C.1.pep
MVTAAFGDGKELATTTCGSGMEVAAAADDGSRQLRPTLREGSWRERLAMVGGSPPPNPAREEAVAPSAMSGGSSHTYPIILDPHGEERGDG

SEQ ID NO: 115191 - protein, 521 aa, Oryza sativa
  unsure (1)..(521): unsure at all Xaa locations
  Clone ID: PAT_MRT4530_18811C.1.pep
MAEEEEEKRRLGEGEGGGVMRDARKDGVVREVIRMEREAVIPVLKPKLVMKLAYLIEHDLDRSEFLKLCKKIEYTIRAWYLLQFEDLMQLYAMFDPLSCSLXSLFDPVSGEKRLEQQNLTPEEIETLEFNFMTYLFQVMEKSNFKLLSDEEYDVAQSGKYLLNLPIKVDEPKLDSKLLSTYFKEHPHDNLPSFANKYIIFRRGIGIDRTTDYFIMEKLDVIISRAWSSLLRVTRIDRLFSKKPQVKSKKDTKKTDEINEDLEEPELFVERIRLEKIELSVRNLMSKMTIQEPTFDRMIVVYRRAGTKTKPDRGIFVKHFKNIPMADMEIVLPEKKNPTLTPMDWVKFLISAVIGLVTLFGSLEMPKADIWVVIAILSGVIGYCAKIYFTFQQNMTIYQNLITKSMYDKQLDSGKGTLLHLCDDVIQQEVKEVIISYYILMEQGKATEQDLDLRCEELIKEEFGAECNFDVRDAVKKLERLGIVHRDSIGRIVCVSLKRANEILGNTTEELVMRAQQSPTAS

SEQ ID NO: 115192 - protein, 53 aa, Oryza sativa
  Clone ID: PAT_MRT4530_18812C.1.pep
NFINLIGNEEGGIQSSLVMLSGKKLLDTTAYLVISSMTNQEVKSSLRKSCSPG

SEQ ID NO: 115193 - protein, 57 aa, Oryza sativa
  Clone ID: PAT_MRT4530_18813C.1.pep
AAGAGGKLAGATCYGGRLPSTKSGERGSSGALRDVGRLEPHLPHYIGSPWRGERGWV

SEQ ID NO: 115194 - protein, 67 aa, Oryza sativa
  unsure (1)..(67): unsure at all Xaa locations
  Clone ID: PAT_MRT4530_18814C.1.pep
MPPKRKGLTSKKMAEAREEGGIDVLPDALLQHILSFLSADEAVKTXRVLSRRWRHAXLWKSTPTLRI

SEQ ID NO: 115195 - protein, 120 aa, Oryza sativa
  Clone ID: PAT_MRT4530_18815C.1.pep
LSRAAAGEHVTGGTAQTSSSPLLSSPLLPDSSLLPPPALRLGSIRIESKVVRMKKGLHPQMQWISYVTQSGRLINIMMTKVNHTGKVYHMRAKRQMAQSLGQIAKFNRRYQQESEENKEK

SEQ ID NO: 115196 - protein, 163 aa, Oryza sativa
  unsure (1)..(163): unsure at all Xaa locations
  Clone ID: PAT_MRT4530_18816C.1.pep
SRPDSRDQCEPHQDWWENKRSLMDSPPRRQEVDPDXATPHGRDPCSKQCPPPPAQWKNPQCMEECRSPQRHQNPPVDVAEEDATPGGDRSPNQCQPPHAQWKNHQCTQDCGSPPPQKNDVVEEKAAHGDHQSPNQCPPPLAQWKKPQCIPPSSQWRPPEEEVL

SEQ ID NO: 115197 - protein, 459 aa, Oryza sativa
  unsure (1)..(459): unsure at all Xaa locations
  Clone ID: PAT_MRT4530_18817C.1.pep
RLPPPPKLQTERTLLLRRPPPNPTRRSAKGETGHPEEEEDXEEEEEHQEEGRMPPKKAAPSKADLAKKQKVVEDKTFGLKNKNKSKNVQKYKKKEEEKAREKELNDLFKVAVSQPKVPVGVDPKSIVCEFSEGRGGQDVRAQEQEQELERPEVRPVPASGRPAQARPDQDHWDQETLEKVVASKGAEYQQNKPTDIQLLGCPLGHIVSKPPVLILVLNAPGTTRGKSDICHVATVVNMIWCDELAWWDSFLVAAHDMVCKYFLDAVEKKQYGWFWVCPNGGKDCHYRHALPPGYVLKSQMKALLEEESEKIAIEDEIEDQRKKVKTTTPMTTDLFMEWKRKKAEEREAGLAALRAERAKNDRMSGRELFMADSSVFVDDAEAYDVYERQEESEANEEPSNKNQDEGPSSSTSNGKEVEESDDEDINIDDDLDIDELNELEASLSRTSIQIREPGEGTSS

SEQ ID NO: 115198 - protein, 104 aa, Oryza sativa
  Clone ID: PAT_MRT4530_18818C.1.pep
PLYATILDTNHTGEARSPNQWTRSIYILTSIGCNDTILDATSGDVRRKRDVQHSQYRYNADQGLVRKVHHEGCLEDHRANGSHDQHGGHEGVVAEECAESTILY

SEQ ID NO: 115199 - protein, 151 aa, Oryza sativa
  unsure (1)..(151): unsure at all Xaa locations
  Clone ID: PAT_MRT4530_18819C.1.pep
FGFFFFFFFFFFFFFFFFFFFFFFFFFFFFFLGGRKRRPWGGPPRGDPKKKPKGNPLNPQKKRGWGEPNXRVPEPDKKRPDPGPRPKTGNPGKKPEENGFQGPPPRGENNGFNPGGPPGSPPENGGDGPQPGKNPGQPEGGGGQPRGLGDG

SEQ ID NO: 115200 - protein, 778 aa, Oryza sativa
  unsure (1)..(778): unsure at all Xaa locations
  Clone ID: PAT_MRT4530_1881C.1.pep
MDLGKSSSTSASLKKLQEDGALPGRGSMEREARGINPQPVLGRMVAIEVYILCGFLPPPSEFLLLVLNFYGLSLLHLNLNSIAFLNIFAHLCEAYIGVEPFLDLFRFYYELRWMESNRVSGCVGFRLRDGLKSRYIPFQCPSSRSKWWNMWFYLEIKDSDLVFVVPDEQPDKISSWTAKPPLTPYLQSFIDIIDDLRLRGLSGYEVVADFVGLNSETVERRVGQVMISGPTTASNILVPLCEKGAAERDDAINALPLTDIIGPLADHQVAASLKEKVAKEASDAVAATTSGDNVPTKGRKFSSVSGHRRKTSTPSASDASPPPPRRQCLVTVGEKEARAKAAQNKSGGTSSASPAAPSTDVVLVAESREATPSGPVSDPAAGRGPPAAVLTWEELQVEMGRLLEAGARGIGREIAEARSEVVLANARADRLVRELAEAREDLTKMRELVAGNERQRQGLEDCMSELGNNLSEIRGSLRVTYTGLHQLAGECGIKSTIPVNPDEFSLTSSLAELATAMGEIPSKHAARIAEETSNGIYTGACHVLACVKLSRPELDLREILDQGAASNTRKKVMEEVGDLGESVLPLFEEDVDVEDVQQRGQPKLSAIPPDLASVGHALLDNVGEILPARTGTTTTSLDLEDALAGQDRRIQYWKTKFEVAELERAMLEVKKEQAVETLRGREVWFNSYLKSCCTSMARVCRELRVVCGEPEESAAGYISWLNGXGVGKRIDEALKQECRRSSRYAGGHVLACIRXIVRKCTSSFFMKGSLVLGGLLRR

SEQ ID NO: 115201 - protein, 36 aa, Oryza sativa
  Clone ID: PAT_MRT4530_18820C.1.pep
MDRKACGKSYPENKHVKSLADGLGTYTKALGLELDL

SEQ ID NO: 115202 - protein, 136 aa, Oryza sativa
  Clone ID: PAT_MRT4530_18821C.1.pep
SMSAYSHGGCDSEIMCAPLVPQQLYLPDAQIISFSALRTHHKKTNQIMEIKLRKKPNRPRTPDSQKSKENSLLGGSGSSHRRAALSSVLVNPVPPPYLAETWIETSSYAALATSHRHGHPHELSSARRNRAVRSIA

SEQ ID NO: 115203 - protein, 181 aa, Oryza sativa
  Clone ID: PAT_MRT4530_18822C.1.pep
LGGGGVRMARALAVASYGVGSSTGWTFLGTPNYTVWATPERFYLGDTVVFTYNKQLHNVMAVSKADYKNCDARKPIATWSTGNDSVVLNATGHHYFLCGFPNHCGIGQKVDIRVAASGHSSAAPSMAPAPASGSEAPVAPRWCAARPATQPPPRRRTATPPLAAPSSRPSPCPCSPSPPLA

SEQ ID NO: 115204 - protein, 64 aa, Oryza sativa
  Clone ID: PAT_MRT4530_18823C.1.pep
IIPCGPQPGAEIAWFQAEPLTARLEPKGVGVQENHMSSSVDGLRWSKANLLAAFWHGKHDAVIR

SEQ ID NO: 115205 - protein, 54 aa, Oryza sativa
  Clone ID: PAT_MRT4530_18824C.1.pep
MGSETFLEILLAILLPPLGVFLRYGIGMEFWIALLLTILGYLPGIIYAVYVLVA

SEQ ID NO: 115206 - protein, 106 aa, Oryza sativa
  unsure (1)..(106): unsure at all Xaa locations
  Clone ID: PAT_MRT4530_18825C.1.pep
FGYNKGFIGVSADEVSGRYIGLXGLHPIGFYWIYIVIILYYIIISRLSXIIIYIRHIADCSKPYRYRLVQTNXHGRISLTFGPALELSRSPRPVCVFRINTIKLKK

SEQ ID NO: 115207 - protein, 61 aa, Oryza sativa
  Clone ID: PAT_MRT4530_18826C.1.pep
MPTWSNHLPWLINKDLIATSQSDSTIIGNKRLDVAVSISIKEFIELIKKFFDASFTGRDLP

SEQ ID NO: 115208 - protein, 245 aa, Oryza sativa
  unsure (1)..(245): unsure at all Xaa locations
  Clone ID: PAT_MRT4530_18827C.1.pep
TFHALCQCLHAYDRWNAMREVWMLPAHEDVKYTWKDCLLLILANLSELEQACTLILLWHIWHVQNDITHGKSLPVKEASKNFLMSSMNSLMLXIQQHPAADLKNGKHXIVAGSIDPLLNXVDPSLEASNWNQPMNGWVKLNVDSSFSXGIVVRDCSGNVIFISRKAITHCFDALEVELMACWDGLSLTLQWTLFPIIVESDCDVAIRSLLISXEDDYSRWAFLIWDTTYLVSEKRAIKFQKISRN

SEQ ID NO: 115209 - protein, 75 aa, Oryza sativa
  Clone ID: PAT_MRT4530_18828C.1.pep
LTIGKRNIRSLSIDSTYFPTDEKVTHKRARISNQGGDQAIHFLHLGTYWRTRLNYQAHRATRLLNTQMLIKYPGS

SEQ ID NO: 115210 - protein, 61 aa, Oryza sativa
  unsure (1)..(61): unsure at all Xaa locations
  Clone ID: PAT_MRT4530_18829C.1.pep
DKPPDIDFRDXHGYSPTVSPDTVRRDESAISDLAGHRFEEEGYPVVDYESDLQTDMSTTVR

SEQ ID NO: 115211 - protein, 687 aa, Oryza sativa
  Clone ID: PAT_MRT4530_1882C.1.pep
MARLERLEVEDGPDRWVSGRERERGACAADWADWAKQQDEGREKEENPVDVVWLDVHVQHEVTGRPPEMHFSRAKVRETMPCSVGSPPNMVRRKLIKVSYELRLSRLAGASSGRAVASSSIAATSSTPACPPFPAETPGAAFPPSPFSFLRAGHLQPHLPPHPCTLRLRRHLSRRRSCPLSLGQPSVSRGNHRRRVLAGVQWRRHHFSASGRLCRVPGAPADVATTSPGTGVPSSLPAKPRRRPNFAGTPSSPRRPLLPPRRLVVPLHHHLHQHRSGVFHAVPSSAQPLLPAIIVSSSSPIVLVVDVPSVARLVVSRRRLRRRHRSGVVLVVLVPVQQLPAVLVASSPVPVVVVVVVLSSFPVDVAFVPPSSRSRPSSAFRQVCRCSPVLVFVLGSASSSLAPAASRLRPRVAAEAVPSPFVSVVPRVGALLLGAQFCLPVPGIPAVGRRPHFPPGQRLFGLLFGLLLGPLTPSGTDGDELALPSLPLGGGWQGVVEGPIECPQFDRPRGAGWWALSNFLRSIGSPVEQQRFDRSQSNAHGPLSDSTGGLGTGDGLPSLTSHGQWRPPFPDGGGHGDDDGRGWPARRLIRRYYPREGRILHPTEELGVWRAQRRPPVADLDDGRAAGTTTAGGGDPPPSPQRRGGRGGSAASGSAAPRRFGAIDDGGRQGRQIRRRRAVGTQLPAAG

SEQ ID NO: 115212 - protein, 353 aa, Oryza sativa
  Clone ID: PAT_MRT4530_18830C.1.pep
MATAAMTKVFVLLFLVAACYLPAHAAAAECDCATDTAGRDKAQALRLKVIAIFCILAGSTVGAALPSLGGRFPAIQPETDVLLSVKAFAGGVILATGLVHILPAAFEALSSPCLVGGPWKRFPIAGMVAMVSAIGTLIVDTVATGYFHRTDAKRKAAAVADEPADDLEASDEHSHGHAHGMSVMSVAPAGEEDLVRHRVISQVLELGVVVHSLIIGMSLGASDFPSTVRPLVPALTFHQFFEGIGLGGCIVQAKFRVRSVVTMALFFSLTTPAGIVVGIGISSVYDANSPTALVVQGLLEASAAGILVYMALVDILAEDFMKTKVQRRGRLQLAMNVALLLGAGLMSMIAIWA

SEQ ID NO: 115213 - protein, 73 aa, Oryza sativa
  unsure (1)..(73): unsure at all Xaa locations
  Clone ID: PAT_MRT4530_18831C.1.pep
SVSQCVDDCGGCKVLLNVXAPATTRSIVLADPPVGASSGEMQMSVQNGESGVYVCNTGKCATSIGGCSCCSSG

SEQ ID NO: 115214 - protein, 67 aa, Oryza sativa
  Clone ID: PAT_MRT4530_18832C.1.pep
IFMIGTKCKISKIAFKFQLSTIIRSIFPNKFPTLKLFMVKMKEFLEITSKVLLWPQILKNYDSNINY

SEQ ID NO: 115215 - protein, 70 aa, Oryza sativa
  Clone ID: PAT_MRT4530_18833C.1.pep
GEVPVAILGAYSVAPEVLVHGRLPVGRGWGLRGATSLRTEKGAVRSRTVDVVSLEVFELYSSIDLFMNCS

SEQ ID NO: 115216 - protein, 600 aa, Oryza sativa
  Clone ID: PAT_MRT4530_18834C.1.pep
MDPRLLSAARRGDREWLEAVLGGAAPAPDQGAVDVAGPPDPGQQAPAQPPPPSPSAAALLLDVATTPRGDSALHVVAGSGDSDDFLRCARMIYHGAEGLLGHTNATGGRADEEEARRLRKRRRCGRGCVAAERIIEAWNMGQLCSKERDNNLPCSNPVSTDSMTVRGIGSLAVWKCYSDNLSREKREERPSGAAVLQWLGGCDVGGGDEGRWSMAVCRGEEGVGLGGGDVRRKATAPAVACDWSATAAHTRGGRGRVGWRQWSARHSDGLPWLARQRRRQANTKTYHPLPTIRPEPLGELRRINNHSYTEYGRIPRYGHSGSSPEDDSHTIPARAGEASTGKAPYLEPCGLAPNPSAVMAAGSSPLVPGAEKALGCWGGSERKVQLGGAEEGDAVTDRWRWPWIQATVAHIASRGDVGARVERDGRGIAEVGAMDFGHGTATTTFPDVYVADKGIAACGFSSLFMDCFKIMENVLEKQENLLAFEFEVRQWGCDKRYDIRGEGACLKRYTDSSFNTGFACSRMLEPITQRLSVMSFTCGIFSRCCRARSSFRRFTALSSLSISREKCGYDVGTTHKKKKIVTVTISPQWQCLRGEMDMNF

SEQ ID NO: 115217 - protein, 65 aa, Oryza sativa
  Clone ID: PAT_MRT4530_18835C.1.pep
NDALQGGWHYSSIMLNYCLNDSVKVSLLVRQHAEKRMFCYPINLVFTTGVISLIVVIQRPVNCIY

SEQ ID NO: 115218 - protein, 749 aa, Oryza sativa
  Clone ID: PAT_MRT4530_18836C.1.pep
MALRARLRRLLVVVILVVVEPAGVAGDTGEGVAGEGGPVGGGWAGVTCRGGRVVGVTVAGFRRTRVGARAPRFAVDGVRNLTALEVFNASGFPLPGEMPAWFGRGLPPPLAVLDLRSAAVNGTLPPDLGVSGNLTSLLLSGNSLSGAVPGSLLSVAGLRFLDLSGNNFTGGLPNVTPVAGGGAASLFNVSGNSLYGVVSDAIGALKGRFQVVDLSSNYFDGVWNVSDGNVDVRMNCFSGAPGQRNRVDCEEFYRRAGVRLGDALAPAPSPETSPGTTTKNNNSRISKGVLIGVIAAAATLMVVFFGALVFCLARQKAGRRGARGRGVDTNEESTRGVRRRDSSVNPVTSPPVAVSPSANSGHKDPVVVSGEFTFEQLVHATGGFGDDNLLKHGHSGDIYHGVFESGSQVVVKKVNAQSVNKHAGELDFYKMYSHERIVPLLGHLAKDEEEFMAYKYMPKGDLTNALHKKPVDTEDGLPSLDWITRLKIATGVAEAMCFLHDECRPPLVHRDIQATSVLLDDKFEVRLGSMSDVCAQQSGGSQSVFSRLLRSSRSLDKNISGPPATCSYDVYCFGKVMLELVTGNFGVSGSNDAASEEWMTNTLNRIDMNDKESISRIIDPLLIVDEDHLEEVWAMAIVAKTCLNSKPSRRPSARYVLRALENPLKILRMASRSNSARLRSSSSRSSWQSAFLQGNRYQSLETASSSGQMLDRKHSTRSHGSGGETSFSFKRASREIAPEPEGFEENVVV

SEQ ID NO: 115219 - protein, 253 aa, Oryza sativa
  Clone ID: PAT_MRT4530_18837C.1.pep
LYVNTLAVIKSVALKAAMDLGIADAIHHHGGAATLSQIVTRVTSLHPSKIPCLRRLMRVLTLTGVFAVETTEPVDGAAADELPAAVYALTPASRLLLVGSGNHHQQASLMSMLLHPSFIASFLRISDWLQRELPGPCIFEHTHGRSMWEMADDDAAFNKVVNNRMVSDSRLVMDVVVREHGEVSRGISSLVDVAGGHGTAARAIAEAFPEVRCTVLDLPHVVAGAPVGAGPGVEYVAGDMFESVPPANAVFLK

SEQ ID NO: 115220 - protein, 529 aa, Oryza sativa
  Clone ID: PAT_MRT4530_18838C.1.pep
MAVSLVVVVVVVIAIVVPLLYLVLLPAWKPARRDDGDGGMRRRLPPSPPWGLPLLGHLHLLGALPHRALRSLAAAHGPVLLLRLGRVPVVVVSSAAAAEEVMRTRDLEFASRPRVAMAERLLYGGRDVAFAPYGEYWRQTRRICVVHLLSARRVLSFRRVREEEAAALVARVRAAGGAVDLVEHLTAYSNTVVSRAVFGDESARGLYGDVDRGRVLRKLFDDFVELLGQEPMGELLPWLGWVDALNGMEVKVQRTFEALDGILEKVIDDHRRRRREVGRQMDDGGGGDHRDFVDVLLDVNETDMDAGVQLGTIEIKAIILDMFAAGTDTTTTVIEWAMAELITHPDAMRNAQDEIKAVVGITSHITEDHLDRLPYLKAVLKETLRLHPPLPLLVPHEPSSDTKILGYSIPACTRIVINAWTIGRDQATWGEHAEEFIPERFLESGLDYIGQDFVLVPFGAGRRGCPGVGFAVQAMEMALASLLYNFDWETRVVDRRSEFGTSSLDMSEMNGLSVRLKYGLPLIAISRFP

SEQ ID NO: 115221 - protein, 141 aa, Oryza sativa
  Clone ID: PAT_MRT4530_18839C.1.pep
MGSTRRYRNGIPIGPPAYTPIFFNYPPGLRELLLYVKRRYNNPTIYITENGTDEANNSTIPISEARKAAARVGVGNEEREDEHAAMEAGEEVEGRMRRTFVDCFEFGDGFKDRFGLIYVDRATLARFRKKSSYWFADFLRR

SEQ ID NO: 115222 - protein, 205 aa, Oryza sativa
  unsure (1)..(205): unsure at all Xaa locations
  Clone ID: PAT_MRT4530_1883C.1.pep
KFEAAALDWLKICVMECIDKYGDDYQYSTDPRLLKIWILYADALXFVEVNFLGSNNLMSNLXVDVIANHFCGTRKAEPLDHLKKTHTIFLKHLEKIVEEADADAQPKPSKMQKKEPILLDPWSESTMNNLLENINVDLKKFAGYHQSNKVYHGKVPLTSPQNVLRNKVTELGTGTWSCGKTSSAHCSTRPPTAAKRLCSGASGCL

SEQ ID NO: 115223 - protein, 87 aa, Oryza sativa
  Clone ID: PAT_MRT4530_18840C.1.pep
SLYRRTAVTETSNINDDHLSLTTLIVVLLPVNERGGLLYAATCRTAKHYLYHEETTFIKGGDTLYSYNRCDDVYMFCHFETLIHKLR

SEQ ID NO: 115224 - protein, 456 aa, Oryza sativa
  Clone ID: PAT_MRT4530_18841C.1.pep
MERDKGGRRIQPLQARVHPAYDYSGPDDVTRISQRGLDSATVAQRVCQVMISLPSKAAEILAPLCEQGGTERATAINALPLTDTIGPLVDHQASALLKEKVSKEASDVAAAGGSRTSKQKRWATTVTGTGSRRKVSGSEERADSYFTISLRTRATSLQPREEDWASSTSLAHSRGEVATSTTTAAAVLTATAVIGDAPVAAEPAPDVVIALLAPLPPAAIEPLTLTQMMAEMKRLLDVGARGWLGFTSLHQKAGACGVEAKILEHPDETSVTSSLFTLAQAMELGRRCHKPPHLRQPYSVGDDDGNGGRRAAVGIGEDGVGVVDEAEGDIGARVGVGLLPEEEGEAAVGVGDGSVVGRVGGRGKLDDSERVGVDQGEDRLGSEEDVGDGEELVGTREGRVHLHRALCEPLAPDELPRREELPHDLQSPLRLHPPGRDATSAAAAGRLHLRRRRSPW

SEQ ID NO: 115225 - protein, 33 aa, Oryza sativa
  Clone ID: PAT_MRT4530_18842C.1.pep
MAWATPCVITMLRGNTERDKKDALELEPYRYSV

SEQ ID NO: 115226 - protein, 53 aa, Oryza sativa
  Clone ID: PAT_MRT4530_18843C.1.pep
GFKLPYGFVMTNSVSFITQSLRTFCTNQHHLATNPLSTLKSRVQLMRKRKPRP

SEQ ID NO: 115227 - protein, 137 aa, Oryza sativa
  unsure (1)..(137): unsure at all Xaa locations
  Clone ID: PAT_MRT4530_18844C.1.pep
KRGISDVTMTTMDTNVTHIMDQQAAITIKSSKCLNPIRPPATLLISNGHQIYIRAPFSACEYPMERSRSHLSNRSSLICNFHLNWPQSHKQGVASPIMGLWACNFIXDPGPVQGPCGKRPNQVEHDPEDPFVIHPYP

SEQ ID NO: 115228 - protein, 82 aa, Oryza sativa
  Clone ID: PAT_MRT4530_18845C.1.pep
PGPGAYPCSGWTWPARVHGGRVGLGLAASGRHPQWPRLPPRHLAVPPRRARATRARASMAGVGGLIQEATGSPPISLTHAKT

SEQ ID NO: 115229 - protein, 35 aa, Oryza sativa
  Clone ID: PAT_MRT4530_18846C.1.pep
PDIPHPVPTEAGKRDLASSLISTGSYSRRKTAPRP

SEQ ID NO: 115230 - protein, 616 aa, Oryza sativa
  Clone ID: PAT_MRT4530_18847C.1.pep
MVAPMAMVFAMAIVGEIGSYTLTSDWKLRIYLPMPMTWGNHGQLHGGQEDSVAMKTVKFSIAGSVMAPVRSHQRLLQCIHSLWRGQISGSLPDQLESAKSKMSDEDVQQNKTRKLLEEIRLSGYNIIGLSLSIQGAFSDLLDISSFNDAIFEDLGSMEFRHLSKLINLVFVPLDLMGGEKGNAYVENNFTCWLAKQKEDLRAKAFCSAPMEFNGEWNWEFEDEFQRYLPVYFNMLQEVDAMDDSAEGDCSGMNALLQKLNPQFRSKYAIYSSEHPYLREISRMQKGSDRSYSVIERLEENLEIQSTFDAYEVDQSVGEHKDLLLQIVGQLTNAKENKQFQPLTPDPGDFAPHLKPYARFYIQTKLKMSMSVWGLALPRALHTINCINFGIRISVIYLPTWLTILSGSENDTYARAAMQIHLHEDYDNYLASGQLDSHIYSHVSEDFSDEDVENNAVPQKFSVLDHDLIHLSLKRRAQIVDMHNQVCTYSKCLRDLLENESLKDRLMSLMSELNAEGFFDIDSNSVNWDNECFSKLVEKFKNEVFTGHSLPRRYTIQGIIDYWAILQEKDNTWQTFEKVVTGTSTKLIAYLPQFWRDTRYYKHEYYDIVREPLKKNF

SEQ ID NO: 115231 - protein, 204 aa, Oryza sativa
  unsure (1)..(204): unsure at all Xaa locations
  Clone ID: PAT_MRT4530_18848C.1.pep
SGGARGAGGVTTGARHSTVCHCRSKRGRSRPPSPPRRSRVAVASSXVPMLYSTSPTSVSPGSSSPCCWVAPQPPPFSASKRRPRSALPLQIRGAIITPPPLEAGTSPRMSPPLRWAPPREPRPCPRMYTAVGLEYRTSSQKESVKAGRRRCLPAPTPAPTTRCSHWTTAWRTGMWPPPPPPPWTTAAAPPSAAPPAAGGRRSSS

SEQ ID NO: 115232 - protein, 158 aa, Oryza sativa
  unsure (1)..(158): unsure at all Xaa locations
  Clone ID: PAT_MRT4530_18849C.1.pep
PEHSENASASIVASIVHAIADDLRKQKSVRFXHGSISDQSKRLFCGQKSVHHVLGGGKSAEVLLCRNKKISSSVIAVTXAVWVLFEWLEYHFVTTACFVHDHGMVVQIAWSTFTGMLNGSPYKVPRVALPDELLRNIGYAIGTQVIKFLRTRQHVSCE

SEQ ID NO: 115233 - protein, 540 aa, Oryza sativa
  unsure (1)..(540): unsure at all Xaa locations
  Clone ID: PAT_MRT4530_1884C.1.pep
MSDDIKFVLSLLLLSSLMLFVASDDTECLRTLQKSLVDPRGELESTWNFSGNGFNGFICSFTGVNCWNPSDSTVRSLHLVSLGLQGQFPEGLQGCSMIEDLNLSGPIPSNISLLVPQLSSLDLSYNSFSGPIPAYIGVEPFLDLFRFYYELRWMESNRVSGCVGFRLRDGLKSRYIPFQCPSSRSKWRNRWFYLEIKDSDPVFVVPKEQPDKISSWTAKPPLTPSLRSFIDIIDDLRVQGLLGYEVVADFVGLNSEAVERRVGQALPLTDIIGPLADHQVAASLKEKVANEASDAAAATTSGGNVPTKGRKFSSVSGHRRKASTPSXEARAKAAQAKSGGTSSASPTAASTDVALAAGSREATPCGPVSDPVAGRGPLAXLLEAGARGIGREIAEARSKAAPANARAEQLVRELAEAREDLMKIRELVAGNERQRKGLEDRMSELGNNLSEIQGSLRVTYTGLHQLAGECGIKSTIPVNPDEFSLTSSLVELATAMGEIPSKHAARIAEETSNGIYTEACHVLACVKLSRPELDLREILD

SEQ ID NO: 115234 - protein, 132 aa, Oryza sativa
  unsure (1)..(132): unsure at all Xaa locations
  Clone ID: PAT_MRT4530_18850C.1.pep
GARKREGPPKKRGFKKTTNPGPPKIGPHKRGRAQPNPGGGPLKKKTTPPGGPPKGKGNPPKRGGAGETRPFPLLGGQKFGQPRGPGKXPGGPRGGPGGPPWGGPKKPPGGGGPTAGGGGQPFSKPLSAGGGA

SEQ ID NO: 115235 - protein, 97 aa, Oryza sativa
  Clone ID: PAT_MRT4530_18851C.1.pep
RLNQRLLLLRSTDEGNVCETNNTIIGSINEGQITSNVGTTVTFTGNATVRIYQTHTDHYTDYAGSLTPFYTEARSTSYWFGGAGFIQDGQGTWAGAF

SEQ ID NO: 115236 - protein, 83 aa, Oryza sativa
  Clone ID: PAT_MRT4530_18852C.1.pep
HFHRQLAIGGFVCTVREKRNDDFYVAPDMSNQNPNEYYLAKIQLKKDPLDQNSIKKIDFDLSHSQIRKFSGTLRCLVVDTLKT

SEQ ID NO: 115237 - protein, 785 aa, Oryza sativa
  Clone ID: PAT_MRT4530_18853C.1.pep
MAERLTRIAIVSEDKCKPKKCRQECKKSCPVVKTGKLCIEVTPASKLAFISEELCIGCGICVKKCPFDAIEIINLPKDLEKDTTHRYGPNTFKLHRLPVPRPGQVLGLVGTNGIGKSTALKVLAGKLKPNLGRFKNPPDWQEILTYFRGSELQNYFTRILEDNLKAIIKPQYVDHIPKAVQGNVGQVLDQKDERGVKAELCVDLELNQVIDRNVGDLSGGELQRFAIAVVAVQNAEIFMFDEPSSYLDVKQRLKAAQVVRSLLRPNSYVIVVEHDLSVLDYLSDFICCLYGKPGAYGVVTLPFSIAETQESAEEIETYQRYKYPTMSKTQGNFKLTVVEGEFTDSQIVVMLGENGTGKTTFIRMLAGLLKPDTVEGTEIEIPEFNVSYKPQKISPKFQHSPLQIEQLMDQEVINLSGGELQRVAICLCLGKPADIYLIDEPSAYLDSEQRIVASKVIKRFILHAKKTAFIVEHDFIMATYLADKVIVYEGRPSIDCTANAPQSLVSGMNKFLSNLLVELPAHNLPRPSMSYALLVQKIHVVCFSTTYSRGKFKVAIAPSLAARAAAAIAGLPLLGSSSTSYKPAFTMEEEREVQEQVPQVASVESQSKHMSVSYFNHRLPASSTGVSVSARLLSLSSPSSSLSRSPLRLPRHHHHHRVTATWAPHPHLRDLAAGEPHCASPPLGTNRVTDLPPPPTAIPPNPPHTPRDLPPPPPPAMDLLRDRRLGALLVVVLVLVSGAAVEASIHTYDREPFREVGNAFLLSGGSEGVVADGADLAAPASSFIK

SEQ ID NO: 115238 - protein, 604 aa, Oryza sativa
  Clone ID: PAT_MRT4530_18854C.1.pep
MAERLTRIAIVSEDKCKPKKCRQECKKSCPVVKTGKLCIEVTPASKLAFISEELCIGCGICVKKCPFDAIEIINLPKDLEKDTTHRYGPNTFKLHRLPVPRPGQVLGLVGTNGIGKSTALKVLAGKLKPNLGRFKNPPDWQEILTYFRGSELQNYFTRILEDNLKAIIKPQYVDHIPKAVQGNVGQVLDQKDERGVKAELCVDLELNQVIDRNVGDLSGGELQRFAIAVVAVQNAEIFMFDEPSSYLDVKQRLKAAQVVRSLLRPNSYVIVVEHDLSVLDYLSDFICCLYGKPGAYGVVTLPFSVREGINIFLAGFVPTENLRFRDESLTFKIAETQESAEEIETYQRYKYPTMSKTQGNFKLTVVEGEFTDSQIVVMLGENGTGKTTFIRMLAGLLKPDTVEGTEIEIPEFNVSYKPQKISPKFQHSVRHLLHQKIRDSYTHPQFVSDVMKPLQIEQLMDQEVINLSGGELQRVAICLCLGKPADIYLIDEPSAYLDSEQRIVASKVIKRFILHAKKTAFIVEHDFIMATYLADKVIVYEGRPSIDCTANAPQSLVSGMNKFLSHLDITFRRDPTNYRPRINKLDSTKDREQKSAGSYYYLDD

SEQ ID NO: 115239 - protein, 53 aa, Oryza sativa
  Clone ID: PAT_MRT4530_18855C.1.pep
MPVGGGGRSVTRFVPSGGEAQCGSPAARSRRFVAGRGGAEEGKSGDGGGGPSG

SEQ ID NO: 115240 - protein, 423 aa, Oryza sativa
  unsure (1)..(423): unsure at all Xaa locations
  Clone ID: PAT_MRT4530_18856C.1.pep
VDHIPKAXVQXNVGQVLDQKDERGVKAELCVDLELNQVIDRNVGDLSGGELQRFAIAVVAVQNAEIFMFDEPSSYLDVKQRLKAAQVVRSLLRPNSYVIVVEHDLSVLDYLSDFICCLYGKPGAYGVVTLPFSVREGINIFLAGFVPTENLRFRDESLTFKIAETQESAEEIETYQRYKYPTMSKTQGNFKLTVVEGEFTDSQIVVMLGENGTGKTTFIRMLAGLLKPDTVEGTEIEIPEFNVSYKPQKISPKFQHSVRHLLHQKIRDSYTHPQFVSDVMKPLQIEQLMDQEVINLSGGELQRVAICLCLGKPADIYLIDEPSAYLDSEQRIVASKVIKRFILHAKKTAFIVEHDFIMATYLADKVIVYEGRPSIDCTANAPQSLVSGMNKFLSNLLVELPAHNLPRPSMSYALLVQKIFKNL

SEQ ID NO: 115241 - protein, 101 aa, Oryza sativa
  unsure (1)..(101): unsure at all Xaa locations
  Clone ID: PAT_MRT4530_18857C.1.pep
VLPVPPPPPPLHPDAESPKPKHLLFLARPSPDSNQISGMASTCFRAAXRMASSACRSAASRSIPSAARRGAPRXLQAAGGARVKXXGCRCCRXTGGGVRRG

SEQ ID NO: 115242 - protein, 137 aa, Oryza sativa
  unsure (1)..(137): unsure at all Xaa locations
  Clone ID: PAT_MRT4530_18858C.1.pep
LDCQLIDTCNVVYVQPADIYLIDEPSAYLDSEQRIVASKVIKRFILHAKKTAFIVEHDFIMATYLADKVIVYEGRPSIDCTANAPQSLVSGMNKFLSHLDITFRRDPTNYRPRINXKLDSTKDREQKSAGSYYYLDD

SEQ ID NO: 115243 - protein, 37 aa, Oryza sativa
  Clone ID: PAT_MRT4530_18859C.1.pep
PQVTKRTSLMRWSDMPELPSCQRPILRWHSTRWFFVT

SEQ ID NO: 115244 - protein, 123 aa, Oryza sativa
  Clone ID: PAT_MRT4530_1885C.1.pep
MVLLERSPLVVPEAAAAAASSPLRRPSPRVRREVPPPPLDPILPYLQGQSWCMHLLMPVSDLVFRSINKAMDELRRGPKFEAAALDWLKICVMECIDKYGDDYQYSTDPRLLKIWILYVIDWL

SEQ ID NO: 115245 - protein, 74 aa, Oryza sativa
  Clone ID: PAT_MRT4530_18860C.1.pep
MGKDPMWNLSRKRVSVSGQSRTRVAGSTTAAPCHLRYTQSPKAGVTAVDGVRNHNPAPAEVAAQGEEAGDVVAQ

SEQ ID NO: 115246 - protein, 469 aa, Oryza sativa
  unsure (1)..(469): unsure at all Xaa locations
  Clone ID: PAT_MRT4530_18861C.1.pep
MEREAGGTEPEPILGRMIAVEDYISCGFIPPPSEFLLLVLNFYGISLVHLNPNSIAFLSIFSYLCGAYIGVEPFLDLFCFYYELRWMESNREQPDKIPEWTTKPALTHSLQSFIDIVDDLQVRGLSGYEVTADFIGLNSDTVARHVGQVMISGPVTASDIPVPLCEKGPVEREAAINSEYFDXHHAYLAQASNASPPPQRRQRLVTLGEKXELQAEMERILQAGARGLGREIEEARSAASSANQRADKLARDLAEACEDLMKMRELVAGNERQRQGLKHRMSELENNLSEIRGSLRADLESALADRDRRIQYWRTKFEVAELERTMVEVEKDQAEEDLQGREVWFNSYVGSCCTAMVGVYRELRVSRGNPEESAAGYISWLNGAYTQLEGIGKRIDEALKQECRRSSRYAEGHVLACIRDHCPQLHLEFLHEAFSCSRRTPAEIDDLAKSMAPLTEKVFQSMDWRWPSW

SEQ ID NO: 115247 - protein, 121 aa, Oryza sativa
  Clone ID: PAT_MRT4530_18862C.1.pep
RNEADDAADLTGSSLECGDCDDCAGSVGCDGLMSLRRRQPELVSWLMRQHTANTRPPPPPPPCDGLITPHTYGHITQLRQLGTPIATAGNACRLPAKSPWRLRHQKPPMCNALCARMYQLH

SEQ ID NO: 115248 - protein, 40 aa, Oryza sativa
  Clone ID: PAT_MRT4530_18863C.1.pep
YKYIENRWLNRVAKSRSIAVHRDKFKDVCHNLDKLILGIY

SEQ ID NO: 115249 - protein, 115 aa, Oryza sativa
  Clone ID: PAT_MRT4530_18864C.1.pep
MGHRLVVVLLLALLVAGAARAAEQAAGEDGIRGGAGADHQEAAGITGGLSRRSFPAGFVFGTAASAYQVEGMALKDGRGPSIWDAFVKTPGEIANNATADVTVDEYHRYKMMKHE

SEQ ID NO: 115250 - protein, 617 aa, Oryza sativa
  Clone ID: PAT_MRT4530_18865C.1.pep
MSSAFGDFGPLTERRRAEKARQQRRRIMIALGTVSIIIILIVMGAAAITYSGKKSEEDEGGSKGSSKGKSKGGGGGDDEDGGGGGGKADLRAVSKSIKMMCAQTDFADSCATSIGKAANASVSSPKDIIRTAVDVIGGAVDQAFDRADLIMSNDPRVKAAVADCKELFDDAKDDLNCTLKGIDGKDGLKQGFQLRVWLSAVIANMETCIDGFPDGEFRDKVKESFNNGREFTSNALALIEKASSFLSALKGSQRRLLAGEEDNGGGAADPHLALAEDGIPEWVPDGDRRVLKGGGFKNNLTPNVIVAKDGSGKFKTINEALAAMPKTYSGRYVIYVKEGVYAEYVTITKKMASVTMYGDGSRKSIVTGSKNFADGLTTFKTATFAAQGDGFMAIGMGFQNTAGAAKHQAVALLVQSDKSVFLNCWMDGFQDTLYAHSKAQFYRNCVITGTIDFVFGDAAAVFQNCVLTLRRPMDNQQNIATAQGRADGREATGFVLQKCEFNAEPALTDAKLPPIRNYLGRPWREFSRTVIMESDIPAIIDKAGYMPWNGEFALKTLYYAEYANKGPGADTAGRVAWPGYKKVISKADATKFTVDNFLHAKPWIDPTGTPVKYDFFT

SEQ ID NO: 115251 - protein, 196 aa, Oryza sativa
  Clone ID: PAT_MRT4530_18866C.1.pep
MAGRKRKAEAARAAEEEADRALYGAFRGAANSLSQLYALAGAHQRLSFHAGERHALEKLYQWMVRQHEIGLRLTVSDIASHIQHEIEYGGDNALTSPRSQHAFQNLQAPMHIPNTSTQQPPSCSITPSNPSKDSMIFSKALSSPVRQNLQLYHVQQGGDTGCFADGIFCPGNRDSDPAASNDSSVDMHSDSPGHDS

SEQ ID NO: 115252 - protein, 51 aa, Oryza sativa
  Clone ID: PAT_MRT4530_18867C.1.pep
PHLQFLHHKPRRQEQIHHKPEQTIHRYMFYHGRQLHVQHIGHTVPMDLPPS

SEQ ID NO: 115253 - protein, 185 aa, Oryza sativa
  unsure (1)..(185): unsure at all Xaa locations
  Clone ID: PAT_MRT4530_18868C.1.pep
KCKLHKYKCDNQMRLGDKRFFTEVRKLAGFLLPVEASPTPPLNHEATARPLRQGVGKAGAGPRRGLPKPRSLGXVLPSLRRPCYSTTAXLSEGPIGLAGXTGVEWAVRPSRGRSDRHRLGLTEYGSVGFVSATPSSTIPASRGPVXPRMCRRSDRPYAPVXTAVVAPVRPPQCGRSDRPWSGRAQ

SEQ ID NO: 115254 - protein, 274 aa, Oryza sativa
  unsure (1)..(274): unsure at all Xaa locations
  Clone ID: PAT_MRT4530_18869C.1.pep
ECKLHKCKCDNQMRQGDKRFFTEVRKLAGFLFPVEASPTPPLNHEATARLLRQGVGKAGADPRRGLPKPRSLGVVLPSLRSPCYSATARKLAVVALSEGPIGLAGQTDMGWPVRPXQLGLTEYGSVGSISATPSNTIPAFRGPVXPHKCRRSDRPCAPVXTARLGPVRPARDRRSDRHKVAGLTALGQAIWLLSLASSPSPLGPPLRPASRGRRGRVARSTATSARTTVPPLVVREEDEVAQRPPRGRPRRESVVAEGVGGGRRRCGVCGIQPR

SEQ ID NO: 115255 - protein, 61 aa, Oryza sativa
  unsure (1)..(61): unsure at all Xaa locations
  Clone ID: PAT_MRT4530_1886C.1.pep
AGECGVKSTIPGNPDEFSLTSSLAELVTAMGEIPSXHAARIAEETSNRIYTGACHVLACRC

SEQ ID NO: 115256 - protein, 121 aa, Oryza sativa
  Clone ID: PAT_MRT4530_18870C.1.pep
MVDVLAVIFDVLGPAQGSLIYRGSSTVAMSSAVAIAIAIASPPHAWNGDHLGEVVKARQGRNLFFSIYVTMSRAMSSRNQDRARRVFGMEHFAPSRMRWSSSPPSRTSWNSSRRRDGARRC

SEQ ID NO: 115257 - protein, 155 aa, Oryza sativa
  unsure (1)..(155): unsure at all Xaa locations
  Clone ID: PAT_MRT4530_18871C.1.pep
PCHRHGRRRRRRLPQPPRQHIGRRCTALLLLLRRRQKCKFHKYKCDNQMRQGDERFFTEVRKLAGFLLPVEASQTLPLNHEATARPLRQGVGKMDEHKAQVGGRSDRACAASQTGLMXGQTAVVAPVRPARARRSDCQCGRSGCPCSGRTQWLHR

SEQ ID NO: 115258 - protein, 243 aa, Oryza sativa
  unsure (1)..(243): unsure at all Xaa locations
  Clone ID: PAT_MRT4530_18873C.1.pep
KLHKCKCDNQMRQXDKRFFTEVRKLAGFLLPVEASPTPPLNHEATARPLRQGVGKAGAGPRRGLPKPRSLGVVLPSLRRPCYSXLAVVALSEGPIGLASQTGMGWPVRPASARSDRHRLGLTEYGSVGSVSAILSSTISASRGPVXPRKCHRSDRPYAPVXTAFLRPVRPARARRSDRHYVAGLTAPGQAMISPIRSDGDVGGGDEVXPSMMMMKSTNRGDGETSQRWYTQPTVMTTGGNRDG

SEQ ID NO: 115259 - protein, 752 aa, Oryza sativa
  unsure (1)..(752): unsure at all Xaa locations
  Clone ID: PAT_MRT4530_18874C.1.pep
MATAWQRPRGARQRHGARGGGTGRERDGDDGDGGAAGXGARRRRAGSGRLGQRSNXSGSYFAGLQTWDDPTGPSDEYTFKELQDEFIAACKNCNLPWAYKMPMPEHLERLREQNECKMLEIPLHLYVKQKNILPAELEIMELKERSLFTERRKVYGHFNFLVKDSDGTHTLFFAEVDLNCKEEKDVYLCCPLEENDNGSLTSRKVVTLNVHIDVWKIGARQVFVFRQQLAPSVGSLAKVNAAEEKIDKKEGGSAEPAELEIMELKEYTRFREHGKVYGHYNFVVKDSDGTLTLFFAEVDINCKEEKDVFLCCPLEANDNGGSYVFPQIPSDGNPDDDAEGALATRPHRRPSTASSAATSLAVFAVAKLIDRVTSTALVDPRLALALALAICQRIQERSVTVYVTLDSSCRRKHCDFSEGDFAGLQIEDDPTPRLLSRYISDTGLYVTLMATYKSGVFPSSYEILFPEQEEEACKMVEIALHAYAKQKDMPPAKLEIMKVKERSLFEECGKVYAHFNFLVINDSDGTRTLFFAEVDFLNCKEEKDVYLCCPLEENDNGSTLERCYNIVMYTVGSLSPVSVQKRKERAISIDLDVYQVKDCIARFRDCEDEFNKLRDAFVAASKRHMRPLTLPKEMEVLKGKRDVKIAKIALHAYAKQNNIPAAELEFVELKGSSFFHEDGTTTLFFAETCPCCKEDSGIYLCCPLEENDNGKCFGCQKCGVELRHPTFADYFGGHRDICIIFSDIDDEVACYI

SEQ ID NO: 115260 - protein, 173 aa, Oryza sativa
  unsure (1)..(173): unsure at all Xaa locations
  Clone ID: PAT_MRT4530_18875C.1.pep
PIMKCKLHKCKYDNQMRXGDNRFFTEVRKLAGFLFPVEASPTPPLNHEATARPLHQGVGKAGAGSRRGLPKPRSLGVVLPSLRRPCYSTTPSFLAVVGLSLGPTALAGQTDMGWPVRPASAWSDHHQLGLIEYGSGGSGSAHRDNTIPAIWPAGQTSPHLPVRPASRRRSDRP

SEQ ID NO: 115261 - protein, 121 aa, Oryza sativa
  Clone ID: PAT_MRT4530_18876C.1.pep
PNVGRDSAADRPFHSSRCLDSILCRRRRTLILFPHTDSPSAAQSYSPEMFLMYSTLWVNYFRHKMLPWNADKDLSPLLTQPWSMDQGHPRCQKSDPAPAQNPFPYQKFCVLCSPIGMDHEL

SEQ ID NO: 115262 - protein, 436 aa, Oryza sativa
  Clone ID: PAT_MRT4530_18877C.1.pep
MAAVFCGDMIPVKLWWEILLRAPTKDVARSSCVSTQWRGIVSDPSFRKLHHDRHAVPNLNDGISDTLLVATSDVDGESVSSVFPAALVSPAVTGQAPICRVNNPYGYSLTNVCNGFLCFASWSRAKVIVCNPVTGEKLALPRAPHLGLEKRRRYSRPVTFALGFSPTTGAYKLFRFADRRMDVYTLAAAGGWRQHPFPHPYRVVQNTPTIVVGGKICMLTANPASHQHPNDVGKPGPVMVVDVASEEYRTYNPADYGCLWADMAVSGFELHGRLCLAIRSDTEIHFWKMPVEEISMRAWLDGDTHTLCYGVDNKLYSSLPLPYLQRQLAARLPLPPVPPPFATSAYLSRHRPSAVTARPSPICNVSLPPICRYRPSLTRLPRQLAALMEGTLIPGRLRGIGDHYGVLALWNPLHAPLRDVHRTAVWPLRSKRHQDR

SEQ ID NO: 115263 - protein, 172 aa, Oryza sativa
  unsure (1)..(172): unsure at all Xaa locations
  Clone ID: PAT_MRT4530_18878C.1.pep
KCKLHKCKCDNLMRQRDKRFFTEVRKLAGFLLPVEASPTPPLNHEVTARLLRQGVGKARAGPRRGLPQASITRVVLPSLRRPCYSTMASFLAVVGMSLGPTAVAGQTDMGWPVKPASARSDRHQLGLTEYGSGGSGSAHRDGTILAIXRPVRPALRRRSDRPAAALTSEGSG

SEQ ID NO: 115264 - protein, 131 aa, Oryza sativa
  unsure (1)..(131): unsure at all Xaa locations
  Clone ID: PAT_MRT4530_18879C.1.pep
KCKLLKCKCDNQMRQGDERFFTEVRKLAGFLLSVEASPTPPLNHEATARPLRQGLGKMDEHKTQVGGRSDRACAAGQTSLMXPVRPPLWRRSDRLAGLTAPGHYKTTKGPNDIEFNKTTNNTQYRSIAHTH

SEQ ID NO: 115265 - protein, 252 aa, Oryza sativa
  Clone ID: PAT_MRT4530_1887C.1.pep
LSWMPLQAHLRPCLANGIMRRQDEESTGREIIGVVADAVEPPVSTARLLPRRRCYFGHYSSQRCQVECSQPAPTEIVITPSPGDRESCHGRRRRCRPSGPHPHQLITICRRWPSPCRVDGALGIVGAATGARRQAIPDPGDCQSSRGRRQVRLIQKFLLRTTQTPLNRPCPRSRRQPGGHLVHLIGNAQTLAVPVKLLVTMSAEFTIDIYSIIFDGAATFLTLIAKPLKKIATEVVVPFVRDAHVTITRERP

SEQ ID NO: 115266 - protein, 54 aa, Oryza sativa
  Clone ID: PAT_MRT4530_18880C.1.pep
EIQPRWFVTVVQLDFLFPIYLCFCMINNTCSSSTLCFSPGHDYEIRFYCTRWRN

SEQ ID NO: 115267 - protein, 131 aa, Oryza sativa
  Clone ID: PAT_MRT4530_18881C.1.pep
MWPVRPFYSVTARKLAVVALSEGPIRLAGQIGVEWAVGPASARSDRHRLGLTEYGSVGSVSATPSSTIPASRGRSDRTCAAGQTGLMRRSHRLLVGPARPARARRSYRHYVAGLTAPGQAEPSESKCHYPP

SEQ ID NO: 115268 - protein, 183 aa, Oryza sativa
  unsure (1)..(183): unsure at all Xaa locations
  Clone ID: PAT_MRT4530_18882C.1.pep
KCKLHKCKCDNQMRQGDKRFFTKVRKLAGFLLPIEASPTPPLNHEATAHPLRQGVDKAGAGPRRGLPKPRSLGXVLPSLRRPCYSATARKLAIEVLSEGPIGLVGQTDMGWPVKXRHRLGLTEYGSVGSVSAIPSSTIPASRGPVXPRMCRRSDCPYAPVRPPSCGRSDRPGHAGQTATMWPV

SEQ ID NO: 115269 - protein, 255 aa, Oryza sativa
  Clone ID: PAT_MRT4530_18883C.1.pep
PSTQVHRSAHSSTPSTMVQPPAAVVQAQPVSEVEAGDPVLVRDFFRLLSLGSEASVPRDGVVCCYMDVSALFLYYRNMSGVLVLVPHVRPMCDAPLMVQQLQKMEMRSDWEIPNLAALKDVATASDALGRMGKMMLQARRVLKTLKNYPDGEEGLEILFYNTLLGEALTRAREAIPAVITSADLLVFDNGEVRLMALSLAHQAMSTVEACLGAVHEGKGLTGREMHRLVKKVLRPLSYLRKVKVIDLPRFNPFDV

SEQ ID NO: 115270 - protein, 222 aa, Oryza sativa
  unsure (1)..(222): unsure at all Xaa locations
  Clone ID: PAT_MRT4530_18884C.1.pep
DVTLKEPFAMRQSGAKSDGASLMATTAIFFCKLHKCKCDNQIRQXDKLFFTEVRKLAGFLLPVEASPTPPLNHEATARPLRQGVGKAGASPRRGLPKPRSLGVVLPSLRRXELQTTHKPAPGLLHNLLGEVTGQLLHKPSRRRQPPRXQAMTEYGSVGSVSAIPSSTIPASRGPVXPRMWRRSDRPYAPVXTARLGPVRPARARQSDRHYVAGLTAPGQAEP

SEQ ID NO: 115271 - protein, 76 aa, Oryza sativa
  Clone ID: PAT_MRT4530_18885C.1.pep
MALTNFVLTVAAVGAAALLFTTDIRKSGAMFRRNARQIRAWLEEESASAASRSAKDAPPKKLNGDIPKEKPKEDGH

SEQ ID NO: 115272 - protein, 254 aa, Oryza sativa
  Clone ID: PAT_MRT4530_18886C.1.pep
MSSAVDAISCSKGIAAPPTEEATKERVAVVGKNGGVEHGGDAATMNGKQCGEAPHCRKESNEEEEDDEEKAPKAIDLGPRVSIKDQLEKDKDDESLRRWKEQLLGSVDLNSVGETLEPDVKIMSLAILSPGRPDIFLPLPVEPNAKGVWFTLKEGSLYKLKFTFSVSNNIVSGLRYTNAVWKTGIKVDSHKEMLGTFSPQPEPYTYVTPEETTPSGMFARGSYSARTKFLDDDRKCYLEINYTFDIRREWPALS

SEQ ID NO: 115273 - protein, 171 aa, Oryza sativa
  unsure (1)..(171): unsure at all Xaa locations
  Clone ID: PAT_MRT4530_18887C.1.pep
DKIDVYAFGVGLLELISGKKPLCTGCPKGQESLVMWANSIIQGGKLTQLVDPNLPTEDHAQQXERMTLAASLCIRPTPQRRPHIAVVLKLLNGDNGILKWARSEVGLSYESDGDEPVVTLPENNRNIQSYINLAFDVDDDSASVSSNDFIAANTSPGRVFTRKMDRSSSFD

SEQ ID NO: 115274 - protein, 90 aa, Oryza sativa
  unsure (1)..(90): unsure at all Xaa locations
  Clone ID: PAT_MRT4530_18888C.1.pep
ACLSRSSTRVLTTKFGNISIGKENXIEVESKAEIDSRTEQESTGIQIGYDXDRLGPSRTGDKYGQKSAAKTYDILEFIRDNSRVRYGHIL

SEQ ID NO: 115275 - protein, 125 aa, Oryza sativa
  Clone ID: PAT_MRT4530_18889C.1.pep
MKNLELSDDAGEAYAILLKAQLPEKSVPPPRPTADATGGDPPSSAVRRTCGQTDPLRRREQDQAVSAAGLVGICPHPWSHGAASDCSAPALMRCPRHRAASKVEVNLIRLLEAAPRQQNQTKLVH

SEQ ID NO: 115276 - protein, 666 aa, Oryza sativa
  unsure (1)..(666): unsure at all Xaa locations
  Clone ID: PAT_MRT4530_1888C.1.pep
WHSSWLWNHGEGSMRVSGCVGFRLRDGLKSRYIPFQCXSSRSKWRNRWFYLEIKNSNPVFVVPEDQPDKIPSWTAKPPLTPSLQSFIDIIDDLRVRGLSGYEVVADFVGLSGKTVERRVGQVMISGPTTVSDIPVPLCEKGAAERDKAINALPLTDVIGPLADHQVASSLKVKVVKEVSDAATTSGGNVPTKPRKFSSASDASPPPPRRQRIVTIGEKEARTKAARAKSRGASSASPVVASTDVVPVAESREAMPSGPVSDPAVGRDLPAAVLTWEELQVEMGRLLEAGARGIDREIAEARSEAATANARADRLVCELVEAREDLTKMRELAAGNERQRKGLEDRMSELGNNLSEIRGSLRVTYTSLHQLVGECGVTSTIPVNPDEFSLTSSLAELVTAMGEIPSKHAARIAEETSNGIYTGACHVLACVRLSRLELDLREILDQGAASDTRKEVMEEVGDLGESVLPLFEEDTDHEDVQQRGQLESLAVIPVLEFEPHVSPDHVDQPLDIEGRTATTSSDLEGVLASQDRCIQYWKTKFEVAELERTMLAMKKEQTVETLRGREVWFNSYLKSCCTSMARVCRELRVVRGDPEESAAGYISWLNGACAQLDGIGKRIDEALKQECHRSSRYAGGHVLACLRXIARAWTSNIFVRVLLVLEGLRRR

SEQ ID NO: 115277 - protein, 73 aa, Oryza sativa
  unsure (1)..(73): unsure at all Xaa locations
  Clone ID: PAT_MRT4530_18890C.1.pep
FSWATTPAVRRGHGCNFQGSPIGVFMDNTRLAIAVIGKLMLAXFSHLINYFYNNCLPFNLWGGRNPSXDYGFK

SEQ ID NO: 115278 - protein, 260 aa, Oryza sativa
  Clone ID: PAT_MRT4530_18891C.1.pep
MAASVFSVGRKSPARERHGPGNVAETSGWAEWKIVTGIKQKMSNRATHWCYVCRRPVRIRGGSQDVTCPSCDDGFVQEMSEMGRRTASSTLGFVGPDAGDEFLLRRSPVMEAMSTLMRHAATVGGDEREVDVHDEHGGGDGVPAHARLGVLFRGGPRVGVERRGGYYRAGLEALFEQLQNQLGSSRQGPPPAPPSAIDAMPVVTISRRHLRAEPRCPVCQDEFQLGAEAREMPCAHLYHADCIVPWLARLALVPLAVWAD

SEQ ID NO: 115279 - protein, 693 aa, Oryza sativa
  Clone ID: PAT_MRT4530_18892C.1.pep
MAAGSHGGYRGYEVAREREHDVGVSRRSKEHYHHRHPSRHRDSERRRDGGRSGGRELSNGYSHRRDSPRPPPRRRPSEGRTEDREPGEVSGGSGSERSGERPMKTGEPRENGVTRVSKEEAKMSPSKKRKQSPVIWDRNGSKRQARDPVRGIREVDAVVAEIIMHQSHSLPVMSSLSSIGDGHSPMILDVSVDKVQEYEKNRIVDEEEEGYPTMRNILTSRWADAGDEEENVFVPKKKKSVSPVDSIERGSTKKVTSPESGEVLVYNSVRSSSRSSDSGVLQGSANRDLEVEKGDNIDVEEAADDDYPAGHLLDSDFEGEDCRSETPECTRSPRRCINMLQGCRSVDEFERLNTINEGTYGVVFRVRDKRTGEIVALKKVKMEKEREGFPLTSLREMNILLSFHHPSIVEVKEVVVGSNDRDIFMVMEYMEHDLKGVMETMKQPYSQSEVKCLMLQLLEGVKYLHDNWVLHRDLKTSNLLLNNRGELKICDFGLSRQYGSPLKPYTQLVVTLWYRAPELLLGAKDYSTAIDMWSLGCIMGELLSKGPLFNGKSEIDQLDKIFRTLGTPDENIWPGYSKLPGATVKFGKQTHNRLRDKFRAVSFTGGPMLSEAGFDLLNRLLTYDPEKRISAEDALNHEWFRELPLPRSKDFMPTFPALNEQDRRFKKHMKSPDPLEEQRMKEQGNNGDRGLFG

SEQ ID NO: 115280 - protein, 321 aa, Oryza sativa
  Clone ID: PAT_MRT4530_18893C.1.pep
MAGAVLVRRMVVVVAIAALVAPGEVAAQLTPTYYDGSCPSLQSIVRSAMAAAVQQEPRMGASILRLFFHDCFVNGCDASVLLDDSSTITGEKNAGPNANSLRGFEVIDSIKSQVEAACPGTVSCADILAVAARDGVNLLGGPTWAVQLGRRDTRTASQSAANSNLPSPSSSAAALVSAFASKGLDSRDMVALSGAHTIGAARCATFRARVYNDTNISPGFAVRRRQVCPASGGDGNLAPLDALSSVRFDNGYFRNLMGRFGLLHSDQELFNGGPVDSIAQQYAANGAAFSRDFVTAVVKMGNISPLTGSSGEVRSNCRKPN

SEQ ID NO: 115281 - protein, 42 aa, Oryza sativa
  Clone ID: PAT_MRT4530_18894C.1.pep
LTRFIFHINGYMSKAFVVNFAGLAILMFDMAVILAVILPLRY

SEQ ID NO: 115282 - protein, 247 aa, Oryza sativa
  Clone ID: PAT_MRT4530_18895C.1.pep
MMSSPTPAPLLPVAPLDGGGGYLRWKESVLLRLRTLDLAYVLSEHQPEDGRSDSAKKKRARDDELCRGHILATLSDRLLPDYAHHATAAAAWRALARTYDMDGKLPNLPLDRFFAYRFVDGEPVLEQLAHLEAMGVAGKLDDRTMYGLVHQKLPPALVKAIALASPPYPDPPSMDHIWDTARLEERMRLCGEIRRGEHTQDKEDDDDQGGGDYPDEDHRSPKRKRRYDRGPCYNCGEPGHIARDCRG

SEQ ID NO: 115283 - protein, 92 aa, Oryza sativa
  Clone ID: PAT_MRT4530_18896C.1.pep
FESCGKRKSKSFVRCNRKTKLFVRCSSADHNSQMPHQVHPAKQPASMGVGNLRRLLHKYMDSSNLTGKGRFRTSPNYKNDVVLRNMEGGQMR

SEQ ID NO: 115284 - protein, 58 aa, Oryza sativa
  Clone ID: PAT_MRT4530_18897C.1.pep
KGKPAWHFFSNLYYPDVLTWHTRRGGGLFFPLGLIYWYKLKPDTPRGGNSKGGRVVTW

SEQ ID NO: 115285 - protein, 45 aa, Oryza sativa
  Clone ID: PAT_MRT4530_18898C.1.pep
VLFKTGAPCASERLAKYNQFIRIEEELGSAAAFDGAKLRALGERF

SEQ ID NO: 115286 - protein, 362 aa, Oryza sativa
  unsure (1)..(362): unsure at all Xaa locations
  Clone ID: PAT_MRT4530_18899C.1.pep
MASKYVVLAIYSAILILHGLINSLPIRWLSWFGQLGAFWNVAGAFSLTILIPAVAKERVSPEFIFTHFNAENGAGIHDKAYILAAGLLMSQYSLIGYDTSAHIIEETKNADWSGPIGIITSVALSTMFGWIYLIALTSIMTDIPYLLNPSNDAGGYAIAQALYTSFHRRYGTGAGALACLGVIAVAIFLCGSACITSNSRMGYAFSRDGAMPLSRVWHRVDSREVPLNVVWLSVAVAFVMALTSLGSQVAFQAMVSIATLGLLIACALPVFFRVTTARRSFVRGPFHLGKYGVIVGWVGVVWVATVTVLFSLPVAYPVAKETFNYTPVAVGGVLLLXLVAWVLHARFWFQGPVTNVDTYNVP

SEQ ID NO: 115287 - protein, 95 aa, Oryza sativa
  Clone ID: PAT_MRT4530_1889C.1.pep
LHVPATKFPPRGLLSVVCRPSATSRFRHCLIGGGAPQSFPRGGPCDPAVCPPFLRVACHCLLAGMPRLAVCGSFFRPPFFRWVRPVPVSCPSVPS

SEQ ID NO: 115288 - protein, 153 aa, Oryza sativa
  Clone ID: PAT_MRT4530_188C.1.pep
MKKIRSYITVPVVGDQSASTATSFKPVKGVTPPRWLARELVRREVPAAGTVRPETRALSSWDALRPEPSQFYGRKSVRAAEPTLMKQLASSLVVRACIQAHNTSDHIVCCLCKCVFLINNIVCVMFMFMLILMNNNTTSLSRGSTEKIKNDGT

SEQ ID NO: 115289 - protein, 251 aa, Oryza sativa
  Clone ID: PAT_MRT4530_18900C.1.pep
MEPMDLYGAYGSMRTYGRFCSGIDYDYGYGHSGIYLQGNCGNGEKNNSIKNASSLSLCFPLLLPLMATVAVFFPLPVAKEAFYNTPVGRWPYVGFLRKTYQQTAVNCKTNGMTAVNCKTNGMASINRSTAMSRSVGVTMDAAGADADQARLHQLGYRQELKRGLSLVSNFAFSFSIISVLTGVTTTYGTGLRYGGPVSMTLGWLVVAAFNGCVALSMAEICSAYPTSGGLYYWSAKLAGKEWAPLASWVTG

SEQ ID NO: 115290 - protein, 55 aa, Oryza sativa
  unsure (1)..(55): unsure at all Xaa locations
  Clone ID: PAT_MRT4530_18901C.1.pep
DGWRPLCAVLRNGGFPKITTKHLGNMAFRENFVFGSCGESFFFGVPRFQTPRKXL

SEQ ID NO: 115291 - protein, 898 aa, Oryza sativa
  Clone ID: PAT_MRT4530_18902C.1.pep
MSRSGVVAMDAAGADADQARLHQLGYRQELKRGLSLVSNFAFSFSIISVLTGVTTTYGTGLRYGGPVSMTLGWLVVSAFNGCVALSMAEICSAYPTSGGLYYWSAKLAGKEWAPLASWVTGWFNIVGQLLQVIILLATGGANGGGYMASKYVVLAIYSVILILHGLINSLPIHWLSWFGQLGAFWNVAGVFALTILIPSVAKERASPEFIFTHFNTENGMGIHQKAYILAVGLLMSQYSVIGYDTSAHMIEETKNADWSGPMGIITSVGLSTMFGWIYLIALTSIMTDIPYLLNPSNDAGGYAIAQALYTSFHRRYGTGAGALACLGVIAVAIFLCGSACITSNSRMGYAFSRDGAMPLSRVWHRVDSREVPLNVVWLSVAVAFVMALTVNSKSIAAAAAVNFSSCSDLVVFSWQSLGSQVAFQAMVSVTTLGLYIAYALPVFFRVTTARKSFVPGQFHLGRYGLMVGWMAVVWVATVTVLFSLPVAYPVAKETFNYTPVAVGGVLLLSLVAWVFHARFWFQGPVTNVDAVADGWGLGRRPPRGRGGRAVDDPRAVEEHGDQEPAANGVDQAAAANGGNQAVAANGQPPRSPAAALAAEVACCSGVCTTSSPRTPSTATTRHQRHCSRHPMPLFFYRLDHWAYPDRVASTSAASTSPPASPTRSFASPTPTPTSAVCRTPGHLLHARAPSAPPAGRSPHRRLGETGGTRPAEGRLPLSSPRPLDADADVEAVPELTVVDPDGEATETAGGGRRRPSGGGGAPVPLLDLGHYAGVDEVGSGGGPRAPSGVSSARRRPHRRRGERHSRERQMWVMANDAALQKVAREGNLDVALLLQCVKPALRREGGNTQLATWTASTPLCLWRGLRWSTAATLSPPNPRRPLHNPCRRPCCRILGASA

SEQ ID NO: 115292 - protein, 52 aa, Oryza sativa
  Clone ID: PAT_MRT4530_18903C.1.pep
MERGGPCDGLCLFRIHLSMRGDCPLPCKEWGLALFSPTPEYEYVSDGGFSEE

SEQ ID NO: 115293 - protein, 499 aa, Oryza sativa
  Clone ID: PAT_MRT4530_18904C.1.pep
MVIKVPYVTAATTLFSFGLIFGFGHLRDSFRALLRLLFSSAAAADSPAGCNSKGYAPICVGKEDFYIRRFFRRVQDCFGRPIASKPDAWFDVVERYSTDSNKTLHCTTKTSKCLNLASFNYLGFAAADEYCTPRVIESLKKYSASTCSSRVDGGNTQLHIELEELVARFVRKPSAILLAMGYATNSAIIPALIGKGGLIISDSLNHNSIVSGARASGATIRVFEHNNPAHLEKLLREQISGGQPRTHRAWKKILVIVEGIYSMEGELCKLPEIISVCKKYKVYTYMDEAHSIGAVGKTGRGVCELLGVDPADVDIMMGTLSKSFGSSGGYIAASKEIIQHLKLTCPSHIYGTSMSPPAVQQVISAMKVILGEDGTDRGAKKIAQIRDNSNFFRSELQKMGFEVLGDNDSPVMPFMVYNPAKMPAFSRECLKQNVAVVPVGFPATPLLLGRIRICISASHSREDLIKGLEVISNVGDLVGIKYLPVEQEETTSVEKPKKL

SEQ ID NO: 115294 - protein, 58 aa, Oryza sativa
  Clone ID: PAT_MRT4530_18905C.1.pep
RPRRIRLDGGTPASSPSRRNPSSASSSSVLGIPWDVDTEGLREYMGKFGPLDDCVVMK

SEQ ID NO: 115295 - protein, 82 aa, Oryza sativa
  Clone ID: PAT_MRT4530_18906C.1.pep
HASEKKKKKKKKKKKKKKKKKGQNMGRNQKKGRPLSRTQLYYASLQTSIHWPWGQQKSNLVTPCLHPTYWQNPAFPYLKLLE

SEQ ID NO: 115296 - protein, 604 aa, Oryza sativa
  Clone ID: PAT_MRT4530_18907C.1.pep
MPKHYRPAGKKKEGNAAKYITRTKAVKYLQISLATFRKLCILKGVFPRDPKKKVEGNHKTYYHMKDIAFLAHDPLIEKFREIKVHRKKVKKAFAKKNKDLADRLLNRPPTYKLDRLILERYPTFVDALRDLDDCLTMVHLFAALPAVEGERVQVQRIHNCRRLSHEWQAYISRTHSLRKTFISVKGIYYQAEVQGQKITWLTPHALQQVLTDDVDFNVMLTFLEFYETLLGFINFKLYHSINVNYPPVLDPRLEALASELYALCRYMSSGRVPGNSEPAGLIEDKEGEDNKESSKTDESELRLAQLQHQLPTNEPGALMHLVQESTAADADDADAKECRSLFKNLKFYLSREVPRESLLFIIPAFGGTVSWEGEGAPFDETDEDITHQIVDRPTQSHVFLSREYVQPQWIYDCVNARIILPTEGYIVGRVPPPHLSPFVDNDAEGYIPEYAETIKRLQAAAQSQVLPLPSLGDEDMENSLVEAIIDRSESNEIADKKRKLEMLEKQYHDELRMEYEGKTFSNRTADNQPDVVDKSDTKEADDHMEDSHKQAEKDAADISKTLMSRKQRGLLQAIEINQERKKDKVNLLKKRKKNADSSASAKGR

SEQ ID NO: 115297 - protein, 434 aa, Oryza sativa
  Clone ID: PAT_MRT4530_18908C.1.pep
RRPTREFSAGPEAWNSPEFGPRVETDNSQGSAHQILSSFPNGERPRRIRLDGGTPASSPSRRNPSSASSAIMATKLVVLGIPWDVDTEGLREYMGKFGPLDDCVVMKERSSGRSRGFGYVTFSSADDAKNVLECEHVLGNRTLEVKIATPKEEMKSQGSKKATRIFVARIPQSVDESMFRRHFEAYGEITDLYMPNEHGSKGHRGIGFITFQSAESVDSIMQDSHELDGTTVVVDRATPKDEEVRYPPSRGASQGGYGAYNAYISAATRYAALGAPTLYDHPGSAYGRGGYYGSSQGMGNKKIFVGRLPQEANTEDLRHYFGKFGRIVDAYIPKDPKRSGHRGFGFVTFADEGVADRVARRSHEILGHEVAIDTAAPLEGDSGGGYMEPMDLYGAYGSMRTYGRFCSGIDYDYGYGHSGSSSSRSRADWRYRPY

SEQ ID NO: 115298 - protein, 188 aa, Oryza sativa
  Clone ID: PAT_MRT4530_18909C.1.pep
VPPPHLSPFVDNDAEGYIPEYAETIKRLQAAAQSQVLPLPSLRDEDMENSLVGAIIDRSESNEIADKKRKHSLLSHFAFFSSKVGDAREAVHDELRMEYEGKTFSNRTADNQPDVVDKSDTKEADDHMEDSHKQAEKDAADISKTLMSRKQRGLLQAIEINQERKKDKVNLLKKRKKNADSSASAKGR

SEQ ID NO: 115299 - protein, 253 aa, Oryza sativa
  unsure (1)..(253): unsure at all Xaa locations
  Clone ID: PAT_MRT4530_1890C.1.pep
MEREAGGTNPQPILGRMVAIEDYVLCGFLPPPSKFLLLVLNFYGLSLLHLNPNSIAFLSIFVHLCEAYIGVEPFLDLFRFYYELRWMESNRVSGCVGFRLRDGLKSRYIPFQCPSSHSKWRNRWFYLEIKDSNPDFVVPEDQPNKIPSWTAKPPLTPSLQSFIDIIDNLXIRGLSGYEVVADFVGRRIQPLQARAHPAYNYSGPEDVTRVSPRGLSGETVERRVGQVMISGPTTASDIPMSLCEKGAAERDEA

SEQ ID NO: 115300 - protein, 954 aa, Oryza sativa
  Clone ID: PAT_MRT4530_18910C.1.pep
MSRSGVVAMDAAGADADQARLHQLGYRQELKRGLSLVSNFAFSFSIISVLTGVTTTYGTGLRYGGPVSMTLGWLVVSAFNGCVALSMAEICSAYPTSGGLYYWSAKLAGKEWAPLASWVTGWFNIVGQLLQVIILLATGGANGGGYMASKYVVLAIYSVILILHGLINSLPIHWLSWFGQLGAFWNVAGVFALTILIPSVAKERASPEFIFTHFNTENGMGIHQKAYILAVGLLMSQYSVIGYDTSAHMIEETKNADWSGPMGIITSVGLSTMFGWIYLIALTSIMTDIPYLLNPSNDAGGYAIAQALYTSFHRRYGTGAGALACLGVIAVAIFLCGSACITSNSRMGYAFSRDGAMPLSRVWHRVDSREVPLNVVWLSVAVAFVMALTVNSKSIAAAAAVNFSSCSDLVVFSWQSLGSQVAFQAMVSVTTLGLYIAYALPVFFRVTTARKSFVPGQFHLGRYGLMVGWMAVVWVATVTVLFSLPVAYPVAKETFNYTPVAVGGVLLLSLVAWVFHARFWFQGPAESPAAAFSTARSREGAVDDPRAVEEHGDQEPAANGVDQAAAANGGNQAVAANGQPPRSPAAALRRLHDLIATDAFHRDHQAPAPLLPPPHAALLLPSRPLGLPRPRRVHLRGVDIAARESHPVIRFAHADANLRRLPHARSSAARPRPVCSAGRPLPAPSPGPPAGPCCGCICRSRSARRPPTPPAARCSSPRRPPAAPPVARRRPLRPQLLPSPAAAITAAASPASPSNWREGETGGTRPAEGRLPLSSPRPLDADADVEAVPELTVVDPDGEATETAGGGRRRPSGGGGAPVPLLDLGHYAGVDEVGSGGGPRAPSGVSSARRRPHRRRGERHSRERQMWVMANDAALQKVAREGNLDVALLLQCVKPALRREGGNTQLATWTASTPLCLWRGLRWSTAATLSPPNPRRPLHNPCRRPCCRILGASA

SEQ ID NO: 115301 - protein, 412 aa, Oryza sativa
  Clone ID: PAT_MRT4530_18911C.1.pep
MGSAHSSHSSVSTAADMDEDDDDEPSAASAAAPAPPAPAPAPPASASKVLEQEPEELPCRAADSPLSPQPSAAGTPRLLAAGPTIKVWDPCHVLLPPPSPHQSQSARAGAGAEAAAALEVVVVSHGECAAAMRPDLVGGRWPAAALTARGERQARALAVFLRSRGARLAAAYASPLDRARATAALVCRELDFPEEQIQVSDALTEMSQGQWEGCPKSEVYTPEMVNLMDSTQPDFSAPAGESLRQVQFRMMEFLNQTVVRLPEKVAMGDSLSQQNEAKGLSRQSSTNSVQDGPPWDLLYRLNRHSLQRKKSGKSRLQFVTSGDNETEDDFSPKEINQRHILHEANLAPSVTSIAIFSHATPIRCLVAGVLDCNPMISQRICIEDSSITVLEHSLKTGWQIKRLNDTAHLRLL

SEQ ID NO: 115302 - protein, 112 aa, Oryza sativa
  Clone ID: PAT_MRT4530_18912C.1.pep
MRPVRPCNSATARKLAVVALSEGPIGLVGQTDMGWPVRPASARSDRLRLRQLCIGHPEQHHLGLQEAGLTGKVPPVRPPLSSRSDRTGHAGQTATMWPVITPLNSTAKLKLN

SEQ ID NO: 115303 - protein, 129 aa, Oryza sativa
  Clone ID: PAT_MRT4530_18913C.1.pep
MSSPDAIRGGVKPRVGLSIVQLLGCGCDIQWTIHIASRPFRFDPTTVVLLDTRPFSFDRMDAILLDDMDQQQSRKLVITTLSGDHLYRPFSFDRMDAILLDDVDQPQCRKLYTTLVSNFELKLKSRLKP

SEQ ID NO: 115304 - protein, 80 aa, Oryza sativa
  Clone ID: PAT_MRT4530_18914C.1.pep
KLHKCKCDNQMREGDKRFFTEVRKLAGFLLPVEASPTPPLNHEATARSLRQGVGKAGAGPRRGLPKPRSLGVVLPSLRRW

SEQ ID NO: 115305 - protein, 134 aa, Oryza sativa
  Clone ID: PAT_MRT4530_18915C.1.pep
REFGRGYRVARRACVSCDCRVHELVASKPSISIFSELARSRWQRAAAALPLGSLSGRSDGHAGCRMGRFVVLTGTRNGGQIRRANGRDTRGPTFATFTRDQTLVQAFYFIYPLDFKRPVHFSKGNLKKQPINHL

SEQ ID NO: 115306 - protein, 215 aa, Oryza sativa
  unsure (1)..(215): unsure at all Xaa locations
  Clone ID: PAT_MRT4530_18916C.1.pep
MRPRRLPRPPSMSTSVQFVSIVKCKLHKCKCDNQIRQGDKRFFTEVRKLAGFLLPVETSPTPPLNHEATARPLRQGVGKAGAGPRRGLPKPRSLGVVLPSLRRPCYSATARKLAVVALSKGPIGLAGQTDMGXPVRPASARSDRHRLGLTEYGSVGSVSAIPSSTIPASRGPVXPRMCRRSDQPYASVRPPSCGRSDRPGHAGQTXHYPVNLSGR

SEQ ID NO: 115307 - protein, 242 aa, Oryza sativa
  unsure (1)..(242): unsure at all Xaa locations
  Clone ID: PAT_MRT4530_18917C.1.pep
MRHAARTLGRPAPLTSYPLRPTYLGLNRLMRQAHYSRRCHHSSHIISALAENRRSEETRRGTSLALFLMGGGGGGLFFGSGGHFVGNGGHFLGSGDIFLGGGGGGCGGLFLCSNGLVSEAMEEQTSSEPLDPLSHEEFLHMSNFGLYGILEKERKYLWNIGKDILKNNFDSLTSGANKKAEEEDWPMGQAHEPEERGVADWALWTGSNATWLPXEPEGGDGAGGKRRRIGSLPPVRIRAPGL

SEQ ID NO: 115308 - protein, 495 aa, Oryza sativa
  unsure (1)..(495): unsure at all Xaa locations
  Clone ID: PAT_MRT4530_18918C.1.pep
GLGGARRTRAARGGRGXAAGPRVASRLTVDHAHGEGGTEGAADRVSRSGHAEVAPTWRLRGCHAGRREVEEGAGRNGRRTVAANGGANHDDTGESEHTGWLHEMRGDEPTARIRRRGLDGGGLRRRQPAAREGGNSDGATGDRFGRARASMRLRESVPCAGLEGNALREAGDERXLPSSGGDGGEHTASGGXRKKTSSRSPLPRPQTRRLLRHAWQRKAAANRAREAATMEWRRWDKREEKGGRAPGLYRMAMSVWEPTXGGQRRGLALGGRGQNGDRGGXMTPAGEKREKGGEKGGLPXCHFGEKEEGERATRQREEELCLHPLEASARSGXGRVVTTAMTAXGRCGAERRHGRQARTGAAXLTAAVTGRSATXRARAGSNGRRGDLGVVGGKRXRGRRALGSARLTRTRARRTGRAGEKGRGRERERDGEGGRDGLRGIRPIEPEGGKIDFHKENSGCRGNVVPCPDSLGSDSTGKPRGGVTEAAWISALSKV

SEQ ID NO: 115309 - protein, 74 aa, Oryza sativa
  Clone ID: PAT_MRT4530_18919C.1.pep
FFFFFFYENLEASAFYFSEIIYVSQYITPCTFTRSIEEGGGGVMYRFTKLQGSGELAQKDQFTGLWPSPLPRLR

SEQ ID NO: 115310 - protein, 327 aa, Oryza sativa
  Clone ID: PAT_MRT4530_1891C.1.pep
MDLGKSASTNATLKKLQEDGALPGRGTMEREAGGTNPQPILGRMVAIEDYVLCGFLPPPSEFLLLVLNFYGLSLLHLNPNSIAFLSIFVHLCEAYIGVEHFLDLFRFYYELRWMESNRVSGCVGFRLRDGLKSHYIPFQCPSSRSKWRNRWFYLEIKDSNPVFVVPEDQPDKIPSWTAKPPLTPSLQSFIDIIDDLRVRGLSGYEVVADFVGRRIHLLQARAHPAYNYSEPEDVTRVSPRGLSGETVERRVGQVMTNGPTTASDIPVPLCEKGAAEHDEAINVASSLKVKVVKEVSDAATTSGGSVPTKPRKFSSVLGVGERVSCAL

SEQ ID NO: 115311 - protein, 109 aa, Oryza sativa
  unsure (1)..(109): unsure at all Xaa locations
  Clone ID: PAT_MRT4530_18920C.1.pep
RELRVGPFSLSVFRLTWRTAFVCATTVVSMLLPFFGDVVGLLGAVSFWPLTVYFPVEMYIAQRGVRRGSARWLCLKVLSAACLVVSVAAAAXXIADVVDALKVYRPFSG

SEQ ID NO: 115312 - protein, 119 aa, Oryza sativa
  Clone ID: PAT_MRT4530_18921C.1.pep
MGEAWRRWRRPLAALAGSRAMEIHRRPLRRTMQESPPPPPPRCDGGREDHGPRGHARQPLESVIEVSHIDAVLQRAAEEDLLSGGDGADDDVLSAALWFPAHRSDLAIEGRLVAGALMA

SEQ ID NO: 115313 - protein, 95 aa, Oryza sativa
  Clone ID: PAT_MRT4530_18922C.1.pep
MAVEEEGSPANGHRSSAKGTYAVGDRLDDGARSNDGCMRRRGFNDGGHCGISGGAEEIDEAGVVSDSLRERSEEINEVGNTATFAGNIGDLKFPN

SEQ ID NO: 115314 - protein, 74 aa, Oryza sativa
  unsure (1)..(74): unsure at all Xaa locations
  Clone ID: PAT_MRT4530_18923C.1.pep
LNIYPVFNYTYLTKSDIKLNNAIIAEEKHXTMYDEMANKGNAEYIAGGATQNSIRVAQWMPXTPGATSYMGCIG

SEQ ID NO: 115315 - protein, 268 aa, Oryza sativa
  Clone ID: PAT_MRT4530_18924C.1.pep
MEFPHRHHHHGHRGDDDDDDRRRHPAPAPAYGHDSAPPPGPYGQAPPPADPYARHPPSHDYAHPPPAYGGGGYGNVVHVSHEVSDHQRPTPHYGGSEYISPVQETRPYHGGGGAPPVTHRIYCKAGEDNYSLAVRDGKVCLVRSDRDDHTQHWVKDMKYSTRVKDEEGYPAMALVNKATGDALKHSIGQSHPVRLVRYNPEYMDESVLWTESRDVGSGFRCIRMVNNIYLNFDALHGDKDHGGVRDGTTLVLWEWCEGDNQRWKIVPW

SEQ ID NO: 115316 - protein, 47 aa, Oryza sativa
  Clone ID: PAT_MRT4530_18925C.1.pep
LLARKHGGQLVLYYPDNGSNRLNYPCTRTGLIATNTYTHKNTSFPAG

SEQ ID NO: 115317 - protein, 76 aa, Oryza sativa
  Clone ID: PAT_MRT4530_18926C.1.pep
MELYAVVKPCRLYKKRSSSGGGGKVAMCVRSGGDGGAGKSRPSFTCRCVRLVKEQRARFYIMRRCVTMLVCWHEYQ

SEQ ID NO: 115318 - protein, 153 aa, Oryza sativa
  Clone ID: PAT_MRT4530_18927C.1.pep
GSRQACSRISSDLNIASADSRTSRASCSTPKERAAASVSRARSTAAPHRVCQQPRERPALRRRHRRLYSPLYRNCSTSTSTSYRTRRGNPLAPSAAAPTFFPSAEDDDDDSATTSSSSSALAPPTSVACPPQHHPLRWRGGATVFGGSQADSA

SEQ ID NO: 115319 - protein, 258 aa, Oryza sativa
  Clone ID: PAT_MRT4530_18928C.1.pep
MADNDKEAAGEGATPRGADWEVVTLTASAYAAAPGPGGAGDRPAAETKGLDASQEGDQTKGLDGSQEGRGSESALFMSGHFVFPPSEHENLPIDAGFDDIQHKKDAQEASTSVEDEGFKNVGGNYGAGLERIQFYDEGRNLSANDVEMMMGDAAEHGSFHAQDEEQGLDDDNDFDDSHDKSDLPSESADSKSRDSGAPCKCWLKKHMSCLYHQAKETNALWSVVVAAALVGLVILGRWHKDKLHLKNLKWRSGSTVRG

SEQ ID NO: 115320 - protein, 224 aa, Oryza sativa
  Clone ID: PAT_MRT4530_18929C.1.pep
TARPAQLADAEIRKLCAAAKDVFLSQPNLLELEAPIKICGDIHGQYSDLLRLFEYGGFPPEANYLFLGDYVDRGKQSIETICLLLAYKIKYPENFFLLRGNHECASINRIYGFFDECKRRFNVRIWKVFTDCFNCLPVAALIDDKILCMHGGLSPDLKNMDQIRNIARPVDVPDHGLLCDLLWSDPDKEIEGWGENDRGVSYTFGADKVAEFLQTHDLELICRA

SEQ ID NO: 115321 - protein, 98 aa, Oryza sativa
  Clone ID: PAT_MRT4530_1892C.1.pep
WGKWGKGAWESDIKAERGHRPTVALPSQAGTPSPSPALVAPGASMSTTCCPPRQRRNPTLAEAQSLLQLIQQSSSRRASFALLHAAALPPRRHPRSIP

SEQ ID NO: 115322 - protein, 339 aa, Oryza sativa
  Clone ID: PAT_MRT4530_18930C.1.pep
MDAAALDDLIRRLLDARGGRTARPAQLADAEIRKLCAAAKDVFLSQPNLLELEAPIKICECDCIMLTIILPTYSLTGDIHGQYSDLLRLFEYGGFPPEANYLFLGDYVDRGKQSIETICLLLAYKIKYPENFFLLRGNHECASINRIYGFFDECKRRFNVRIWKVFTDCFNCLPVAALIDDKILCMHGGLSPDLKNMDQIRNIARPVDVPDHGLLCDLLWSDPDKEIEGWGENDRGVSYTFGADKVAEFLQTHDLDLICRAHQVVEDGYEFFAKRQLVTIFSAPNYCGEFDNAGAMMSIDDSLTCSFQILKPSDKKGKAGTGNMSKPGTPPRKIKINII

SEQ ID NO: 115323 - protein, 47 aa, Oryza sativa
  Clone ID: PAT_MRT4530_18931C.1.pep
GDKKQVKLKVRGASETEVKNVLRQEFKGLITILFFLLPKRNEQNSKV

SEQ ID NO: 115324 - protein, 83 aa, Oryza sativa
  unsure (1)..(83): unsure at all Xaa locations
  Clone ID: PAT_MRT4530_18932C.1.pep
ILXGXXXXEXXGXPEWSXXLWSEGXXRXXSCXYVIXGQIFKLWXDLFXNISSSCCGSXDQAGLLDNILLRRSQEIQVDSTGDC

SEQ ID NO: 115325 - protein, 73 aa, Oryza sativa
  Clone ID: PAT_MRT4530_18933C.1.pep
SPTQNIQRKPDTCHSPPLAANHQPKYSNERPTCVSVSIRTSNQQCIICLMSPLSYPMMHLLFSNHTVKNEDIT

SEQ ID NO: 115326 - protein, 176 aa, Oryza sativa
  Clone ID: PAT_MRT4530_18934C.1.pep
MASSPDKGKEPAVDPPSADPSSGSVSAENKKGNSSRGKGKKAAAAAPVAADSSSTAAAAAGAGDEVNRTATVRMSQPQIDLFMSFDPPPLEPVTGVSKEEEDRFAKIDAQLAKWEKEIRADAEMVKSQYEQKGYVEYEIDADLFPARAPPRPGRRRARHGVMAKKKPQGGGGATAK

SEQ ID NO: 115327 - protein, 67 aa, Oryza sativa
  Clone ID: PAT_MRT4530_18935C.1.pep
KRAFVHWYVGEGMKEGELSEAREDLTALEKIYQKVGSEFDDGAKVDHAKGVDRVTQLFGGHVTQESR

SEQ ID NO: 115328 - protein, 81 aa, Oryza sativa
  Clone ID: PAT_MRT4530_18936C.1.pep
LILIHPFCPTRDAPKKPPRRSKNSLPPTQTPDPAKDRSLGPRADAFTRADLAAFDRRRAKAGAPRREDTSREIETAAREER

SEQ ID NO: 115329 - protein, 75 aa, Oryza sativa
  Clone ID: PAT_MRT4530_18937C.1.pep
KSYNMRSYTCAGNEDSMSLMVQQWAAGLVLDRSIAYLGGIVLASVTLFFDDERMLWAIMAPCRAWHISSPKIHIL

SEQ ID NO: 115330 - protein, 61 aa, Oryza sativa
  Clone ID: PAT_MRT4530_18938C.1.pep
LKLEDIKRIRENFEVYKEFLSTNYCYRLLEMGRSPNQPAARAVVVALVPGPNLPALYPIIF

SEQ ID NO: 115331 - protein, 57 aa, Oryza sativa
  unsure (1)..(57): unsure at all Xaa locations
  Clone ID: PAT_MRT4530_18939C.1.pep
KGLYIAITGKKKPSTDYLPAKLKGEANHLIAAPWQTPESNNXGAGVSPCCSPIDALP

SEQ ID NO: 115332 - protein, 87 aa, Oryza sativa
  Clone ID: PAT_MRT4530_1893C.1.pep
MPTTFIHAAAHHHITVTRHAVILHSSSSPHIPHPGKCPLFPQPVALIAHHAPPHSTPQHFIQGGTHTHISFPASSSHHAPPNAIHAL

SEQ ID NO: 115333 - protein, 357 aa, Oryza sativa
  Clone ID: PAT_MRT4530_18940C.1.pep
TRPRPIRHQGYPKQLPFYSDFDQGHGYQVSIEGVKVYGAPWDNISCQSFQPMLKYAGDRGLQTVINFEDEPYSGGNCVTVKGSLQQNEIFSEQLFNGGLSMEGESVYVFYSVKADERSGLGLSLDLSSGNNESSSILIADDTAAFTRKKQHRKYGSYVKADKAEPHTPVHQNWVVYKATILPSAGFTLTGINIVCTMKTTSGTDPETDGDGSSEAGANRSLHYHASLGHVSIRNTEETEFPPARSWVTEGDYISWSNGSDESKLASLKISWELENKQQAPFMKYNVYVEKLTADSNAKAPRIFLGVASVQVFYVSDLEVPSEVTALKFFIQPCGRDGSCQGLHECPKFHLVPVDSAM

SEQ ID NO: 115334 - protein, 70 aa, Oryza sativa
  Clone ID: PAT_MRT4530_18941C.1.pep
IFGNFYRKNIFPREPPFPIFTPTFKNPPIRKTGSPPGSGPEFPGGPPGPQRSPLNFKKSFFKTGIYFFLS

SEQ ID NO: 115335 - protein, 146 aa, Oryza sativa
  Clone ID: PAT_MRT4530_18942C.1.pep
YYTSPTGRKLRSLVEIDRYLLENPDYVAQGVTLTQFSFQIPRPLRQDYVKKRPKIVNPNDEASVVTTKSVKPEEVSPIAWAAPSVHQEGEAGERASHADEPPEAEELELTRKRKAESPLFEEAHSNHVSDEPKTKLEDTQNGGPSA

SEQ ID NO: 115336 - protein, 54 aa, Oryza sativa
  Clone ID: PAT_MRT4530_18943C.1.pep
MEIVAPVEVSMLLAAGAVDTGSLNSPPASVGNFFDKLTRVGLALYRSFSTSNSR

SEQ ID NO: 115337 - protein, 308 aa, Oryza sativa
  Clone ID: PAT_MRT4530_18944C.1.pep
MATITAKSGVIAVSMVLVMCAASAAAGDNDMLPAAFDILQQPAKEAANLGHGCYTRCFAGCFAAGFDGDYCSDFCSKECGDDVRKFLSRLSPENSAIVGDICNIPRCISSCVEAKIDPPYCKIWCEDMCGDDVRKNQIGLSPLLAIGSGTSIFSLGGGAYVVLAELLMTNVHKWRHQDLKLAIWILSLDSGGEWRKGPECRVGDIWASEKYVVMGVPRISPPPVCPVLRTVNDNVVCVIVNDADETVYGSVDVIAQHFLAIDVERKDRGGCSAVRRYQASRLHPDGGVEPVRLYPNHMACEFSEYMEH

SEQ ID NO: 115338 - protein, 70 aa, Oryza sativa
  Clone ID: PAT_MRT4530_18945C.1.pep
MYTHTPARVGTTTATTTHFANRIHTPSHTSSRPLSAVSSYCGEEINTTERKPMERGKKQSRVEYLMGPYY

SEQ ID NO: 115339 - protein, 527 aa, Oryza sativa
  Clone ID: PAT_MRT4530_18946C.1.pep
MLQRNMVWTHQVASPENQVQPENFYHGGAGSNLSNLSVQVAVGVPGNTDFRSHYESINLQHQHVQNPYPHVGVASSSVFPSTMYNPCISTTAVDRYVPPIQSFGLGNPLLLPLYHQLAQGSMDENGSSGNFCDSVREFIKRKNALLVGGHHFVNSFASSSSSAYVPPNPLHRSWNASFEANILPSTGVSNPPEYSSADSLNNSNSMASHPELVHHGNYVFPAGHMSQYNAWIAQASRTGGVPQWEHGNAAANPPGGFVHSGTIDMPNGGLQGYQAGPFANYYGPLPHFHQNPLNSMQHPALFNHIQMQVPHQHCLSNNLLHHPSGNGLPLDPRILAISSNSGHTFGPTAQPSLANQVNAGSSRIQPYEFLFFKLDNTKFKGYQNLVEKYHLILFLNAPFVDLSRLYEAGVIDEHRDMRLDVDSMTYEELVALEERIGNVNSGFTESYIEENLKSSSYVPDADCMPDQSSVEKDACIICQEEYEAKELVGTLGCGHKYHAMCIKGWLMVKNLCPICKTTALPADRRNG

SEQ ID NO: 115340 - protein, 37 aa, Oryza sativa
  Clone ID: PAT_MRT4530_18947C.1.pep
FWPRFRERPKGTFGPDSSACLPHRRRPRQCPARRVST

SEQ ID NO: 115341 - protein, 882 aa, Oryza sativa
  Clone ID: PAT_MRT4530_18948C.1.pep
MAFVSVVHMICVNGRRALATVLCGPPSCALPAVMVVEIRDPRVKLVYGMCPWTSVLATGTGMWGLANVSVVRREFSRAACAPAMYDGTWHANVELDRGSSSCSHKDHVEALKGSLLPAQGRRPQFAQLYIYDPENEIQNRINIFENDGSNSDKADPAIVDALCTMLDSHNILVQKFRYARERLNENGNQRLTLRLMGCNAKSDVQYNLPTSGELAAIIVGDYSAAEYSYDILVQEKDDGLQHVSSLHPWYMALQYLLLFPYGERVFHLGIAYNDYDGIGRKATSRSGLRILIENDDGSCGLETKNVVYHEILDATLAALPLWYSFVLIVITMGDTSIDKLFEGDDNSRLLARVSRLWEFTDCKDATKIYHIDLVLVDEKGGSIHAQIFPLLLQVFKPLLTEGKVYYLDSYRVKTSNKSYRPVANPLMMTFTKWTSVEQCLDVPFNFPTVVYSLTPLNEVSNFVDKNESFVDVIGVITEISTPTMLRPKSRDASSLKRTVQICYANNSTLNVSLWAEQALAFDAESIHKAGQSEPQIVLFVGTLAKNYPGIGLALSRGSVCKWYININVPKMVDLKNRIGANFQPIKLLQAPTTNIADENADDKTVRERLDMNPHKNRRTRFQANVTIRKICNDSSWCEIIMYRYKLSVLAGDDTADAVFILFGKIAQRIVRKPVELLVEQTTRESKFIPDAIIALLERSFTWNVSFTENTLRTGDVSFQVKSVISMSVLGEPLMLMSPGPADSPGSSAIMSPGPSTSIMSPTRTSEIAISSPPSATIASLVTKRAAPQTPTSRLSLATTEQASHVDPLSPPMTQVVASESTEMKQKAIIISDDITLPLAASIPNSSTKKRTRPLQASPTAKKLFTDDGAHEKEATDSLSDTA

SEQ ID NO: 115342 - protein, 1969 aa, Oryza sativa
  Clone ID: PAT_MRT4530_18949C.1.pep
MAFVSMVHMICVNGRRALTTVLCGPPSCALPAVMVVEIRDPRVKLVYGMCPWTSVLATGTGMWGLANVSVVRREFSRAACAPAMYDGTWHGHGVAAMFAVGVSHVSLLNAAAQHCMIPSIAYLWEFSSDANVELDRGSSSRSHKDHVEALKGSLLPAQGRRPQFAQLYIYDPENEIQNRINIFENDGSNSDKADPAIVDALCTMLDSHNTLVQKFRYARECLNEHGNQHLTLRLMGCNAKSDVQYNLPTSGELAAIIVGDYSVAEYSYDILVQEKDDGLRRVSSLHPWYMALQYPLLFPYGERGFHLGIAYNDYDGIGRKYVTMLEFFRCMIHYRLNEPNPFTCYGRLSDQAVVDAYSSIESSRLKFIADNQADIRSECVQGIVDAIDRGITSGDSVGKRVILPASFTGGRRYMVMNYQDAMAICRVYGSPDLFVTFTCNSKCQEIAESIRFEDGQQPSDRVDMIVRVFNMKVHDFITDIREGRTFGSVLAVLYTVEFQKRGLPHIHCLVWLAASSAQVSASIIDGFISAEIPDFETDELCYELAHINVEWCNKSNMIKYLFKYVMKGHDRSKIYFETTAQTGNISPNHDLAPPDEILEYMDARFLSTCEALHRIYEFDIHYRVPPVERLAVHLPGMNYVRYEKGSDLRALINSPAAKRTMLTEWFEANAKYEEARTLTYCDFPKQWTWDSSSRCWRPRTPAPKIGRMYYVHPTVGELYYLRMLLMIVKGAQSYPDIRTYNGVIYETYREACEARGILEGDNEWHLLFDEAIQSASSYQLRQLFVTVVLYCSVGDVRALFDKYWLYMIDDIHRRLKKALDNPHCIVSHEHLLTLLLHELTNVFGKSGGNIKDYNLPQPTFSLQVAFGNRLIEEELATDPLMMSMHADSLIAQLNADQKTIFDRIVGSVVANQPGFFFVCGHGGIGKTFMWNAIIAKIRSSNKIVLAVASSGVASLLLPKGRTAHSRFKIPIDINETSLCNVKRGTMLAELLENTSLIIWDEAPMTHRRCFEALDRTLRDILSEITPSNAIIPFGGKTVVLGGDFRQILPAVPEGSRSAIVDALITNSKLWKHVVMLRLNVNMRLLNPSLPSMQREELSDFSKWVLAVGDGSLPATKRDDGDKIATVVSEVYHDFLACYKNPEYLASRAIVCPSNSVVDEINNYVVSLIPGDEKEYLSCDTISKCSEQIPDFDLLYPTELLNSIDTNNFPTHRLVLKEGVTVMLLQNLNQSMCLCNGTRLLVVGLGQRILHCVILTGSNIGETVCIPKISLSTAKLKWPFTLQRRQFPIRVCYSMTINKSQGQTLQRVGVYLKKPVFTHGQLYVAFSRATSRSGLRILIENDDGSCGSETKNVVYHEILDATLEALPLWYSFALIVITMGDTSIDKLFEGDDNSRLLARVSRLWEFTDCKDATKIYHIDLVLVDEKGGSIHAQIFPPLLQVFKPLLTEGKVYYLDSYRVKTSNKSYRPVANPLMMTFTKWTSVEQCLDVPFNFPTVVYTLTPLNEVSNFVDKNESFVDVIGFITEISTPTMLRPKSRDASSLKRIIQICDANNSTLNVSLWAEQALAFDAESIHKAGQSEPQIVLFVGTLAKNYPGIGLALSRGSACKWYININVPEMVDLKNRIGANFQPIKLLQAPTTNIADENADDKTAPATNIADENADDKTVRELLDMNPHKNRRTRFQANVTIRKICNDSSWWYNSCEKCLRVVKPFGYTYKCTGCYNIAMAVPRYKLSVLAGDDTADAVFILFGKIAQRIVRKPVELLVEQTPRESKFILDAITALLEISFTWNVSFTENTLRTGDVSFQVNSVISMSVLGEPLMLMSPGPADSPGSSAIMSPGPSTSIMSPTRTSEIAISSPPLATIASPVTRRAAPQTPTSILSLATTEQASHVDPLSPPMTQAVASESTEMKQKAIIISDDITLPLAASIPNSSTKKRTRPLQASPTAKKLFTDDGAQEKEVTDSLSDTA

SEQ ID NO: 115343 - protein, 90 aa, Oryza sativa
  Clone ID: PAT_MRT4530_1894C.1.pep
GVAFTAVIQLGSIGAVFWYFWEDLTGIAKGIIKAVQTRQYDSLEFKLGLGIGLGTIPIVFFGLLMKLLVQDLDNSFFRSLSTIAIPGYRA

SEQ ID NO: 115344 - protein, 93 aa, Oryza sativa
  unsure (1)..(93): unsure at all Xaa locations
  Clone ID: PAT_MRT4530_18950C.1.pep
DGCGRGIVRSALQPSLGCNPGRPXAKTWIQRRQDWFSRTTSFGRTWGWSNPAQFRLVASSIAPLHRLVNFGPIHRVSSEFLAHLFISLILDIV

SEQ ID NO: 115345 - protein, 211 aa, Oryza sativa
  Clone ID: PAT_MRT4530_18951C.1.pep
MEKVFSGYALFFVLFLTGSTIGGCFPTVEEVDPESYNDSQTHFTTSWFVEESKKGCLDMRCPGFQRTGGSHPFVPGQVINPVSSTSRRKQYITVRVSKDQNSGDWEIYFGFDGKAKIIGYYPRSLFTSLSNKPVNIVFGGFAFWKEHKPSPPMGSGIAPPKNAASFSNLKFFDAAGNAHPIDHDLAHVSDCYPVTDVRDGVFSYGGPGNVC

SEQ ID NO: 115346 - protein, 68 aa, Oryza sativa
  Clone ID: PAT_MRT4530_18952C.1.pep
IILSGAMFYILNSFLKTKNNVFQTSHISSSKLKPMFLHPGCHSPKTKIQYIFLRKPVEFKYNKFFTIT

SEQ ID NO: 115347 - protein, 270 aa, Oryza sativa
  Clone ID: PAT_MRT4530_18953C.1.pep
MEKVFSGYALFFVLFLTGSTIGGCFPTVEELAVHGWIPPDDGATEYYGLEATMDVYGFNLEHGQQTGGFIWIYNSDETPAANVIHAGWNVDPESYNDSQTHFTTSWFVEESKKGCLDMRCPGFQRTGGSHPFVPGQVINPVSSNSSRKQYITVRVSKDQNSGDWEIYFGFDGKAKVIGYYPRSLFTSLSNKPVNIVFGGFALWKEHKPSPPMGSGIAPPKNAASFSNLKFFDAAGNAHPIDHDLAHVSDCYPVTDVRDGMFSYGGPGNVC

SEQ ID NO: 115348 - protein, 68 aa, Oryza sativa
  Clone ID: PAT_MRT4530_18954C.1.pep
MYSYGNLVLNAVLNFPLPLGQTILPTPESMLLNLSANFMQGFDFHAGHMPVGPGAVTYPQRPGATVCD

SEQ ID NO: 115349 - protein, 85 aa, Oryza sativa
  Clone ID: PAT_MRT4530_18955C.1.pep
MASPSTSSWVAEAEMVAGVLLLLGATVTSTQVARLLDEELPTGDMPAIPGVPGVPAVGPGIPVIPGVPGVPVVGPGIPIVSVIPR

SEQ ID NO: 115350 - protein, 44 aa, Oryza sativa
  Clone ID: PAT_MRT4530_18956C.1.pep
FYLLSLFLDTISNHESYLPTKVSFNILNYFFAILHKKNGTRVIR

SEQ ID NO: 115351 - protein, 77 aa, Oryza sativa
  Clone ID: PAT_MRT4530_18957C.1.pep
AAIRHPRPGGVAGGRQILRQKSSLKLKPEELKGTGCSVVGWGAVQHCTAASRSAAFSGSGFIFLIFLWNTTIIASRA

SEQ ID NO: 115352 - protein, 123 aa, Oryza sativa
  Clone ID: PAT_MRT4530_18958C.1.pep
MAAFSNNVTGHTGDQDPEMVGPDSRVIITMPCVQDGARDGGRPRHNGYARLGRLPRLSLHTAACLSRSAENLALAAQRDVQERQATIAAQSYLFRVVITGVLLGIEEIKTLTLLVLGIVIATS

SEQ ID NO: 115353 - protein, 43 aa, Oryza sativa
  Clone ID: PAT_MRT4530_18959C.1.pep
MQASGPKHIPSLTHIPEGTAATITSLVVARERKGVVQDWNAIS

SEQ ID NO: 115354 - protein, 100 aa, Oryza sativa
  Clone ID: PAT_MRT4530_1895C.1.pep
MNCKAGNPGRRGSDCANLKVISLEKEQEKKNMDPNPNQSADFATFFHITKSTILSQRSSHPDCSRASAPAPQIEIRLDTNSRRQFPIHNESKSKREHLEQ

SEQ ID NO: 115355 - protein, 150 aa, Oryza sativa
  unsure (1)..(150): unsure at all Xaa locations
  Clone ID: PAT_MRT4530_18960C.1.pep
AASTTTEEEEEAAGAEEMTPADNHMLSSIITSLLGCWRTTLLNHILSGHHGKQMAESDIECVNLGIAGQXETDLLMKRXDITLLNKGRPCCTASGDIVRVIDQMIDEDYDKYHHMIIETADRADAADITQTVYAADTDIDVVDLDAAETL

SEQ ID NO: 115356 - protein, 63 aa, Oryza sativa
  Clone ID: PAT_MRT4530_18961C.1.pep
PHRAPRPPRPPSPRSCPATPPGPPPPPTTPRTAPALLPRPHPPPPRPPAFPAPTGPAHSFPRP

SEQ ID NO: 115357 - protein, 589 aa, Oryza sativa
  Clone ID: PAT_MRT4530_18962C.1.pep
MGQLHNLMLLLPCLIFSTLLHIEAMSVAPVKVSTTPIFPTIPRAQTNKDFQVLLRVEAPPAADLNGHVPIDVVAVLDVSGSMNDPVAASPESNLQATRLDVLKASMKFIIRKLDDGDRLSIVAFNDGPVKEYSSGLLDVSGDGRSIAGKKIDRLQARGGSGSALMPELQEAVKILDERQGNSRNRVGFILLLTDGDDTTGFRWSRDVIHGAVGKYPVHTFALGAAHDPEALLHIAQESRGTYSFVDDGNLDKIAGALAVCLGGLKTVAAVDTRVSLKTAELGGARIVRVDSGGYESSVACGGASGECGYCDAAATVCDHHHHHHCHHRHHQQQLLAIGYSYSHAPGVQAVSIEGHGVFVQRPEVAIFSVDGGRQRQTLLPSPVVMQHMVRFELLELVAGFAETEMLSKKGTMQLRGGGARAGDVLQGKWEEFRRARQFWGGVELDGLEEDVDAMVASLRSGLAYVSSWVSSHQMQRATAMGSPEKVIAEFMTPAMVIMLEEARKLPSPLPAAAEAARERRPGCKGGGDLHYVIRQRLELWSKVRREVPLMYQPSSEQEDVQLTALFREASLEAIDRAMHHDIYLIHAEK

SEQ ID NO: 115358 - protein, 701 aa, Oryza sativa
  unsure (1)..(701): unsure at all Xaa locations
  Clone ID: PAT_MRT4530_18963C.1.pep
MDRDSFDDLSTWATQSSASGPATAPSAGASFDLNSQAPVAEGFPGLGMYGAFLQGDDDELLTGHGRGSSLPPYRPPRAGAGDGRATPNLSRRLNLDGSSPTGAGRGGGNGGTFPDGLSSGRGGRVRQRSSSATAAPGRRSQRSNTAMSGEGYQAIVDGLLDRRGLVYTRCQVKNQILVLKTTHSFWRYLQAHIGLGRLPDGTIDAESSFWRTHTEDQGQDEEEEDEEEFQPTPISTSSQRSQKGKRPLSSNSSTLSSPVKKSKSLMIKIVKDIASTFKEAVTVNTKQMQNRASDKAAFSVKRCQELAFECGIEQTIESVYAMSKMFETEYQREFFCGQLTPELRLCYFNKCVDNLLHVLKQEEDHGPMVEEAEDDGGSTSEDEIISMCRNNLVHAENLIVQLVPILGMYSDNYFVKLPKRINGDSGMDWVMDTLARDTQCYNMFRVERALFNRLHNTFVQSYGLKSTTKMTSIEALAMFLWIVGSPQSVRQADNHLRRSLEIVSRTFNRVLTCLLRLAHDIIVPKDPTFSEVHPNLENLAFWSHFNDCIGAIDGTHVNVVVPKIKRVPYLNRHNETSQNVLAVCDFDMRFTFVLSGWPGSAHDMRVFKDAVSTYHHKFLHPPSGKYYVVDAGYPNRPGYLSPYTRTRYHVAQWNDGPPPQXRAELQIGNLMPVMRMKIITQCLVLLHPNGQQMNLLLKMPT

SEQ ID NO: 115359 - protein, 168 aa, Oryza sativa
  Clone ID: PAT_MRT4530_18964C.1.pep
MGMPRVRVMVVVTATAMAMAVQGSRHSDFFVEGEVYCDTCRAGFVTNVTTAIQAARVRLECRHYMSASGSVERSAEGTTDATGHYRMELVEVDNRGAELVCAVALLSSPVTECHEMEVGRDRAPVTLVQDVGLATMVRRANPLGFLQTMLARYADTDTRYVDTKMWHL

SEQ ID NO: 115360 - protein, 685 aa, Oryza sativa
  Clone ID: PAT_MRT4530_18965C.1.pep
MDRDGFDNLSAWASQPSASGPTTASSVGAGFDLNSQAPAAEGFPGLGMYGAFLQGDDDELLTGRGRGSSLPPYRPPRAGVGDGRATPNLTRQLNFGNSSSAGAGRGGGNGGAFPAGCLRGEAFAALEFGRHGTWPPEPAQQHGDEELEDDVEEFASSGGPPRRVGTYNGAQMSGEGYQAIVDGLLDRRGYRRGLVYTRCQVKNQILVLKTTHSFWRYLQAHTGLGRLPDGTIDAESLFWKTHTERLQWGPPENEELLDQLFRGYTVDGSTTLVPGDDYGQDQGQEEEEEDEEFQPTPSSTSSQRSKSQKGKRPLSSTTSTLSSPMKKSKSPMVKIVKDIASTFKEAVIVNTKQMQKRASDKAAFSVKRCQELAFECGVEQTIESVYAMSKMFETEYQREFFCGQLTPELRLGYFKKCVDNFLHVLKQEEDHGPMVEEAKDDGGSTSEDEIISMCRNNLVHAENSIVQLVPILGMYSDNYFVKLPKRVNGDFGMDWVMDTLARDTQCYNMFRVERPLFNRLHNTLVQSYGLKSTTKMTSIEALAMFLWIVGSPQSVRQAENRLRRSLETISRTFNRVLTCLLRLAHDIIVPKDPTFSEVHPNLENPAFWPHFNDCIGAIDGTHVNVVVPKSKRVPYLNRHNETSQNVLVVCDFDMRFTFVLLGWPGSAHDMRVFKGLLLELSCNNL

SEQ ID NO: 115361 - protein, 633 aa, Oryza sativa
  Clone ID: PAT_MRT4530_18966C.1.pep
MGQLHNLMLLLPCLVFSTLLRTEAMSVAPVKVSTTPIFPTIPRGQTNKDFQVLLRVEAPPAADLNSHVPLDVVAVLDVSGSMNDPVAAASPKSNLQGSRLDVLKASMKFVIRKLADGDRLSIVAFNDGPVKEYSSGLLDVSGDGRSIAGKKIDRLQARGGTALMPALEEAVKILDERQGSSRNHVGFILLLTDGDDTTGFRWTRDAIHGAVFKYPVHTFGLGASHDPEALLHIAQGSRGTYSFVDDDNLANIAGALAVCLGGLKTVAAVDTRVSLKAAELSGGGARIVRVDSGGYESSVACGGASGEVVVGVLYTGEVKNFVVHLHVPAASSTTLTFSSVECGGYYDAATVCDHCHHRHQQQLLAVGYSYSHAPGAASAAVSVEGHGVFVERPEVAAVFVSVDGVGVGGGRQRQIPLPSPVVMQHMVRFELLELVAGFAEAEMASKPAATTTQPRAADVLQGKWEEFRRARQFWGGVELDGVEKEVDAMVASLRSGLAYVSSWVSSHQMQRATAMGSPEKVVAEFMTPAMVIIVEEARKLPPPPPPPPAAAEAARERPSGCDGGDDIHHVIRQRLELWSKVRREVPLMYQPSPEQEDVQLTAVFREASLEAIDRAMHHDIYLAVVHVSNQRRC

SEQ ID NO: 115362 - protein, 268 aa, Oryza sativa
  Clone ID: PAT_MRT4530_18967C.1.pep
AALFFFFFFLGNEHPVNILHFSDFQRTKLVISTKFLICAPDSSAVTLSKTKKKPGLERKGKVVTDIKDAVEHYANAYVFTYDNMRNQKLKDLREQLKSSSRIFLAGKKVMQIALGRSSADEAKTGLHKLSKFLQGDTGLFFTNLPRDDVERLFREFEEHDFARTGSIVTETVELKEGPLEQFTHEMEPFLRKQGLPVRLNKGAVELVADHIVCEEGKPISPEAAQTLRLLGMQMATFRLYLVCRWSSDDFEVYKEGLAQLRAEADDSS

SEQ ID NO: 115363 - protein, 720 aa, Oryza sativa
  Clone ID: PAT_MRT4530_18968C.1.pep
MDRDGFDNLSAWASQPSASGPTTASSVGAGFDLNSQAPAAEGFPGLGMYGAFLQGDDDELLTGRGRGSSLPPYRPPRAGVGDGRATPNLTRQLNFGNSSSAGAGRGGGNGGAFPGGLSSGRGVWQHSSSAATALGRRSQHSNTAVRAGGSGQRLPRPRAPRSAVRGQASSSDAPFNNEDEELEDDVEEFASSGGPPRRVGTYNGAQMSGEGYQAIVDGLLDRRGYRRGLVYTRCQVKNQILVLKTTHSFWRYLQAHTGLGRLPDGTIDAESLFWKTHTERLQWGPPENEELLDQLFRGYTVDGSTTLVPGDDYGQDQGQEEEEEDEEFQPTPSSTSSQRSKSQKGKRPLSSTTSTLSSPMKKSKSPMVKIVKDIASTFKEAVIVNTKQMQKRASDKAAFSVKRCQELAFECGVEQTIESVYAMSKMFETEYQREFFCGQLTPELRLGYFKKCVDNFLHVLKQEEDHGPMVEEAKDDGGSTSEDEIISMCRNNLVHAENSIVQLVPILGMYSDNYFVKLPKRVNGDFGMDWVMDTLARDTQCYNMFRVERPLFNRLHNTLVQSYGLKSTTKMTSIEALAMFLWIVGSPQSVRQAENRLRRSLETISRTFNRVLTCLLRLAHDIIVPKDPTFSEVHPNLENPAFWPHFNDCIGAIDGTHVNVVVPKSKRVPYLNRHNETSQNVLVVCDFDMRFTFVLLGWPGSAHDMRVFKGLLLELSCNNL

SEQ ID NO: 115364 - protein, 299 aa, Oryza sativa
  Clone ID: PAT_MRT4530_18969C.1.pep
MLNPRTIKHQRDNVAATASLIRADDEDVLRIRGGSDDVAQTPRNHQVISTKALICAPDSSAVTLSKTKKKPGLERKGKVVTDIKDAVEHYANAYVFTYDNMRNQKLKDLREQLKSSSRIFLAGKKVMQIALGRSPADEAKTGLHKLSKFLQGDTGLFFTNLPRDDVERLFREFEEHDFARTGSIATETVELKEGPLEQFTHEMEPFLRKQGMPVRLNKGAVELVADHIVCEEGKPISPEAAQTLIGIFDDVNIVTKPMRLLGMQMATFRLYLVCRWSSDDFEVYKEGLAQLSAEAEDSS

SEQ ID NO: 115365 - protein, 136 aa, Oryza sativa
  unsure (1)..(136): unsure at all Xaa locations
  Clone ID: PAT_MRT4530_1896C.1.pep
LPQVGLLAVLKNTLRKSVSTIFSSTVDDMGPRVSKLEGGGYPQYPRGTPPRGRTPRVXRLGGWSQRPPXPHLRRPERVRHAAFNATCCAPDRSVTGRMTDGTEVVRPAHRSCTFHGCIPQLTRHILVFFCTSERLC

SEQ ID NO: 115366 - protein, 883 aa, Oryza sativa
  Clone ID: PAT_MRT4530_18970C.1.pep
MASEELVVVALEKGSVHPKPREPLRHRRLRVEVEASAGRGSGGGAARRRLRSPRAEVIEAVSVHAWPMAQIGGGGDADGRRRRGSGVAAALRLPGAAERCRRRRGWSEEARLMGGGVAAPRNSGGGGAVGRAPRGSAAEARIEDGGTVSAEVAAWIWEAATTSKRKKLVWTPRKTYPKNGPFWGARVPGAVVQQDGASLFGAVPLPTWRGDAEVARGTEDHLLEAEQVEVIDHCWAPGPAGVELELEMLELGHGSFHKESLQHLEACAAMSVAPVKVSTTPIFPTIPRAQTNKDFQVLLRVEAPPAADLNGHVPIDVVAVLDVSGSMNDPVAASPESNLQATRLDVLKASMKFIIRKLDDGDRLSIVAFNDGPVKEYSSGLLDVSGDGRSIAGKKIDRLQARGGSGSALMPELQEAVKILDERQGNSRNRVGFILLLTDGDDTTGFRWSRDVIHGAVGKYPVHTFALGAAHDPEALLHIAQESRGTYSFVDDGNLDKIAGALAVCLGGLKTVAAVDTRVSLKTAELGGARIVRVDSGGYESSVACGGASGEVVVGVLYAGEVKSFVVHLHVPAASSTTTFSSVECGYCDAAATVCDHHHHHHCHHRHHQQQLLAIGYSYSHAPGGEAVSIEGHGVFVERPEVAVFSVDGGRQRQTLLPSPVVMQHMVRFELLELVAGFAETEMLSKKGTMQLRGGGARAGDVLQGKWEEFRRARQFWGGVELDGLEEDVDAMVASLRSGLAYVSSWVSSHQMQRATAMGSPEKVIAEFMTPAMVIMLEEARKLPSPLPAAAEAARERRPGCKGGGDLHYVIRQRLELWSKVRREVPLMYQPSSEQEDVQLTALFREASLEAIDRAMHHDIYLGSTKDISHRKSTIQNYSAHSC

SEQ ID NO: 115367 - protein, 72 aa, Oryza sativa
  Clone ID: PAT_MRT4530_18971C.1.pep
QGNLCRQGLLFKKICFEDNTPLQNQACSTKTACNSIRSLFPGRPQNLVCGCNFKLIWHLMDYAYVYVATSID

SEQ ID NO: 115368 - protein, 580 aa, Oryza sativa
  Clone ID: PAT_MRT4530_18972C.1.pep
MDARGARLTDGGDGDGGDVGARCGAERRLRGGGAAALCDGAAAWRRRRGVVEAAAWWSGGVARRGARRGDVTTTRRGGARGGDATACGAAGRGARDGDTTGVRRGGARGARGRRDGRAATATADGDGGSGGARGSVMATAGSGGTGLGAVSARQWGRVRGTGDLVVEAGWRKLTGLEEDETSRYWCAPPVRRNAYASSSTAMNGGFPRGKRGRNATATAGPDFLSALPEGILHHIMSFLNVRQVIQTCVLSWRWRDLWRSVPRINANYCELSMSPIAAFTPDNEAAFKRFVNRLLERRDPAAVIHTFNLRYTISNPNNRDNDSADANRWISHALQNQASFLKIIVDAHELHLDHTVFTSCYLGRITLKNVFLDQGFFEQLEIGCPLLQDLLLYDCIIGDDEISSETLNVLTMYGCQFPTLQESCISAPNLTSLIMHQPENFVPVLDDVASLVTATVDLFPLIEFCAYDMRQLLWSLSGVRNLDLDYYAYFYVLIIFLQSSPKLEKLTLKLEKYYPHPYEHIIGDELTERSFTCEHLKIVEIICMEDDEPLAKIVEGLFVDNGMNSVRFDIKYWSDFWKDM

SEQ ID NO: 115369 - protein, 97 aa, Oryza sativa
  Clone ID: PAT_MRT4530_18973C.1.pep
PYKSKMEQSWKWNMFVYYKHNVLVWKRTELGPMMAGKEQGSVSLEEKSTLRREYFLLEKATGELRVTLAPIFRKWGPLVFILEGLAEGTGNRGSSQP

SEQ ID NO: 115370 - protein, 83 aa, Oryza sativa
  unsure (1)..(83): unsure at all Xaa locations
  Clone ID: PAT_MRT4530_18974C.1.pep
FGTSGLLKXXGDIYXXMIEXKVITXLGPRYXPCGIXPPDFXXXAXGNYXCLXEKEXLTVPAGIXISFYCTHNTAAINHILLYF

SEQ ID NO: 115371 - protein, 353 aa, Oryza sativa
  unsure (1)..(353): unsure at all Xaa locations
  Clone ID: PAT_MRT4530_18975C.1.pep
IAPLSRPALGREFAGFTRPPPPPPTATLSPSCSTPERGLRRPRSRCGRAQRVASRRNARLRVKPRAGIPPPPNAGKSTPCNTLATDLPAATCAPSRAVLWSIGGGSHSRGKNARXSIGDVVEFFAMHGLLLAEHEVEIGKAQAANFPFCTINANVGVVAIPDACXFKLSRLSMSKVTILTSIELVDIAGLVKGASKGEGLGNQFLSNIREVDSILQVVRCFEDDDIVHVSGKVDPKSDIDVINLELIFSDLDQIEKRLDKLKKSKTKDQQVKVKTXDKETKAWTILAGMTAPQAAGVIHSDFQKGFIRAETVSYDDFVAAGSLGVAREKGLLRLEGKDYIVQEGDVMLFRFNV

SEQ ID NO: 115372 - protein, 92 aa, Oryza sativa
  Clone ID: PAT_MRT4530_18976C.1.pep
WRAVSTRGGCSPFSSSCTLPRSPHPSGAGYWGRASPRGAPTAWAPPACPSRRSRSRCRPCSRASLRRSPPRPRRRWRGARPAAAGSRGWSPP

SEQ ID NO: 115373 - protein, 298 aa, Oryza sativa
  unsure (1)..(298): unsure at all Xaa locations
  Clone ID: PAT_MRT4530_18977C.1.pep
MLEEVELPHPPEDVPGEQAVGGGLVAPPRRALHLQRRRHALQPAVQLAAAVPHHVLHVVHLVAEEDAHQVQELGHGPRQLPPHEELDQVGEVVGGVEGDPLDGAVGADEARRHEQRRQRARPDAVXLRCAARSTPCSASSWTDSAAWRWTRWSKSERLISKASAGAAVGDAARVMPTWMRWSASTLRRRRSYRSPAVSRAGCLVGRWITPGNXRVHGHVREVIDRVADDPEFLLHVVRPHPAYLHRRRRLPLPANAGGXRTPTARTPCQAAAAAASSDRRRTTTPAAASSWRRQTLTA

SEQ ID NO: 115374 - protein, 268 aa, Oryza sativa
  unsure (1)..(268): unsure at all Xaa locations
  Clone ID: PAT_MRT4530_18978C.1.pep
MDEGGGAGAAAAAAGNXGGGGGAPQXARSAEDVFRDFRARRAGIVKALTTDVEKFYRQCDPEKENLCLYGLPNETWDVTLPAEEVPPELPEPALGINFARDGMIEKDWLSLVAVHSDAWLLSVAFYFGARFGFDKEARRRLFTMINGLPTVYEVVTGIAKKQTKVSNGSSKSNKSNPKPSKQSNSNSKPAKPPQPKDEEDSGPEGTEDEDQAYMCGACGETYANGEFWICCDVCEKWFHGKCVRITPAKAEHIKQYKCPGCSSKRSRE

SEQ ID NO: 115375 - protein, 128 aa, Oryza sativa
  Clone ID: PAT_MRT4530_18979C.1.pep
KKITLYHLYIYICVYMYICICIYVYVYVYIYIYVHVSLHIYICIYVYVYIHMYIYIYIYIYIYIHIHIYIYIYIHIHIYIYIYIHIYIYIYIYIWKLRCEPKFICTINLSCSLVPRCVPSAYAYSTIE

SEQ ID NO: 115376 - protein, 740 aa, Oryza sativa
  unsure (1)..(740): unsure at all Xaa locations
  Clone ID: PAT_MRT4530_1897C.1.pep
RAAGIPARGSFSGQXPASLGNLSWLEALSTPGNRLTGDLPSELFVLGNLTFLDLSDNKLAGEIPPSIGNLAALQSLNLSGNSFSGRIPSNIGNLLNLRVLDLSGQKNLSGNLPAELFGLPQLQYVSLAGNSFSGDVPEGFSSLWSLRHLNLSVNSFTGSMPATYGYLPSLQVLSASHNRICGELPVELANCSNLTVLDLRSNQLTGPIPGDFARLGELEELDLSHNQLSRKIPPEISNCSSLVTLKLDDNHLGGEIPASLSNLSKLQTLDLSSNNLTGSIPASLAQIPGMLSLNVSQNELSGEIPGMLGSRFGTPSVFASNPNLCGPPLENECSAYRQHRRRQRLQRLALLIGVVAATVLLLVLFCCCCVYSLLRWRRRFIEKRAGVKKRRRSPGRGSGSSGTSTDSVSQPKLIMFNSRITYADTVEATRQFDEENVLSRGRHGLVFKACYNDGTVLAILRLPSTSSDGAVVIEEGSFRKEAESLGKVKHRNLTVLRGYYAGPPPDVRLLVYDYMPNGNLATLLQEASHQDGHILNWPMRHLIALGVSRGLAFLHQSGVVHGDVKPQNILFDADFEPHLSDFGLEPMVVTAGAAAAAAAASTSATTTVGSLGYVAPDAAAGGQATREGDVYSFGIVLLELLTGRRPGMFAGEDEDIVKWVKRQXARGAVAELLEPGLLELDPESSEWEEFLLGIKVGLLCTAPDPLDRPAMGDVVFMLEGCRVGPDIPSSAXPTSQPSPA

SEQ ID NO: 115377 - protein, 47 aa, Oryza sativa
  Clone ID: PAT_MRT4530_18980C.1.pep
PPPPQGNVEAATTRPDLFRGPPSGAFQPVRLEGGGLPRSTRWRAAIL

SEQ ID NO: 115378 - protein, 95 aa, Oryza sativa
  Clone ID: PAT_MRT4530_18981C.1.pep
RIGARFASPLQSMATRAGALSCKSPRSLLHNSPEGDYKRASVSVDWPLRNIGKLKKEDFRPVYKVDQPILLEIIHASTLVWEAIIGTSKTPCFEG

SEQ ID NO: 115379 - protein, 374 aa, Oryza sativa
  Clone ID: PAT_MRT4530_18982C.1.pep
MSDGSVESPSLHRTPPPPSPSPSLSLSRSQQQTPRGRQPPPPGADPVAFAVVAFVAICFVLISFSAPSSILHQVPEGHVGVYWRGGALLETITPPGFHVKLPWITQFEPIQVTLQTDQVRNIPCGTKGGVMISFDKIEVVNRLHKEFVHETLLNYGVHYDKTWIYDKIHHEINQFCSAHSLQQVYIDLFDQIDETMKEAIQRDCTRYAPGIEIISVRVTKPNIPDSIRRNFELMEEERTKALIAIEKQKVAEKEAETQKKIALSEAEKNAQVSKILMEQKLMEKDSSKRQQQIDNEMFLAREKALTDANYYRITKEAEANRLKLTPEYLELRFIESIANNSKIFFGEKIPNMIMDQRMLRNYLDNGSTKDHLDL

SEQ ID NO: 115380 - protein, 86 aa, Oryza sativa
  unsure (1)..(86): unsure at all Xaa locations
  Clone ID: PAT_MRT4530_18983C.1.pep
VALSSWPPDLRRWGEWQGPGGWWDPVGIKGAAGSGREAGDGSGGEVRGGXVVVRVERLFXARSPAAIGTSFARQNNFFFFPLFCFL

SEQ ID NO: 115381 - protein, 78 aa, Oryza sativa
  unsure (1)..(78): unsure at all Xaa locations
  Clone ID: PAT_MRT4530_18984C.1.pep
QNLPTPXDLAXNGGAAXPPPRPXRXPXPPRRHRXGVVXGGTXGEASAGARGRPXGXVVXLXLXRVDPGARVRSRLPSR

SEQ ID NO: 115382 - protein, 106 aa, Oryza sativa
  unsure (1)..(106): unsure at all Xaa locations
  Clone ID: PAT_MRT4530_18985C.1.pep
LVCXXLLCLXXXGXFAGXXVCXLRLXXAXFXXXXXSXXAXXXSSPCLVXGXGLRXCFVWALVSAXCFFXGSAXXXXWGSSGLLXXLKLFAVAXXEGGRYEYGHVNR

SEQ ID NO: 115383 - protein, 103 aa, Oryza sativa
  Clone ID: PAT_MRT4530_18986C.1.pep
MERIVESKLNIKKVNPSCLFVRAIPSYESSDMFEDNLQRSVDNLCEVDAEDMNREKFRNGSIIKLPQPSLRQLKGAPWFESGEKKIPPATGDRAKQSRVEKFC

SEQ ID NO: 115384 - protein, 213 aa, Oryza sativa
  Clone ID: PAT_MRT4530_18987C.1.pep
MACFVEELKVEQAKMQGLLDHVDAFPAGGASPTREDYYTAEEIISHGISDMQICRVHKAIVMGSAPLYDAKTMGAILPPPSCPLTTDLAERLALLPPLEQTISYPDCDDVGLEGFAMRVQHAVTALGFAEEALESSFYTFNDAISLIFTKPIPPLAHSTKRKARSSIALALRCAAYAHAQATIALTRIAPPLTTTTPANNIAHSNIASNQQHI

SEQ ID NO: 115385 - protein, 130 aa, Oryza sativa
  Clone ID: PAT_MRT4530_18988C.1.pep
FSRALKAFHLDTNDWGCNVQPYSGSVANIAALISVLEPTDKILGLALPSGGHLSHGHQLESGKKISATSIFYNCSSYGIDQTTGLLDYDKLDQQIQDFKPKLVIAGASAYPRDWDYQRMRESCDKGGAFL

SEQ ID NO: 115386 - protein, 67 aa, Oryza sativa
  Clone ID: PAT_MRT4530_18989C.1.pep
LGLLLIPARTYPGCSIVRLFAVVPDYPVSFKLFVSLNFWKSFHPWCIHPKTLSPKKKKKKEHKKKNT

SEQ ID NO: 115387 - protein, 257 aa, Oryza sativa
  Clone ID: PAT_MRT4530_1898C.1.pep
QQLYCLRRRRSRLHQYIRPLGLLWWRTGGRRRGGRPTTGDEVVWRRSNGGPGAGGPSGGERGAGSRWRRWHRRPPPSPRPGYAAVVRFVWHRASRSPHCLRPQPPVHVPDERSGVGGRREPAEVDERRREVTHGRSLPRDQARPRRHQGVHAGPPPPPRLASPPSDRPLAPPSPARPCAAALASSVTALAFFASMLASPRHCLRRHPRRKRLGKRNWEASSASFCRPPAPPPSQPPAALRRRQRRLLPPSCGHRVLV

SEQ ID NO: 115388 - protein, 65 aa, Oryza sativa
  Clone ID: PAT_MRT4530_18990C.1.pep
RPPPPPPTPPPPPPPPPPPPPPLAKVFYFNNSRQLKLSWPTCTPPPITKGVFFFGQKHPNIPPRA

SEQ ID NO: 115389 - protein, 274 aa, Oryza sativa
  unsure (1)..(274): unsure at all Xaa locations
  Clone ID: PAT_MRT4530_18991C.1.pep
HASAHISSKAAHSSREGEGNNGDGEVAPPPHGGGSGGGLLLLQRPGGEATDAAAAAAVLRQREDGGGGAQAVEDIIGWKTVPADCAEYVSDYMTGERYGRDSDVVINEAIAYAESLKLSGHGKEIWVFDVDETALSTLPYQAKHGYGTKPYDHASFVQYVAGGSAPALQGTLRLYRRLLQLGIKPVFLTDRTEDQRAVTTHNXLSQGYYSWEKLLLQPVGLRPRLXRSRPASGRNWVSAGXVIVGNIGDQWSDILGXPEGYRTFKYPNPIYYVA

SEQ ID NO: 115390 - protein, 405 aa, Oryza sativa
  Clone ID: PAT_MRT4530_18992C.1.pep
MDWSSLPADLLLAVFARLPRDADRARFRAVCAGWGAAAASWRPRPWFVGSRTDRFGRGAAMSSFWLSRRSRGGGGLVPFAAAVPAGLEFLSSSSHGYLALSDPMATPKAVALVNPVTGRRIRLPPIGFFKRWHDVATVVLSADPDTADEWAAVAVGFPTNCLAYYSSAAGAWTPLGFSAAGYAGVEHFRGRFYVAFKSQLCVCDVEATVPAVIPLEQLIDDDDGGGENVDTGRRVVETHLVECDGELLLVSVHDNLERNPEDTTIFGDDDDHDGSSSSSSDSGDGRVVEVLRVEWVAGGAVRLVRQEDLRSRALFLGRNHAFALSPEEFPSCRANCVYLVDQQGHPDGRVRVFDMNADERWEPEEAAVVARNYARRDETIFPPDDGRRDAQSAGWARRGWFFPKY

SEQ ID NO: 115391 - protein, 168 aa, Oryza sativa
  Clone ID: PAT_MRT4530_18993C.1.pep
MEMAAAAVGVLLPFPFYWALWNHPQRWVDLCGGGGGGVDPCRRMAQVSHVLKALQLLALASVASFSWPPPLYSVALLAVGQYLNFKVYQLLGEPGTYYGVRFGKKIPWVTEFPFGYIKDPQYVGSMLSLVALLCWVPFQYVLLWCLGYVFMMWVESKEDPATRAKLLS

SEQ ID NO: 115392 - protein, 96 aa, Oryza sativa
  Clone ID: PAT_MRT4530_18994C.1.pep
AQESSSVQKHRISTVQISHQFSKNRTSFQFISISFINSVTLGEYVSSKTHLFAISAVPIYRRNPTDHSLFIIFAPYLERIFSGRFSSNIIGSFPEA

SEQ ID NO: 115393 - protein, 444 aa, Oryza sativa
  Clone ID: PAT_MRT4530_18995C.1.pep
MDLDKSTSTSASLKKLQEDGALLGHGTIERSRSIFSHLCEAYIGVEPFLDLFRFYYELRWMESNRIENLDPVFVVPEEQPDKISSWTAKSALTPSLQSFIDIINDLRIRGLSGYEVTADFIGRRIQLLQARAHPAFDYSGPEDATQVSPRGLNRETVERRVSQVMISGPTTTSNVPVPLCEKGTAEREAAINALPLTDVIGPLVDHQATTSLKEGVAQEASNVAAAATTSGGNVPKRGSLGCVSSTSVTAEAGDTWREAGARGIGHKIEEAKAAAASSANERTDKLAHDLAEVREDLQKMKELVAGNERQRQGLEHRMLELENNLSEIRGSLRVTYTSLHQLAGECGVTTTIPANPDEFSLTTSLAEMATVMEEIPSKHAARIREETSNGIYTGACHVLACVRLAHPELDLQRILDQGTANDARKGVMEEVGDLGESVLPLFEE

SEQ ID NO: 115394 - protein, 396 aa, Oryza sativa
  Clone ID: PAT_MRT4530_18996C.1.pep
MPPKPAAEDVADEQPEPPDEDPDVAEADPTGRYLRYREIIGSGSSKTVYKAFDAVDGIEVAWGKVEINERIMGSSKELQRLRTEIQLLKSLQHKHILKLYASWVDTNRRTVNIVTELFTSGNLREYRTKHKKVDMKAMRRWAKQILTGLEYLHSQKPPIIHRDLKCDNIFINGNHGKVKIGDFGLAMVMQQRKTRSIQGTIEFMAPELFGENYNELVDIYSFGMCMLEMVTCECPYSECKGFIQIYKKITESDDANHRSSNSVQEPVKFPENNFTKDEPIFVSLAPNNGTVNGKEQSFILVLQKSDFLLEGNMSTTNPVMLFLRFPGPDGKFKNVQFPFDMEKDTSLSVSTEMVEQLELPEWNNPVLAELIDAFLLHILPSWKPCVKVGKMLPSSS

SEQ ID NO: 115395 - protein, 52 aa, Oryza sativa
  Clone ID: PAT_MRT4530_18997C.1.pep
PKSSTDIMIKTTHCIKSVFDHHTNTPGFHPLHRKEKVIKHINTTHCKFTALR

SEQ ID NO: 115396 - protein, 988 aa, Oryza sativa
  Clone ID: PAT_MRT4530_18998C.1.pep
MAAAGSCSRFFRQVHALLLKNLSFQRRNAKANAAIAAFPALLCVLLVTIQAVIDGELDRPPFRCGCACVRRDGGRAGAGACAATECGVQHSTATQALSCAVPAPPRWPAVTQVPDEPYRALTPVHPARCRGDGGSGASEAPCPVAVLTTGQNRRLTEGLGRGFFPDVPPSYYLGVPNSNNSSYIDELSKIVPGTSTLPAHVLFIEPGFVPNSTLYVIQRKCIWDSHNTSRSSDAMPIQLDVKCVQGLSLWCRNSAVMNDHLYKGYKGGNKRRTSNEYLAGYDFLDTSKRRFHVYVSYNSTFSRDNGHHPMTVLRVARLVNMASTAYLKFLRGPNVEMRLEYLKEMPKAAMKIRLDLTTLLDALFFTWTVQLLLPVMLTYLVYEKQHNLRLMMKMHGLKDGPYWMISYAYFLSLSAAYMMFFVMFGSLIGLDIFRLNSYSIQFVFYFLYINLQIVLAFLLASFFSSVKSASVISYIYVFGSSLLGEALLQLFIEDITFPRIILNIYWILIKNYHSTCLLEQWLVTMELVPGFALYRGFYELAEYAFAGRQMGKPGMQWRDLNDPINGMKDVLLLMSIEWILLLPVAFLLDHRPTWHPLFLFGFMSTKHSSPTIIPDKVKQRSRKDQDHLPSKSCDFVTDMWDKGMVISKRKVVKKLLKEMDMRNMIICHNLKKVYPGKNGNPDKLAVKGLSLALRKGQCFGMLGPNGAGKTSFINMMIGLVAPTYGTAYIHGMDLRRDMNEIYANIGVCPQHDLLWETLTGREHLMFYGRLKNLTGAALLKAVNESLKSVNLFHSGFGDKSVNKYSGGMKRRLSVAIALIGNPKVVYMDEPSTGLDTTSRSNLWNVIKRAKKNCTIILTTHSMEEAEELCDRVGIFVDGNFQCLGTPKELKARYGGVRALTITTAAGHEEAVERAVARRCPGAAKVYGVGGTQRFEVPRRGARLDGVLGAVEAARRAAPVVAWGVADATLEDVFVRVAMDARAAAHVLS

SEQ ID NO: 115397 - protein, 53 aa, Oryza sativa
  Clone ID: PAT_MRT4530_18999C.1.pep
GKGAQVLRKYPFFVENVWKCFFLERGLLFKKPIKLFWPIEGQQRWKLQFQKGY

SEQ ID NO: 115398 - protein, 41 aa, Oryza sativa
  Clone ID: PAT_MRT4530_1899C.1.pep
IILAFFFKIDFCIFRCQINKPILVDLCGKEKRVIYSLKKKK

SEQ ID NO: 115399 - protein, 115 aa, Oryza sativa
  Clone ID: PAT_MRT4530_189C.1.pep
MNTGAVVYRGLEEYQDRVFTQQPHLREKDSSTAPRGKTTPETTSLLARQGQASLTGLLAIVLTNHPVPPTPASCYRRVARIDAPNLALDLAVSTANAASVAPPLAAPFFPISTSA

SEQ ID NO: 115400 - protein, 113 aa, Oryza sativa
  Clone ID: PAT_MRT4530_18C.1.pep
TIYKYKLNFCSRLLQASTAARCGGGRRGGRAVHVGAERRPDPLPPCLPLVVARHSRARHHRCRIRAGSAVARPVSAPYMPHRNRIRTPGARSGGQMCRRAASSPPARSRPSPP

SEQ ID NO: 115401 - protein, 47 aa, Oryza sativa
  Clone ID: PAT_MRT4530_19000C.1.pep
GGKRGCANQDGCGGSSRTNDGAPGPPARSREGWMGIGAGGGGGGRMC

SEQ ID NO: 115402 - protein, 71 aa, Oryza sativa
  Clone ID: PAT_MRT4530_19001C.1.pep
KKKWGLPFFFWFYKRETLPFFFIWFSPPLFTGFWGGEIFTLLFQLRKAFPTPKKGPISLTGSRVLKGGNDK

SEQ ID NO: 115403 - protein, 40 aa, Oryza sativa
  unsure (1)..(40): unsure at all Xaa locations
  Clone ID: PAT_MRT4530_19002C.1.pep
MEANNSLWPFKRKAPLXWLKRTRNHSAXGGDAGTRMDYIP

SEQ ID NO: 115404 - protein, 615 aa, Oryza sativa
  Clone ID: PAT_MRT4530_19003C.1.pep
MPPSAPAHLAVLRLLDSGDLAAAARLAAAGAGPSSSSSPSPVSLAAVLLRHPPPRLGCCLHGRAARAGLLADRYLANALLAFYVRLPRHLPHALRAFDDLPRRDVVAHSSILAAFLRAGMPRRALASLRDMLAGADDDVSPNAHALSAAVKACAVLRDRNAGACLHGSVLVRGFGDDGVVLSSLVDMYGHVAAPGDARKVFEEMRAPDGICYTSLISAFVRNDWFEEAVRWFRSMLMMNGVRPDGCTFGSMMTALGNSKRGSQGRQAHAQVVTRGLCGNVIVESSTLDMYAKCGLMVEARKVFDRMQVRNEVSRCALLGGYCQNGEYEKVIALFREMDKEDGDWYSLGTVLRACAGLSSVKPGKEIHCRFLRMAGWRDVVVESALVDLYAKCGAVDYAYSVFEASTVRNTITWNAMIGGFAQNGHGERAINLFNRMVREGPRPDYISFIGVLFACSHTGMVEQGRNYFNSMCKDYGIAPGIEHYNCMVDLFSRVELLEEAEDLINKSPFRNDSSLWADILGASATHSNPDVAERVSKKMMELEPQYHLSYILLENVYRTVGRWEDALEIRRLMESRKVKKEPGMSWVDANRSKLHVCNSNEEVSELVTSIEMDIS

SEQ ID NO: 115405 - protein, 374 aa, Oryza sativa
  Clone ID: PAT_MRT4530_19004C.1.pep
MALALRLRRALAAASTSASPFLRPAASASRSAPLAAAPLPPPHQVSRPWLPAAGFRSSAAASAAARGDDYGRRDVDEKISPDEILFEGCDYNHWLITMEFPDPKPTREEMIETYLQTLAKVVGSYEEAKKRMYAFSTTTYVGFQAVMTEEMSEKFRGLPGVVFILPDSYLYPETKEYGGDKYENGVITPRPPPVHYSKPSRTDRNRNYRGNYQNGPPQGNYQNSPPPYGSQQDGRGYAPRQNYADRPGYSGTSGGYQSQTTQYQGHANPAGQGQGYYNSQERRNFNQGQGGDFRPGGPSAPGTYGQPPAPGNYAQPHPPTYPGSNQGAPGVNPGYGGNNRQGPGPAYGGDNWQGGFNQYPSQSEGQQESWRGRQ

SEQ ID NO: 115406 - protein, 480 aa, Oryza sativa
  unsure (1)..(480): unsure at all Xaa locations
  Clone ID: PAT_MRT4530_19005C.1.pep
MMPHSGVVDAAAKGVKLGGGGGGALMVRRVASGKLLSASSHLLFRATILATLCLVCLFTVHYPSLLSHSFHLSSAAAAANGKHRAASRSSHRSLLGSSAAVAYGGAAWEKEVRRSAAPRRDGGLSVLVTGAAGFVGAHCSLALRARGDGVVGLDNFNSYYDPSLKRARQRLLASRGVAVLDADINDAALLERLFDAARFTHVLHLAAQAGVRYAMRAPQTYVASNVAGLVSVFEVAAKHADPQPAIVWASSSSVYGLNTDAPFSEEHRTDRPALLYXAATNKAGEAIADAYNHIDGVSTTAVHFFXTAYGPSGSATVPYLSFARSIVAGEPITLFRTADGADARRDFTYIDDVVKGCLGALDTAGESTGTKSGKKRGPAXFRVYNLGNTSPVPVTRMVAILEKLLGRKANKRVVTMPSNGDVPFTHANVSHAARDFGYRPATPLDAGLRRFVDWFVHYYKLDTAKIAKGKRKSMAMSAAS

SEQ ID NO: 115407 - protein, 61 aa, Oryza sativa
  Clone ID: PAT_MRT4530_19006C.1.pep
MDDDLVVPDLEESAAWLRIGGEETDAVERRGAAARCGDRIGSGGGGAGRAQGARLEGASAI

SEQ ID NO: 115408 - protein, 397 aa, Oryza sativa
  Clone ID: PAT_MRT4530_19007C.1.pep
MPGLTAPASYSDEPPRHPALKINSKEPFNAEPHRSALVSSYITPVDFFYKRNHGPIPIVDDLSRYSVSITGIVNKNVQLSMADIRSLPKYDVTATLQCAGNRRTAMSKVRKVRGVGWDISALGNATWGGAKLSDVLELVGIPKLSSVTSLGGKHVEFVSVDRCKEEKGGPYKASIPLKQATDPEADVLLAYEMNGETLNRDHGYPLRVVVPGVIGARSVKWLDSINIIEEECQGFFVQKDYKMFPPSVDWDNINWSTRRPQMDFPVQSAICTLEDVDVIKEGKARIAGYAVSGGGRGIERVDISVDGGKTWVEAHRYQKSNVPYISDGPRSDKWAWVLFEATLDVPANAEIVAKAVDSAANVQPEKVEDVWNLRGILNTSWHRIKIQNSSCVGRSKM

SEQ ID NO: 115409 - protein, 95 aa, Oryza sativa
  Clone ID: PAT_MRT4530_19008C.1.pep
ASSSTPCMTPSRSGSGSPFPSFNPSSPPLFRCHTPFFWGEGGLKIKETPPLWVFSAKKAPVFFLFVPVWFKVVSGFLCKRLCSASHPGGQTKGFF

SEQ ID NO: 115410 - protein, 231 aa, Oryza sativa
  unsure (1)..(231): unsure at all Xaa locations
  Clone ID: PAT_MRT4530_19009C.1.pep
LAAAAGVVAAPADAAGAAHPRRLPPKATSVHGQLPRHHLRQRRRYRWRRGDXAAAPLAAMRSNPFSDVATRSSFRQIHDRYSSILHAIKSSHGKAARKLKVVRAIRKVSRACGAAAAASVAVAAHLLFFGLLVGVPGPLLPAPLRPRPLLPVAPPPTSLGLPLRHADATSVRNPTQTSAMVVVAAAVDRRRSNRLQVAVMVYGEKLPIPEIVAIDDQSDGKSSLLEGGGSV

SEQ ID NO: 115411 - protein, 77 aa, Oryza sativa
  Clone ID: PAT_MRT4530_1900C.1.pep
MATAVQVEGGKAYFCKYFRRGGDWPRPRTPESPSSSCRGPRALARVLGSGESSKPYGVVSARAAVPDAAQVARRASR

SEQ ID NO: 115412 - protein, 68 aa, Oryza sativa
  Clone ID: PAT_MRT4530_19010C.1.pep
MSALMPMVILFSRAFSSNIFRCCRSSPWYRIASSMAVSLHACRSTLEDPRVPSSNSPLALPNLIALQH

SEQ ID NO: 115413 - protein, 121 aa, Oryza sativa
  unsure (1)..(121): unsure at all Xaa locations
  Clone ID: PAT_MRT4530_19011C.1.pep
MDGSISSSIVPRCTTELLLGKCPLCGTQLEARTSRTPMNPNNKFVKCPNLEHTPYAYRFFXWEDQYAQFLANGRVGLEHQTGHXTFNVEAMSSMGIEGLELKGFAAVGRMLVYLTVVQACC

SEQ ID NO: 115414 - protein, 772 aa, Oryza sativa
  Clone ID: PAT_MRT4530_19012C.1.pep
MAAAGVPRAGTGGRRPEGPGEDKGKVRNGIGAPSGGNRQPEGRGGRTEPGRGGVGAATAGGVGGIVGCGWRFWKGEVGDEEDVGRRGPTAGGLVRGVEKEGGNGSVVGRLRRPWRREGYIRCILPARSISCLVGDIQDSHSSDEPNNWTVFWEGFISAHIPPGLMEIKKKEFLNLKQGNMTFMEFMERFNYLGRYVAADMNTEAKKVELCRDRLAPELNHAITAHEITSMKSLVEKALRVESSEKEVVEDRKRKWAAKKFASGSSSTRPRLAPSPVVRPMAPQPPRQMYVPPRPQTQIVRQVPRTVQAAGDASRNDNVACYNCGKKGHYSPNCPYPKTGKSGPHTQGAPQRRNVADEFAEHLPTWKWWQYVDYPRHGLQSELQSEYLSSCTQDLDSNWQLLDLYELENSERTHPSLACGVGNTQSLEMRPHALLRVHPNHKLESKGVIHGSKILVYTAQPYKLGEMNSVQEKRNDTPEKCEGFLIKLGSYWSKRVKSSPPHLDTLKKAAGKGKAIGKVQGTLLAPKKLDLGKTPSAHPKPPTEFTLDMPLVRDDVLVKMGPACKELHGYCMERSNARRKNRETSMTGYYDRQPFLGPEAFIAIDFKDLWDLYRVRLTWKHVCRHAPHVALLDLAVINETIINSDRANMVEYIKDCLWYHQDKEFIMCAYNQQRHWILLVIVRKWNLVYYLNSNIKKDICDWSAIEAALNNAWDQYVAKGGWHKEGHPTLGHKKDFPMHQQVGDQCGFHVWHNMRSFAKKVTLLDLEAWLAKA

SEQ ID NO: 115415 - protein, 123 aa, Oryza sativa
  Clone ID: PAT_MRT4530_19013C.1.pep
AVDECPPKISRRGGTRRRCTPRPSPMGIGPCSFCASVRWLCPPNNSASFAKHPQSCDWIAGPPPLSFLVLRPCFVSLIFPPFHPIKSFPTLINFQLFFQTPFFLNFPLFLGTNPPLNMGDFKH

SEQ ID NO: 115416 - protein, 826 aa, Oryza sativa
  unsure (1)..(826): unsure at all Xaa locations
  Clone ID: PAT_MRT4530_19014C.1.pep
KLQKPYAAQILTPHLXASPPPPAGSGQSPLVARXIRKRQRPSQGPPXLHHAHPCLDASTREKLHFKAGSYPFPLVASVVCLLVHPANRSLIAMGATSKTMHPQPAIQSYFSWIIMTMKHGQMSRAXAHHNTNMSNTAIIPSTELVXLSIAKHIVLARSSKXHKREAGADTRAPHVSGTKGRRTVDQVRTWPRVRVHHVDGPNRPEPIERPRGAAARGTGAAQSRPGRAKARRRRPATAWRAAATARLEVARSGGRRRLEHADEWWGEGAPWGGGFGDTMGKRRGCRGMARRGEAADGGRAERRRQEQRXGRLEDHRREVQRWRRGFRAQEGSGERGKWRGRCGECFYRGGEVGPSPGEAESGRQPPAAWAASWGVGGGFGRERWGMRRTWGGGVPRPAXLVRGVEKEGGNGSVVGRLRRPWRRLEPEEGAGPTCQRRERXKGRKKDFLRGRIGGRPREGKGRPAXPGKTPSKLADVQRTHPPHFSSAADPLAADDWLRDIKIKLNLCQCDPVEKATFAAYYLQGASAAWWETYKTLIPPDEPNNWTVFWEGFISAHIPPGLMEIKKKEFLNLKQGNMTFMEFMERFNYLGRYVAADMNTEAKKVELCRDRLAPELNHAITAHEITSMKSLVEKALRVESSEKEVVEDRKRKWAAKKFASGSSSTRPRLAPSPVVRPMAPQPPRLPRTVQAAGDASRNDNVACYNCGKKGHYSPNCPYPKTGKSGPHTQGADAALAGCRPTHRXSSSPGAQPASGQTFTISATNKSIKVTNNASSIYFSINFTGYRQNQLDDADSAAMSSTILNRAVSSDKSPTNVTWRHRLPPFSL

SEQ ID NO: 115417 - protein, 302 aa, Oryza sativa
  Clone ID: PAT_MRT4530_19015C.1.pep
MAFSITSAASAKAFQPALRLAAQVAGHPQPERLVHVWMSLSSRLHQEVTVLSAEPTNLQGVQTLLAADEEPPPAPDLEQSWSLAASRQAYHNITAAPCHHTSGNASRTLPRSAPKFFKNYFDIVRRNNEHLHDFLCSVQGLHAVLINTTCGHALEALWNSVLMEVMGVGVEMEGWLEELVMANEVEAKVRLAMESEQGKKLRDHVEARREATAMTWKDAARCPDELRTYRGLLERCGKLLSSIQAFTAGDDQQPCQMSVLDAAAFLADEDSLSSSRSKRTIFTPALTSSGLTAACSSAEASC

SEQ ID NO: 115418 - protein, 179 aa, Oryza sativa
  unsure (1)..(179): unsure at all Xaa locations
  Clone ID: PAT_MRT4530_19016C.1.pep
WGNGGVAGVWHDAAKPLVAVARSGSGRSSGGDRLEDRRRAAARGATVAGWFSCTGRGGEVGPSSGEAESGWQPPAAWAASWGVGGSFGGERWGMXGRGAAGSHGRRTRARGGEGVRKRRRRXRLGRPWQRLEPEEGDDRWGRRSHLSAKGERKGRKTDFLRGRIGGRPSGPREGKGRPA

SEQ ID NO: 115419 - protein, 130 aa, Oryza sativa
  Clone ID: PAT_MRT4530_19017C.1.pep
NVPALGKSHFVIQGSHRELLAQINASGWKPPPTASEPILKNKIRKQSLATPTPCPRPSSRRRPTRGSRSSRTASPASPPSHSSPPPQPPPPLSHPNRRITRRRNPLHRNTRDPASCGWQPDQTRRRPRGD

SEQ ID NO: 115420 - protein, 60 aa, Oryza sativa
  Clone ID: PAT_MRT4530_19018C.1.pep
MGFSHAIAILFIFLVASPPSPSHARMVPNDDTQHVPPTPAKGGAGRSRALWSAPSDGVGH

SEQ ID NO: 115421 - protein, 126 aa, Oryza sativa
  unsure (1)..(126): unsure at all Xaa locations
  Clone ID: PAT_MRT4530_19019C.1.pep
YISLVPALGPSILHLTAASAPLPSPSPISAAPRRRHQPASLPLRERDRAKPPPPPIPIAIAHRRRSPPPPPPPTXSSPLAPPPRXATAPSRCHRPPLPQECDRAKPPTRQSPPPPPPILRAATTRH

SEQ ID NO: 115422 - protein, 54 aa, Oryza sativa
  Clone ID: PAT_MRT4530_1901C.1.pep
MAMKTWAARPGYSTEWNTHCDASTDMVRRKTVRFQATDFASNPLLGATMSLETP

SEQ ID NO: 115423 - protein, 118 aa, Oryza sativa
  Clone ID: PAT_MRT4530_19020C.1.pep
KLIRTSISPNDFVRHFFVNRFETTRPYETPPWNPRMFQTSQGPPGHGASSSLVHWIASIWILTAVTRLNSWLGLRLVPNFSSKFPTFSITSTLEEITRSALQTQKQNHKSSKCNISVG

SEQ ID NO: 115424 - protein, 476 aa, Oryza sativa
  Clone ID: PAT_MRT4530_19021C.1.pep
MGRAFVHVILGGGVAAGYAALEFARRGGYSRGELCIISEETVAPYERPALSKGYLLPEGAARLPGFHTCVGANDELLTAKWYKENGIELVLGTKVITADVRMKTLLTATGETISYKNLIIATGARALKLEEFGISGSDASNICYLRNLDDADKLVNVMKSCPGGNAVVIGGGYIGMECAAALVTNRIKVTMVFPESHCMARLFTPKIAEYYENYYTSKGVTFVKGTVLTSFEKDSTGKVTSVILKDGKHLPADMVVVGIGIRASTGLFEGQLLMEQGGIKVNGQMLTSDGSVYAVGDVAAFPIKLFDGVIRRLEHVDSARRTARHAVAAILEPSKTKDIDYLPFFYSRVFTLSWQFYGNNTGEVVHFGDFTNSSPRFGAYWVDKSRIRGAFLEGGSREEYEAISNVVRRKAKVINIAELEKQGLMFAIQESQKDLPDGGLALGEKPTYVWHATAGVIAAASIAAFGYWYGRKRRRW

SEQ ID NO: 115425 - protein, 37 aa, Oryza sativa
  Clone ID: PAT_MRT4530_19022C.1.pep
PHPESPSHGRLLRGYARLLVHVVLLLRRMGGRGVRGG

SEQ ID NO: 115426 - protein, 162 aa, Oryza sativa
  Clone ID: PAT_MRT4530_19023C.1.pep
MAEEKELVLLDFWVSPFGQRCRIAMAEKGLEFEYREEDLGNKSDLLLRSNPVHRKIPVLLHAGRPVSESLVILQYLDDAFPGTPHLLPPANSGDADAVYARATARFWADYVYRKLYDCGSRLWRLKGEPQAAAGREMAEILRTLEAELGDREFFGGGGGGRA

SEQ ID NO: 115427 - protein, 50 aa, Oryza sativa
  unsure (1)..(50): unsure at all Xaa locations
  Clone ID: PAT_MRT4530_19024C.1.pep
TWGRFDREFLXEVENQXGGFISPIQECQKFSHCFLRLIXFFGSRQKXPKL

SEQ ID NO: 115428 - protein, 64 aa, Oryza sativa
  Clone ID: PAT_MRT4530_19025C.1.pep
KKIFSSQKGGFRIQKVGNWDIFLYYYHVPPIDHILILRRGYTHPRGGFRRGKKRGKKKRNPPVR

SEQ ID NO: 115429 - protein, 53 aa, Oryza sativa
  Clone ID: PAT_MRT4530_19026C.1.pep
DHAREKYGQKLAAVRADAETHLAEMQREAHNACRELEVMTAKYEGAKVNVLEE

SEQ ID NO: 115430 - protein, 142 aa, Oryza sativa
  Clone ID: PAT_MRT4530_19027C.1.pep
MTPPLTPNSPPGPGSEWTCGAKSGPATGPYGAPQPDMGPALSSNSIELPCVSAFVHARRSLPVLALCLCTAAASLWHRCNSVPRCYRKRLREGRATGVRRGEEGRELGRAASPRDLATGESRERTGGDCGEGDRRVGDSGVA

SEQ ID NO: 115431 - protein, 71 aa, Oryza sativa
  unsure (1)..(71): unsure at all Xaa locations
  Clone ID: PAT_MRT4530_19028C.1.pep
MPRFVHRFFSSNSGELPFFSGAGDTPXTPAGSIQWVVDPGRWRGVGSGVEDMRLAAGRGPALAAGENTQTG

SEQ ID NO: 115432 - protein, 721 aa, Oryza sativa
  Clone ID: PAT_MRT4530_19029C.1.pep
MLRSYRCLGRPLGWRLEAHVLMAHFEGKKVRERDVCWEYCDKMEGNKVRCRFCYKVLNGGISRLKFHLSQISSKGVNPCTKVKPDVIEKVKAVIAAKEEHRETQVLKRQRDTELSVRPRRIRDLPSQPTSPERATSPAITSTSDQTQFLALEVSTPVLKLSSVTNKARSAPQSEAERCIAEFFFENKLDYNIADSVSYRHMMEALGGQGFRGPSAEVLKTKWLHKLKSEVLQKTKEIEKDWATTGCTILADSWTDNKSKALINFSVSSPLGTFFLKTVDASPHIKSHQLYELFDDVIREVGPDNVVQIITDRNINYGSVDKLIMQNYNTIFWSPCASSCVNSMLDDFSKIDWVNRCICQAQTITRFVYNNKWVLDLMRKCIAGQELVCSGITKCVSDFLTLQSLLRHRPKLKQMFHSSDYASSSYANRSLSSSCVEILDDDEFWRAVEEIAAVSEPLLRVMRDVLGGKAAIGYIYESMTKVMDSIRTYYIMDEGKCKSFLDIVEQKWQVELHSPLHSAAAFLNPSIQYNPEVKFFTSIKEEFYHVLDKVLTVPDQRQGITVELHAFRKAQGMFGSNIAKEARNNTSPGMWWEQYGDSAPSLQHAAVRIVSQVCSTLTFQRDWSIIVRNHSEKRNKLDKEALADQAYVHYNFMLHSDSKMKKGDGDPIALDAIDMTSPWVEDSDSPNLAQWLDRFPSALDGDLNTRQFGGSIFGTNDTLFGL

SEQ ID NO: 115433 - protein, 97 aa, Oryza sativa
  Clone ID: PAT_MRT4530_1902C.1.pep
LSLHILLIFYFKRKEVNTIPTLSNYKKTPHIHLHFPIIADRNTNSNYPPPLRFPTSLFSNLSIRFMITTKSLTPPYSNMPQHFNPRFCNSIMNQSMP

SEQ ID NO: 115434 - protein, 149 aa, Oryza sativa
  Clone ID: PAT_MRT4530_19030C.1.pep
RQNSQLQDLYKNPCSNGSPSCQQAVPNFPQSNRAGGTVTFMVHRCPITSHLASLASSKQHSHHVHTWHASKVHTHTGTANLHSTAAQGHPSHSYSVHWPHQCSSSRWHIVASSSHIAQASRHQHKPWCTSMQHICIHGYAQASPVCISS

SEQ ID NO: 115435 - protein, 61 aa, Oryza sativa
  Clone ID: PAT_MRT4530_19031C.1.pep
FESPSLEKKRRKGGTESSAAGTIRGAAHRSAGIGQVVLLLSRNRRRARALISSSPAIFFIG

SEQ ID NO: 115436 - protein, 86 aa, Oryza sativa
  Clone ID: PAT_MRT4530_19032C.1.pep
VWHRSSPSIRLLFSPNSVVSNSVFVVLACCNFLSCYAPSFTVFLRVPLVSMLYKSPFVHRYGYMVHTNPVWSSAVPVPLIISGQVY

SEQ ID NO: 115437 - protein, 249 aa, Oryza sativa
  Clone ID: PAT_MRT4530_19033C.1.pep
IAVIEGMLAGIGILIITSQLPYAFGNKHLFNELSLSFINIHLGSLIISLLSLLMMLGWERSATLKSIKMLPSALIAVIMSIGLNKLFAGTPLAIPESQLVQLPIAHSWAEIGDLLYFPDWAGFHYSIVWSTGITMAIVASIETLLSIEAADRIDSKRRITDTNQELKAQGIGNLVSALMGGLPITAVIVRSSANANAGETHKISSILHGLLLLVCVLTIPTMLNQIPLATLAAVLILVGYKLTRPAVFQ

SEQ ID NO: 115438 - protein, 266 aa, Oryza sativa
  Clone ID: PAT_MRT4530_19034C.1.pep
VVVTAPARRPSPLSGSWSSSRRAAALGHRSHGPSSWSPWSSSPAAVVVIVVAARPVVVVRRRQIRPPRPRPNAAGHQVHLPVAAAAAGAPSLRLDLGEGGEGREMENPSYYFEGIVEGSNVYTKDTVDDLDDKQGQGFMSVDDLEEIDIGPGIRPHKQPLRRCKADMLEPVKAEIKRLYDAGFICPCRYAEWVSSIVHVIKKNGKVRLGVAFLKLCQEFNFASFKPINIGFDRALRQLIKLRLLYVHKLPIVLDCSFDIFALPMIG

SEQ ID NO: 115439 - protein, 71 aa, Oryza sativa
  unsure (1)..(71): unsure at all Xaa locations
  Clone ID: PAT_MRT4530_19035C.1.pep
QLFITKINHHMILQQSDTVRYRHVRRDAILELKCQILEEKKSNRVNKKEKERATLCIHPFMXKLILHDRPK

SEQ ID NO: 115440 - protein, 75 aa, Oryza sativa
  unsure (1)..(75): unsure at all Xaa locations
  Clone ID: PAT_MRT4530_19036C.1.pep
GRNQXRSKGVGSERXRRLRRSGRXAAXGXIGEXGXGAREKEXEPRGRSAEEXEQADGDFFGXERERGCDGRERER

SEQ ID NO: 115441 - protein, 157 aa, Oryza sativa
  unsure (1)..(157): unsure at all Xaa locations
  Clone ID: PAT_MRT4530_19037C.1.pep
MREGISIHMRQVGLHACNACWELYCLEHGIQPEGQMPGDKTVGGGDDAYNRLLXETGAGKHVPRAVLDDREPTXVMRRRTGDYRQLYHPEQLINGMEDADXNFARGHXPIGKEIADLRRDRLRKLVNNCTGLQGSLVLCGDGGGTGSALGILLRERV

SEQ ID NO: 115442 - protein, 66 aa, Oryza sativa
  Clone ID: PAT_MRT4530_19038C.1.pep
QVVIPFFSYACYAWASSQSSRCIARNGCSSRSRSQEQPCKSNRFDQISGKFKIQKRINRVTDERNS

SEQ ID NO: 115443 - protein, 78 aa, Oryza sativa
  Clone ID: PAT_MRT4530_19039C.1.pep
LEGPAREKKKKKKKKKKKKKKKKKKKKKKKKKKKKKKKKKKKKKKNFFLGGARDFWGPRLEGVVGGPPKPGGFGGGVF

SEQ ID NO: 115444 - protein, 270 aa, Oryza sativa
  Clone ID: PAT_MRT4530_1903C.1.pep
MENKSSKLKPETNLMCRDHCAGGDENSTRIEAAGASDGVWRWGWPIRLGPLLLWRRQRQPRRSTWTRRGEHLLERALSTPSLFLRYAFPLLMNYMEAEAMRKPVGYLNSCRISQPNHTYTLDERKLPEHIKAMTPEERTTYIGQRHQEKLLDVTTYVAIALQSTQDKECVYAPYAFDAFKRYYQQGGQRKKSRERIFVRNKWPCHKQPVGTVLCGYYTSEFLRGNGKYCANYNELPKFPKSERVSNKALSALGVPSRNPLRFFGGFVRIV

SEQ ID NO: 115445 - protein, 87 aa, Oryza sativa
  Clone ID: PAT_MRT4530_19040C.1.pep
YCHGASSPPLRQINSSDRLLDSLLAASATTASPLRPLAPPPRPLSQPPLPHRGSPHRQPARRRRSEAEAMTDGGGMPSDGGDSGSSF

SEQ ID NO: 115446 - protein, 1130 aa, Oryza sativa
  Clone ID: PAT_MRT4530_19041C.1.pep
MADLPPPPRLMTRRQSDSDWDWDGSSREGSPDPASASAVRRAARRWPDDPGPAQISLHMYMASRDRDRDDDPPPDHARLRIRGRQARLELVMRMAADRHAELHRLSHHRAVSDFPHRNRIHALLRGRFLRNGDDDRRPPSTAATELGQLRQRHSVSGLREEFRFRLENVVRGHAVSQSDDSSAQNVELSINGHTESSPSSSEYNLERHQRTRLNIGLQQIEGTATVSESGSNTPSIAEGLYEPHSQAESWQDDLEQERRDWEQFSHAITGEESEINWHENTYNGSSHEGTEVEGGQDAHIPESHDELASDNLPPQSHGEQQDNSHLPEENEELHDSDLQQSRGEWNEGSNPFIPTEVHNEWHSDDHFQGVNEEWHDDDESNDTADNWHDDNSDQPIDHDSALIRRANTFVPADDDNVYSTELRELLSRRSVSNLLHSAFRENLDRLIRSYVERQGRAPLSWDLEGAPPAPDSPEQSQEQHRDEEEQELHDNVVRPPLVIPPPPIPPRQPLWHSELHRNNWIRQNIHRSDIEWEAINDLRADMARLQQGMSHMQRMLEACMDMQLELQRSVRQEVSAALNRFIGEQGESKETIDDGSKWIHIGALLVCLGVIYGFGVAESVLFGNWDYRRQLLIHFTTDHLNKLIDGIQSSDSEVYTMLRPKPLDYEQRTTLVHVFNNIANQIFGNNNGFPVVEAFGSFTMDLFTPRSDLDLSVNFTANTDDQYARKKKISAIRKFTKVLYSHQRNGIFCGVLPVVTARVPIVNVIDRGTGIECDITVENKDGMTRSMIFKFISSLDPRFQILSYLVKFWAKIHDVNSPRERTLSSMSIVSLVAFHLQQLSHSELMMRFLADGSDFESVERNTLAFKGFGRTNKETVAELFVSLISKLLSAESLWEHGLCASNFEASWISKTWKKGIGNLNVEDFLDRSQNFARSVGKKEMQKICRCLRDCALNLLDFMRGKLDTSKLKTLLFGCLKPDELVSKPRLKRGKRKRKPQTSPDSRYGLGKGKHAVHLVGSDQHANSTTAEAPQVVHRHPTQAKASTQCAHKPTPPFVIIPSGFGYSLSLQLPVAPQLSRGLLGRPPPVNLVHLNNGAQLPQQGLLLSLPSQQAAGSNSGVTYAGAQQLQRNEN

SEQ ID NO: 115447 - protein, 1170 aa, Oryza sativa
  Clone ID: PAT_MRT4530_19042C.1.pep
MADLPPPPRLMTRRQSDSDWDWDGSSREGSPDPASASAVRRAARRWPDDPGPAQISLHMYMASRDRDRDDDPPPDHARLRIRGRQARLELVMRMAADRHAELHRLSHHRAVSDFPHRNRIHALLRGRFLRNGDDDRRPPSTAATELGQLRQRHSVSGLREEFRFRLENVVRGHAVSQSDDSSAQNVELSINGHTESSPSSSEYNLERHQRTRLNIGLQQIEGTATVSESGSNTPSIAEGLYEPHSQAESWQDDLEQERRDWEQFSHAITGEESEINWHENTYNGSSHEGTEVEGGQDAHIPESHDELASDNLPPQSHGEQQDNSHLPEENEELHDSDLQQSRGEWNEGSNPFIPTEVHNEWHSDDHFQGVNEEWHDDDESNDTADNWHDDNSDQPIDHDSALIRRANTFVPADDDNVYSTELRELLSRRSVSNLLHSAFRENLDRLIRSYVERQGRAPLSWDLEGAPPAPDSPEQSQEQHRDEEEQELHDNVVRPPLVIPPPPIPPRQPLWHSELHRNNWIRQNIHRSDIEWEAINDLRADMARLQQGMSHMQRMLEACMDMQLELQRSVRQEVSAALNRFIGEQGESKETIDDGSKWIHIGALLVCLGVIYGFGVAESVLFGNWDYRRQLLIHFTTDHLNKLIDGIQSSDSEVSAWDPQVLRAHAECLESEELAALSVNRTLLPILDNLLLQVYTMLRPKPLDYEQRTTLVHVFNNIANQIFGNNNGFPVVEAFGSFTMDLFTPRSDLDLSVNFTANTDDQYARKKKISAIRKFTKVLYSHQRNGIFCGVLPVVTARVPIVNVIDRGTGIECDITVENKDGMTRSMIFKFISSLDPRFQILSYLVKFWAKIHDVNSPRERTLSSMSIVSLVAFHLQQLSHSELMMRFLADGSDFESVERNTLAFKGFGRTNKETVAELFVSLISKLLSAESLWEHGLCASNFEASWISKTWKKGIGNLNVEDFLDRSQNFARSVGKKEMQKICRCLRDCALNLLDFMRGKLDTSKLKTLLFGCLKPDELVSKPRLKRGKRKRKPQTSPDSRYGLGKGKHAVHLVGSDQHANSTTAEAPQVVHRHPTQAKASTQCAHKPTPPFVIIPSGFGYSLSLQLPVAPQLSRGLLGRPPPVNLVHLNNGAQLPQQGLLLSLPSQQAAGSNSGVTYAGAQQLQRNEN

SEQ ID NO: 115448 - protein, 83 aa, Oryza sativa
  Clone ID: PAT_MRT4530_19043C.1.pep
FGKFRTICFGKKKKKKRPPPLNCSRNYKIILKNNLYFFFPKKKQILIKGFYLQGFSTKYFQPFFSRVNYPTFGKKQPLRKSGK

SEQ ID NO: 115449 - protein, 69 aa, Oryza sativa
  Clone ID: PAT_MRT4530_19044C.1.pep
MRKQRHKTKDLLLTARTKDPRSARSTRTKDATQFKVRWSTWLYSLCSFYAHMGLKMKQKLPTQTTVQEA

SEQ ID NO: 115450 - protein, 100 aa, Oryza sativa
  Clone ID: PAT_MRT4530_19045C.1.pep
RWSRGGAASARPGARRRAPPPPRPPPTSSPPPPRDAAASARRPGTRRRAPPPWRPPPTSSPPPPSAAAAAAPPSPARTPHPCSCSSRPPPPPPPSPAAPR

SEQ ID NO: 115451 - protein, 241 aa, Oryza sativa
  unsure (1)..(241): unsure at all Xaa locations
  Clone ID: PAT_MRT4530_19046C.1.pep
RWSRGGAASARPGARRRAPPPPRPPPTSSPPPXPPPPWRPPPTSSPPPPSAAAAAAPPSPARTPHPCSCSSRPPPPPPPSPAAARVACRARPRTDAAAESASAAPRRRAAAANRAKTLRGVGPWLGGVGVERVEARRREGEDGERRADALPAPTTPCARVPPSPRRGESDSRARDDSTATAHTTTLRTTNHAAVDPGISHAGSGHHHHHGAAIARLSLLCLAFAPSITLLVSLAQKEGNLF

SEQ ID NO: 115452 - protein, 66 aa, Oryza sativa
  Clone ID: PAT_MRT4530_19047C.1.pep
RPLVDFPLLSSYPAGRPRARHMYLTCGTVGRSRDGVVPPRRPATGRGRSGGRERRSHAPGGHGSWT

SEQ ID NO: 115453 - protein, 279 aa, Oryza sativa
  Clone ID: PAT_MRT4530_19049C.1.pep
MLLTTTIDRVNRVHCRFIDLLGFPHLATMQHGQQVSIRKIRVDYVAERRPAICWLDFFERFVGWILDWMRERAAAGSVTSGGTTATANEERPRPCPALPPPMTMRRRPGVAPSPSTPGAATNDDEEEEEAARSGATSADNKAARSVAAAIVVICFRCELMCSLWKASVYILGAAGSNIVFMAVLSDSVVLAVHRINSDGTGASRFSEFNAQMSAIARLHHHAAPCCLRPNQARETPADRHKSSFFFILSYTGQGRPLGIEDGKNKGWHDRLVCVLVFTN

SEQ ID NO: 115454 - protein, 117 aa, Oryza sativa
  Clone ID: PAT_MRT4530_1904C.1.pep
TDGQTERLNQILEDMLRACVLDFGKTWDKSLPYAEFSYNNSYQASIQMAPYEALYGRKCRTPLMWDQVGESQVFGTDILREAEAKADSEQIEGREDLTYVERPVKILDTMERRTRNR

SEQ ID NO: 115455 - protein, 72 aa, Oryza sativa
  Clone ID: PAT_MRT4530_19050C.1.pep
TALTTSTMELPKSTSSWHNLVVADHQTQSQVLAPRTPKHLNQNRGTQRKHGLLLLEWRYMNCSCSLLSRFKS

SEQ ID NO: 115456 - protein, 118 aa, Oryza sativa
  Clone ID: PAT_MRT4530_19051C.1.pep
KSTSIFPYGSSNFIILISSSSPLLILISSLISLFLPSKRERAAAGSVTSGGTTATANEERPRPCPALPPPMTMRRRPGVAPSPSTPGAATNDDEEEEEAARSGATSADNKAARSVAAA

SEQ ID NO: 115457 - protein, 50 aa, Oryza sativa
  Clone ID: PAT_MRT4530_19052C.1.pep
MSKLGFEPGWAGSSTRNLTRTRPARAGVATDNAELWKPLAAKATSISRGG

SEQ ID NO: 115458 - protein, 255 aa, Oryza sativa
  Clone ID: PAT_MRT4530_19053C.1.pep
MSSSLSFPSSSPSLSLISLSGAAAVAVGTTPGDLVHRPPHGNLKSSNVLVVFPAPGSGGDVVPVAKLTDHGFYPLLLHHGHRLAAAKCSEFTCGRRLSSHADVFCLGLVLLEVVTGKVPVDEDDDLAEWAQLALSHEWSTDILDVEIVTDRDRHGDMLRLTEVALLCTAVKPEHWPTSAPSHRLVPTATAAAPNHLVPIATAAAPDRHRRRSPPPPQLLPTAATAASIRKAGREIRERERREEEGKERKDDMWVP

SEQ ID NO: 115459 - protein, 129 aa, Oryza sativa
  Clone ID: PAT_MRT4530_19054C.1.pep
MHERPAPSHQLWMREMLGPTRAGRGIRFRRARCVSGRPAPGLKSASARRGGRAPAARLRRYVDRSVVKEEEMYRFGVHPPPPRRSSERRTEVRASERERERGSEYQRLGSTGQATHSLQVPGNRWKGIN

SEQ ID NO: 115460 - protein, 78 aa, Oryza sativa
  Clone ID: PAT_MRT4530_19055C.1.pep
MERTKHGTNTERGRQVMLENRKGVCPYYRHGSTSSLLVELWVKDSTDHCINPNAHKHHTHMGIIRVRIERRLSQYNMG

SEQ ID NO: 115461 - protein, 66 aa, Oryza sativa
  Clone ID: PAT_MRT4530_19056C.1.pep
TTASQTLFSLLYILTINPNHHIAKRLFFSIDYNPLHLSQFQTLYISTFITIYLYLYKYSNNYIITF

SEQ ID NO: 115462 - protein, 45 aa, Oryza sativa
  Clone ID: PAT_MRT4530_19057C.1.pep
DAWADAWADAWGCKPFNPLLGETYEADYPDKGLRFFSEKVLSVDL

SEQ ID NO: 115463 - protein, 36 aa, Oryza sativa
  Clone ID: PAT_MRT4530_19058C.1.pep
MSVSSASTNRAVKGPQRVFNEVVSIGMAHRTLRWIA

SEQ ID NO: 115464 - protein, 66 aa, Oryza sativa
  Clone ID: PAT_MRT4530_19059C.1.pep
KPRKMNLNYRSMGKNIVLLGSNNKVESANRNKNWFYMITLFGLRGAWIWPANPILLGAEYMEQRGS

SEQ ID NO: 115465 - protein, 46 aa, Oryza sativa
  Clone ID: PAT_MRT4530_1905C.1.pep
HHHRRRHEDHQPARPHCAREPPTGLPSWCRLASHRSLGVHEQVWSA

SEQ ID NO: 115466 - protein, 103 aa, Oryza sativa
  Clone ID: PAT_MRT4530_19060C.1.pep
GFFFCRFGANFKPSPPTTTGAGSPGPCPVKKPWKKFPPSCSTDPGGGNFHGPRVLPLHMLSPEIPEPEPMVFFVPLLWVLTEVFIPVQLLKGLPLGCPTLGAL

SEQ ID NO: 115467 - protein, 1831 aa, Oryza sativa
  Clone ID: PAT_MRT4530_19061C.1.pep
MMGSPEGRLVELFGAVKSWMPRRGDHSPPPPLPPPPASQVGAGGGGGAASPQPHDLSRDFWMPDQSCRVCYDCDAQFTILNRRHHCRHCGRVFCARCTANSVPRAPGDAAREDGERIRVCNYCFRRWLEEEAAARRDVAQPSSPVLSPSASAVSIGSDKSSSTARSSAGTNGQMSSYTNVSYTDFPSMAVEGQGECCEREGCAEKQLPAMEPAGGVEPATYVDNTSDPYNFGINRSDDEDDDYAVFHSDSKTQHLQNSDEYFKTVCFDAHQVDCSHVKESVSPMQDTENFIGSVGVDKTGDHIMDNTEECNTRSSSLYSMEMLENEPVDFENNSSLWLPPEPEDEEDDHDGALCDEDDGEDATGEWGYLRSNSFGSGHCRSRDKSAEEHKRAMKDIVDGHFRALVAQLLQAEKVQLVDKSGKQSWLDIVTSLSWEAASILKPDTSKGGRMDPGGYVKVKCLACGRPSDSFVVKGVVCKKNVAHRRMASRKEKPRILILGGALEYQRISNLLSSFDTLLQQETDYLKMAVAKIKAHQPSVVLVEKSVSRYAQDLFLEKNISLVLNIKRPLLERISRCTGAHIVPSIDYVSSQKLGHCDLFHVEKYVEEHGTAGEGGKKMLKTLMFFEGCPKPLGCTILLKGANGDELKKVKHVVQYGVFAAYHLALETSFLVDEGATLPELPLKSPIIVALPDKPSSADRSISTIPILQMPTASSPNDSLQAFDVQTDGSTFNGFQTMDQTMVMCSPEYKSCKKLGAGSAQTESAHFNGQDKNIACLHGMVPWSSTDPLVQQSASSLCHCPSCSRDVVNKKHFEERQPETSGHTLDNDFNALSAHRTNLESVESGHLFAYNSENGDKIRAKLSVPLNVQISLDDDSSKDDSVIKKDEIPASPADNQSILVSLSSRCVWKETVCQRPHLLRIKYYGNFDKPLGRFLRDQLFDQNNNCISCELPPEAHVYCYVHPQGSLTISVRKLAVKLPGEHDGKIWMWHRCLRCPRVIGLPPATKRVVMSDAAWGLSFGKFLELSFSNHAAASRVASCGHSLHRDCLRFYGFGEMVACFRYASIKVHSVYLPPPKLDFTSQHQEWVEQEANEVVDSAELLFTEVLNALHQISEGRPITGSFDGNMKILELRRNIMELEEILQIEKADFTESLKNLLNKEIRKGKPFIDILEVNKLRRQLLFLCYLWDQRLIFIANSGGKYCDTLGGLRVGSRSSDSNDKSVDTNATTKLEKSSKGSEVLSNAKEGSLKQSQSPLHANDKEPNQPDQSNGNSSRIGAGLNGMEDAIAKINHSNSADVKDNLDHQESSIGVRRVLSDGQFPVNADISDTLDAKWRGENGTVPDTSILKPLALLEGSADLKNQAKAVPTNASLSVRSGDTVEDLSSWLKMPYMTFYDSLNTNSGTAPRFGALADYNPVYITLFRELSQQGGARLFLPTGANDVVIPVFDDEPTSIISYALVSPMYCHQMLDENSKNKDGPDSSLPLPVYDSGNFNPFHLFEDFGSADDLASSISGTRGSFVPDLVHLRVPFEDGGPLGKVKYTVTCYYAKSFEALRRSCCPSELDFLRSISRCKKWGAQGGKSNVFFAKSLDDRFIIKQVTKTELESFLKFGLDYFKYLSESISTGSPTSLAKILGIYQVTIKHVKGGKESKMDLLVMENLLFGRNITRLYDLKGSSRSRYNADSSSNKVLLDQNLIEAMPTSPIFVGNKAKRLLERAVWNDTSFLAGIDVMDYSLLVGVDEEKHELVLGIIDFMRQYTWDKHLETWVKSSGILGGPKNAPPTVISPMQYKKRFRKAMSAYFIVIPEQWMPAIINPSKSSSNLCQEDPQNASQE

SEQ ID NO: 115468 - protein, 214 aa, Oryza sativa
  Clone ID: PAT_MRT4530_19062C.1.pep
MAADYDKACAVASLIKSLYVDFVVPNTAGVLVDKVCAAGRLKGVAQFRIRHQVERINSCMMVGRSAQNIVPILFSFIKYCVITVASALHDIPRSQTLEMAYPYKPLGSIWCFQIWSQESPSILRAGTWLYGRRRQMASSLCEQLAYSLLSIGRTACPLGRIIWKSLVPVRRKFFMFLEARSACLTADNLQRRGWHLALVYHLYSNDGETCQLIL

SEQ ID NO: 115469 - protein, 63 aa, Oryza sativa
  Clone ID: PAT_MRT4530_19063C.1.pep
NKMTVHQKLDQLGTIMLNIIPKYESSMFFLCSKIILGIELLKYAPRGYLLHDGHVIIGRNSGD

SEQ ID NO: 115470 - protein, 849 aa, Oryza sativa
  Clone ID: PAT_MRT4530_19064C.1.pep
MKMESFAWLLLILVLFSILEDVRGSKSKPILINCGSDSTTDVDGRRWIGDSSPKNFTLSLPGTVATAPDSDGKETYGDLYKNARIFNASSSYKFIVAAAGSYFLRLHFSQLPTNFSTKESLFDVSANGLKLVSKFNVPAEIYLRNSKINSTSRAIVKEYLLNVTSSNLEIEFSPDAESFAFINAMEIVPVSGNSVFDSVNKVGGYGLKGPFSLGDSAVETMYRICVGCGKIESKEDPGLWRKWDSDENFIFSMSAARAISNSSNISYVSSDDSTSAPLRLYETARVTTESSVMDKKFNVSWSFNVDPDFDYLVRLHFCELEYDKAEQRKFKIYINNKTAAENYDVFAKAGGKNKAFHEDFLDAASPQMDTLWVQLGSESSAGPAATDALLNGMEIFKVSRNGNLAHPTVRIGGFNSAMGKPKRSPKWVLIGAAAGLVIFVSIVGVIFVCFYLRWKKKTSANKTKDNPPGWRPLVLHGATTPAANSRSPTLRAAGTFGSNRMGRQFTVAEIREATMNFDDSLVIGVGGFGKVYKGEMEDGKLVAIKRGHPESQQGVKEFETEIEILSRLRHRHLVSLIGYCDEQNEMILVYEHMANGTLRSHLYGTDLPALTWKQRLEICIGAARGLHYLHTGLDRGIIHRDVKTTNILLDDNFVAKMADFGISKDGPPLDHTHVSTAVKGSFGYLDPEYYRRQQLTQSSDVYSFGVVLFEVLCARPVINPALPRDQINLAEWALKWQKQKLLETIIDPRLEGNYTLESIRKFSEIAEKCLADEGRSRPSIGEVLWHLESALQLHQGLLQSANTDDLSQPELKLSDASCNLGCIEEVEESCRAGSQDVNEEYVDVKIEVP

SEQ ID NO: 115471 - protein, 64 aa, Oryza sativa
  Clone ID: PAT_MRT4530_19065C.1.pep
GRVGFLTNDFNGSQGDNTGFDQFMGNTTSVSSQSYFDASCFTDSGLTYVWIHCAVLQCKKHRNS

SEQ ID NO: 115472 - protein, 81 aa, Oryza sativa
  unsure (1)..(81): unsure at all Xaa locations
  Clone ID: PAT_MRT4530_19066C.1.pep
RRGAAAGFLGXGGATVAPAATGGDRGVLLVARHRAFPRRRRRQRQEGYLLSFRMEDGVWRKEILMEERCQSLDFSGMIFFD

SEQ ID NO: 115473 - protein, 76 aa, Oryza sativa
  Clone ID: PAT_MRT4530_19067C.1.pep
FQRREDRGDGTCTGNKEEGGGFSAAMQCTHKGDSCMLHTKGRTNATKLLDTTNQHTCPWLALSTADTLRHQPSSLG

SEQ ID NO: 115474 - protein, 98 aa, Oryza sativa
  unsure (1)..(98): unsure at all Xaa locations
  Clone ID: PAT_MRT4530_19068C.1.pep
MAEGAPIIYLDPATVAEARRRGDDPRKLEECTKYLMTXHIYGLLPGPPVPIXVXRTHAVCAAGASDGVDRISALPDAILRNIVFRLPGKDAARTAVLF

SEQ ID NO: 115475 - protein, 52 aa, Oryza sativa
  Clone ID: PAT_MRT4530_19069C.1.pep
IWGSTRTSLVILSIVIQYAGTTGGNGSHRRAHGVGEGSRRRGGLGEGECRRS

SEQ ID NO: 115476 - protein, 102 aa, Oryza sativa
  Clone ID: PAT_MRT4530_1906C.1.pep
MVRKANGKWRMCVDFTDLNKACPKDHFPLPRIDQLVDSIAGCELLSFLDAYSGYHQISMAKEDEEKTAFITPFGLRNNVEAYVDDIVVKTKASDSLIDDLRE

SEQ ID NO: 115477 - protein, 60 aa, Oryza sativa
  unsure (1)..(60): unsure at all Xaa locations
  Clone ID: PAT_MRT4530_19070C.1.pep
SSKATASNPLGGSTILEKLSKTNHAVRKAXILGLVRGAHLEGHLTGTTAAPTCCRGVQDA

SEQ ID NO: 115478 - protein, 1654 aa, Oryza sativa
  Clone ID: PAT_MRT4530_19071C.1.pep
MHLYNEWLPPAVADAAAREPAAFSGAVGEARAAWRPDDPDSAYATLKWISVFDLFINAKSDISPEDVHALVELGLEIFHASQNKFVVQIKWGGLLVRFLKKHAKRISLGVQWRPLYDTLIRTHFKRNMGPEGWKVRQQHFETVTSLVRASRSLFPEGAAAEIWSEFSPLLKNPWHNSAFEGIGFLRLFLPANSRNQDHFTTDWIAECLDIWGSVTNCNFWDIQWAAIVARCIKGSISVDWEKFIPLLFTRYLNMFEVPISSGSGSYPFPLNVPRNTRFLFSSKTRTPSKAIAKSICKTHIFVLKNIKFRFYHPSNGGRWTYSLERFLRYLVLYFERRLQHEQFEALDDKHNQFCLGKEERCGFVKVVLKFLDRGQYSKDDSLADTVSIATSILSYVEPSLVLPFVATNFQLALETTTATHQLKNAVTSVAFSGRALILSSLCSSQSDDSSTADTLNDLIVTSLSNALLGMDANDPPKTIATMQLIGSIFSNLATAGFSDDVPAFLQTSYLSEWLDEFFCRLFSVLQNLESSSPINEGYQSSIMSGTFLVEDSPYYFCMLEIVLGKLSKPLFNQSLKKIAKFVNANILPGATSEVGLLCCACVHSYPEETALYLVKPILMTIMSSFEGTPTTGYVGREVPSKIATKATLSPALETALDYYLRVLAIAISYAGPVLLNYRQEFKNIITSSFQAPSWKVNGAGDHLLRSLLGSLVSYYPIDQYKPFSCQPIANIIEPWGCSKAHQDREVEMLNFTPKWHDPSQDELSFANELLEFHFQSALEDLVSICQRKNHSETGQEKEHLKVTLLRIHSALQGVMSCLPEMRPSYKDGKSKVVEPIIFIAGSAGSTVGNSEMREKAAELVHVACRYLLKERTDDSILLALVVRVIDALVNYGSLEYEEWSSHFQAWKLESASIIEPPCNFIIPFHSQGKKRPRWALVDKAHLHNTWRSSQSSYHRYRTNADVSPSSLMVNLMNDLLDLSLHNYETVRSYSGRSLTKLLKRWPSLISNCVLTLTDNLRDSKAPEHTVLGSCNILGTQTVLRHLTTDSVSLSSFIMGILESSHHKSLKCQKAITELFVKYNIRFSGISRRFFKNTECEADKPGFISLVPKINALSFESNSLHWRYNLMANRVLLLLILASRSESDIHSQILSETAGHFLRNLKSQLPHSRMLAISALNTLLQGSPDKASLQDSQQSLDRPEEGSILSTGEILNNIIREDGFMSETLNSLSHVHIISDNDGSSKASYGASSFQSGSDKAITYFYFDFSASWPRTPSWISLVGGDTFYSSFARIFKRLIQQCGMPVISSLQNALEEFLSSKERSRQCVAAEAMAGMLHSDVTGNLESGNNWLILQLQKIMLSPSVESVPEWAACIRYAVTGKERSGSRAPVLREKLLDCLCTPVPQSVATSVLAKRYSFLSVALIEISAPKMSPAEEQYHVKILDELLANMSHPSAQIREAIGVTICIACSNMRLSRLFGHGDSLDVSGDIFHFIIASLKSGRSSVLLDVIIGLIYPVLSLQVREHAAGVLASLMKGIDKDLSKDFRDRSYAQAQRILHTRQRGAKSGHSVATIHGAVLALTASVLSVPYDMPSWLPSHVTLLARFIREPSPIKSTVTKAVAEFKRTHADTWSIQKEAFTEDELEVLRDTSSSSSYFA

SEQ ID NO: 115479 - protein, 58 aa, Oryza sativa
  Clone ID: PAT_MRT4530_19072C.1.pep
MNAREHDLRGGASMEAIHLGLGFHPKSHIGWRELTTQQHSQEQVQHRGVIVVNPKTSS

SEQ ID NO: 115480 - protein, 349 aa, Oryza sativa
  Clone ID: PAT_MRT4530_19073C.1.pep
LIREAIGVTICIACSNMRLSRLFGHGDSLDVSGDVSMTEQTGSENWSKQLTDGATELSISIQNNISKQLESTPDSVTENGLDKKEEADVKRMETIFHFIIASLKSGRSSVLLDVIIGLIYPVLSLQDRPGKDLSLLAKSAFELLKWRILQRPFLETAIMTILSSANDPNWRTRSALLSYLRTFTYRHTFILSSSEKSQIWQTIEKLLVDSQVEVREHAAGVLASLMKGIDKDLSKDFRDRSYAQAQRILHTRQRGAKSGHSVATIHGAVLALTASVLSVPYDMPSWLPSHVTLLARFIREPSPIKSTVTKAVAEFKRTHADTWSIQKEAFTEDELEVLRDTSSSSSYFA

SEQ ID NO: 115481 - protein, 64 aa, Oryza sativa
  Clone ID: PAT_MRT4530_19074C.1.pep
LVLLLSVFSRFSTDSITYSVIDFNLDGFPHVLLAYCFLHVTFFMIVLHNYILLVSIHLSNSQEV

SEQ ID NO: 115482 - protein, 297 aa, Oryza sativa
  unsure (1)..(297): unsure at all Xaa locations
  Clone ID: PAT_MRT4530_19075C.1.pep
MQHSCAISSFRVLRXLVLXGLQFHRGNTRNSWKHIGMLLHPETLGIHRHAXFHQLPEEIGQDLSXLQXLXLYGLTLEEVPFSVGLMTHFLCLRVDAGTRVPSGLIGNLTSLQELWIYPAMKDYSMGFATARQFVNDLGKLKELRVLKTRIHGWNESIEISLVGSLHNFDKIQLLELDGESYLGKGVTWETGFVSSQHLRYLSLACMQLTRLPPWINSLLLPNLSCLVVNVQFWQEQDMETLGRLPELCNLELQSSNVGIDAPTIMPSLEYLQFMVHVRFLKDANIGFDKLVSENLPS

SEQ ID NO: 115483 - protein, 145 aa, Oryza sativa
  Clone ID: PAT_MRT4530_19076C.1.pep
MQTQGRESLGIAGTQAPASAPASPRRYRLPSDETPTGNAASSTSFASARTPPPLSSPSIRCLGSIVGEAPPLTPLAVGAEHRPRSSPHRFHPNRARDNEVAAIEECEQEPKTCEEFTEQDIDAGNEMPSDEYFAPGTGGFEDGSF

SEQ ID NO: 115484 - protein, 238 aa, Oryza sativa
  Clone ID: PAT_MRT4530_19077C.1.pep
MAASCHEVEVPGKPTETGTALLEAATGSIQGFGPVNQIHQHLCAFHFYADDMTRQVEAHHFCAHLNEDMRQCLIFDGPDAGARLIGVEYIVAEPLFLTLPDDEKPLWHTHEFEVKGGVLFMPGVPGVVERRDLERVCKTYGKTIHFWQVDRGDALPLGLPQIMMALTRDGQLRQELAKCVEEKFSVSFDKERENRAYMSGPDHGIHPLANAAGKGLKTDLREVDLPAMTTAHAGRVFT

SEQ ID NO: 115485 - protein, 144 aa, Oryza sativa
  unsure (1)..(144): unsure at all Xaa locations
  Clone ID: PAT_MRT4530_19078C.1.pep
VTLLGQPGLRLESSPSPXLPWVATXTGATLASPDLXSMVHTRARRRPPPPPQPSRVSATSSRHWSSHTLTPSSSHTSLNPLKPLKNKSPPKKQNKYTSKKTHTKINQKSKNIPSKITTKISLLATKRREEEEDEARRRGAARAK

SEQ ID NO: 115486 - protein, 88 aa, Oryza sativa
  Clone ID: PAT_MRT4530_19079C.1.pep
QPALGVERLVARGQLSLYRVEVFCDLLVQVRLGRRHLAITARVPQNHPSLLRWCPKPPPPPPPLSPPPERPSRRHPPPKPYPRRPSIR

SEQ ID NO: 115487 - protein, 72 aa, Oryza sativa
  Clone ID: PAT_MRT4530_1907C.1.pep
YNIVVQIYAIWMWLRHIYSKLYMYTRFLFQKKKKKKKKKKKKKKKKKKKKKKKKNKNKGTKLTNARQATKVA

SEQ ID NO: 115488 - protein, 181 aa, Oryza sativa
  Clone ID: PAT_MRT4530_19080C.1.pep
PLFSPASPAASGKHSSSVAAGSRGTAAGAWTRDSGGGLDDGGGGLDSGCGGGWRGLDAAGSRGTAAAAGRAAAGAAGCMAAAGGWMRDSGGWMRDAGGRLDARRRRQPRLATTTTGWMGDGDDGGDDDGGLDGRRRRPAAGWMHDGGGGLYWRRRWRAGWARTTKRCFFSPIIPLLNQRLD

SEQ ID NO: 115489 - protein, 113 aa, Oryza sativa
  Clone ID: PAT_MRT4530_19081C.1.pep
MFFNKNGPSSFDVVEIFDKLRAAPDTYFKNIKEAGCMGASMALAMTKSLYPKIDIDAVDGFADGTSEEHALDLIDDAQKIADKIAADVVEGFQDNNLGPTGSDDFDDEKTESY

SEQ ID NO: 115490 - protein, 54 aa, Oryza sativa
  Clone ID: PAT_MRT4530_19082C.1.pep
SYSVAVPLLGGGGRVDFFNSTKYQLLYFKQNIIYNYPSTINLNFQKKFDKQYYL

SEQ ID NO: 115491 - protein, 391 aa, Oryza sativa
  Clone ID: PAT_MRT4530_19083C.1.pep
MHPLCALPLLITLLLISSVPLSVQESDAFFRYTNCTTASYQCGSLKLDVDYPFSANGVDRPNYCSYPGYRLICNPDNKLMIHMNSTVFQVTDIDYGNKFLAVIDQTQPQETCPDRYHNTTIDESRFMYTDLDQFLTVYVNCSAKSSSLPFIYDLLSCVSGGSSYYRLHKNKDDSLESDILGSCSSSFVVPFNSTMAGSLAAGNSSLVDVIRGGFTARWKVGVGYRIMFFIRYRLYLLTNLRASQGSKISKKKAIAIGVSVVSGVILLFLLLMCTLCVKKFWHGLLSSMGKSKEAPNIESFLQKHEAQHPKRYSYSEVKTMTKSFSHKLGQGGFGTVYMGKMPNGKPIAVKLLKSCKDDGQEFMNEVASISRTSHVNVVTLLGYCIVEIIDI

SEQ ID NO: 115492 - protein, 952 aa, Oryza sativa
  Clone ID: PAT_MRT4530_19084C.1.pep
MPPLLFHLLVLSVVVVVVSGGAATAGGGTYDDAICARPIFCGEQVEIKYPFYLSNTTDQVVVVDGNTRYCGYPWLGIICDHDRAILRLGNYNYTVLEINHGNHTVTVADSDALDGGDCPRVKHNVTLPEVLTFPSPGNDSITFFFDCNSTANVVLRPPPYIRPINCSTFDFPGRRDTAPSFVATQPDVAGETEWLGLCKEVVMVPVLKDWLMNEKYYGKLGDDGYGAVLKRGFQLSWDPTAGMCHECEVSGGRCSYGTKNEFLGCLCSDGHVSKTDCVHHTFEKMHPLCSLPLLIIILLSSVPPSMQESGAYFRYTNCTPASYQCGSLKFDVDYPFSANGVHRPDYCSYPGYRLICSPDNKLMIHMNSTAFQVTDIDYGNKFLAVIDQTQPQEACLDRYHNTTIDESKFMYTDRDQFLTVYVNCSANFSSLPLIYDLVSCVSGGSSYYRLHKNKDDSLESDILGSCSSTIVVPCNSTMAGSLAAGNSSLADVIRGGFTARWKVGLGWCSDCKASGGHCGFNGSFPDQYTCYCPYGQAIGSCSSSGSKKSKKKAIAIATSIASGVLFLLLLVVSFFYVRKRKHKKVNSSSKLLKYSGSGGTPRSMGGDMESGSVKDLQTHLFSYEELEEATDSFNENRELGDGGFGTVYKGILRDGRVVAVKRLYNNSCRRVEQFVNEAAILSRLRHPNLVLFYGCTSSRSRELLLVYEFVPNGTVADHLHGHRAPERALTWPLRLNVAVEAAAALAYPPRPEPAPIVHRDVKTTNILLDADFHVKVADFGLSRLFPLDVTHVSTAPQGTPGYVDPEYHQCYQLTDKSDVYSFGVVLVELISSKPAVDITRQRNEINLAGMAINRIQKSQLEELVDLELGYESDPATKKMMTMVAELAFRCLQQNGEMRPPIKEVLEGLKGVQDLCVMEKDGGKDKKGPDPPLSPDTVHAQWDSRQTTPNTSQ

SEQ ID NO: 115493 - protein, 63 aa, Oryza sativa
  unsure (1)..(63): unsure at all Xaa locations
  Clone ID: PAT_MRT4530_19085C.1.pep
FFFFFFFXFFFFFLEVGWLFLGFVRDSCSGDLSSSPPAPATPSPTPATPTKAMELGFRVPGWD

SEQ ID NO: 115494 - protein, 112 aa, Oryza sativa
  Clone ID: PAT_MRT4530_19086C.1.pep
MAPPIASRFAKATSLSHFICISARRASGATTMGDQRGCSPGEGRRREPAAEAAVFGDSVAGVRPQILITGTPSRLRPPPSTPEHRAPGRPPVRGGGMVSGEAATHRPRRPSC

SEQ ID NO: 115495 - protein, 692 aa, Oryza sativa
  Clone ID: PAT_MRT4530_19087C.1.pep
MAAAVSAPLLRFHHHHRCLLRHSSSPRRYPAGFSRGLSSVSFGLPRSTTTAARSTASPSAPSAAAAEATDAASAQAGSDGKGDGIGEEERVVLPTNESSDRLLRIRHTVLAFCCLPFLTSLPVINLCAHVMAMAVQKLFPNSKVTIGPWIDNGFYYDFDMEPLTDKDLKRIKKEMDRIIRKNLPLVREEVSREEAQKRIEALNEPYKLEILEGIKEDPITIYHIGEEWWDLCAGPHVESTGKIDRRAVELESVAGAYWRGDESNQMLQRIYGTAWETEDQLKAYIHFKEEAKRRDHRRLGLDLDLFSIQEDAGGGLVFWHPKGAIIRHVLEDSWKQIHLQRGYDLLYTPHVAKAELWKVSGHIDFYKENMYNQMDVEDELYQLRPMNCPYHILVYKRKLHSYRDFPIRVAELGTVYRYELSGSLHGLFRVRGFTQDDAHIFCLEDQIKDEIRGVLDLTEQILGQFGFRYYEINLSTRPEKSVGSDDIWEKATLALKDALEDKGWEYKVDEGGGAFYGPKIDLKIEDALGRKWQCSTVQVDFNLPERFDITYVNSNSEKKRPIMIHRAILGSLERFFGVLIEHYAGDFPLWLAPIQARILPVTDNELQYCNEVASELKSKGIRAEVCHGERLPKLIRNAETKKVPLMAVVGPKEVQARTLTIRSRHSGEIGTMPVDEFFRRIQLAIANKSSSL

SEQ ID NO: 115496 - protein, 117 aa, Oryza sativa
  unsure (1)..(117): unsure at all Xaa locations
  Clone ID: PAT_MRT4530_19088C.1.pep
FSFTRTEKKQAKCGEAAARYARETAQARERWKXAYDVFKKAGTGLQSQLSRTFSRKKAAQTPKGGGGRGCILPSSGEHGGGRKKNLTDMMPSLXDNPDNEEGFNLEIGYTGPRKNMP

SEQ ID NO: 115497 - protein, 82 aa, Oryza sativa
  Clone ID: PAT_MRT4530_19089C.1.pep
ENAFFFKTGVKKRMLTRPFWRLGGRWPFSLVVSRVPWGAAIFFAGICTVFFSIMGGPFPWGLENVGFFFCSFPPRHLTLWGF

SEQ ID NO: 115498 - protein, 120 aa, Oryza sativa
  unsure (1)..(120): unsure at all Xaa locations
  Clone ID: PAT_MRT4530_1908C.1.pep
HSFQPILAIDKSTDPTPLTAETPGTGRQDRPRTSSLYGRGATIKTIHPEPSLKPXLRILNRGGDDVTCLARFPKRRLQPPRRADLPKLQRLHDQRKIKGFYSNKLHITXRTKNKNGFLTS

SEQ ID NO: 115499 - protein, 62 aa, Oryza sativa
  Clone ID: PAT_MRT4530_19090C.1.pep
GQAMEFKCRYKKGKATLAPLKKPASFKGPALFFFFWFFFFFFGFFFFYFLSHASADAWADAW

SEQ ID NO: 115500 - protein, 121 aa, Oryza sativa
  Clone ID: PAT_MRT4530_19091C.1.pep
MPIPATLSGTRTTTSTATAPPHSPTPWTTASTATTELEFGELYHNGQIQPRTLSPPPNLDPDSDDDDDCCPVPVRGCEPSSRSGSAHHTHKVHVVALDLGWALLHSAGSEELAAKASHEDP

SEQ ID NO: 115501 - protein, 266 aa, Oryza sativa
  Clone ID: PAT_MRT4530_19092C.1.pep
MSSSNRTAVLNTSISSVSSRPTTPSRRSSTVVAPKQSIAASRPVPARSSTPVKTRPSTPTKTRPSTRAMPNSSSGAIPAMSRPGASTISATSRSNASTISATSRPGSSSSNVPGISRATSLSSSTVPSMSRSSSRSSTPTRQPAMRSSAPAVGRSPSVGRSSSISSLTSSINRPAANGGRNSAPSSAPSSRPSSPGPRPRAPVRPLDIRPGMALGVRSTSNTEPSAASAPVKKVSVPSKVSRPATGTDNGFGMTMSKKSLDMAIRH

SEQ ID NO: 115502 - protein, 577 aa, Oryza sativa
  unsure (1)..(577): unsure at all Xaa locations
  Clone ID: PAT_MRT4530_19093C.1.pep
MEDLLGAEVGKNDYDWLLTPPGTPRCPVLEVAEKTPSPNILPKRTATRSSSTTRASRLSVSQTENGHSTAPTRPARSNSVTRPSIQSTLMSSSNRTAVLNTSISSVSSRPTTPSRRSSTVVAPKQSIAASRPVPARSSTPVKTRPSTPTKTRPSTPVRTRQTANSTSDSAAARTTSAQNSRPSTPTSRSRAMPNSSSGAIPAMSRPGASTISATSRSNASTISATSRPGSSSSXSNGGRNSAPSSAPSSRPSSPGPRPRAPVRPLDIPDFPXETPPNLRTKLPERPLSAGRSRPGMALGVRSTSNTEPSAASAPVKKVSVPAMSRSKFSDAPSRTPTLTNGRQNRQSERSTVDSQPSKVSRPATGTDNGFGMTMSKKSLDMAIRHMDIRQNLGGIRGASLFPHSIRSTAGKGRPARMSDPGHTISNGDHRHYADNGSTNGHFSGDSNGALSRNGGSSTDSPDRGSIGGKETLSELDMYGSSRYEAMLLREDVRNTSWLHGFDDSKPDQSPLFDHRFYTLFPWVQYSAVNERSSCIKQYPVTSHILEPCVKLAAASITHASDPCDKTRDGASCWDGTA

SEQ ID NO: 115503 - protein, 143 aa, Oryza sativa
  Clone ID: PAT_MRT4530_19094C.1.pep
PRVRPRVRLGGIRGASLFPHSIRSTAGKGRPARMSDPGHTISNGDHRHYADNGSTNGHFSGDSNGALSRNGGSSTDSPDRGSIGGKETLSELDMYGSSRYEAMLLREDVRNTSWLHGFDDSKPDQSPLFDHRFEPLPEPFSPL

SEQ ID NO: 115504 - protein, 74 aa, Oryza sativa
  unsure (1)..(74): unsure at all Xaa locations
  Clone ID: PAT_MRT4530_19095C.1.pep
QLTGXHGNGCLGNSSDFLRNEHKHYPSAXGFLNAQKMFRXXWCTLEFLKRQKXCYRXFLRXAWHWKTSSTSCCT

SEQ ID NO: 115505 - protein, 77 aa, Oryza sativa
  unsure (1)..(77): unsure at all Xaa locations
  Clone ID: PAT_MRT4530_19096C.1.pep
HNCYKYSPLTHMVXXIYRNLXPPHFCPPITQVFPNSQKRNLERPTTTLPAFCNVDIPNGTAGVCYWLGYPRTPKPAP

SEQ ID NO: 115506 - protein, 281 aa, Oryza sativa
  Clone ID: PAT_MRT4530_19097C.1.pep
MSLRALGSLLTCRRFSPRAQAQAEAESSLGIFTQATAGRSARSLRALVKSPSVSPGSQIENFISCVHSQLMCSHLCMIQRDLAVGDGGAYGVVATIALAGLATILYFNESTDKSGEDVCDRGAVKEPYPYLSKEAAIKAGFVDKDGTVQWASYLDHEASAKEVSDWEEAVKQQDVKVDEATMKARFQDWMKEHNRSYSTEEEKARCYEIFKETAIRADKANAVRPMDVPFAPNGFADWTDEECNSLYSHPGSFDWERYIDHMNTMNANGGYIGNQDCKEGI

SEQ ID NO: 115507 - protein, 323 aa, Oryza sativa
  Clone ID: PAT_MRT4530_19098C.1.pep
MAAHTIKLAVAVTCTLLLAAACSGLEVGYYKKSCPRVETIVREEVKKFVYKNAGIGAGLIRLLFHDCFVEGCDGSVLLDPTPANPAPEKLSPPNFPSLRGFEVIDAAKDAVEKACPGVVSCADIVAFAARDAAYFLSRMRVKINMPAGRFDGRHSNSSDALDNLPPPFFNVTELVDIFATKGLDAEDMVVLSGAHTVGRSHCSSFVPDRLAVASDIDGGFAGLLRRRCPANPTTAHDPTVNQDVVTPNAFDNQYYKNVVAHKVLFASDAALLTSPATAKMVSDNANIPGWWEDKFAKAFVKMASVGVKTGYPGEIRRHCRVVN

SEQ ID NO: 115508 - protein, 493 aa, Oryza sativa
  unsure (1)..(493): unsure at all Xaa locations
  Clone ID: PAT_MRT4530_19099C.1.pep
MRLPLFLRCSSRFRSRSAIASVALLLENSPWLQTHDSPFLQSLQTSWHQWSGGSCPGDFPFSGSLSIVLHVLTLCILEPDDLAHLEASSATCSFFRKPANFPPDFQLSMSELAALDMCQKRAIFKPMTQQEREMFKQRXGGSWKLVLSGLLAGEACCRRVQAAAGAGRTMLVSDAGRVYAFGKDSFGEVEYAAQGSRVVTTPQLVESLKDIYIVQAAIGNFFTAVLSREGHVYTFSWGNDMKLGHQTEPNDVQPHLLAGPLENIPVVQIAAGYCYLLALACQPSGMSVYSVGCGLGGKLGHGSRTDEKYPRLIEQFQALNIQPVVVAAGAWHAAVVGKDGRVCTWGWGRYGCLGHGNEECESVPKVVESLVNVRAVHVATGDYTTFVVSDKGDVYSFGCGESSSLGHNTITEGNNRHTNVLSPELVTSLKRTNERVAQISLTNSIYWNAHTFALTDSGKLYAFGAGDKGQLGTELVAQESERGTPERVEIDLS

SEQ ID NO: 115509 - protein, 119 aa, Oryza sativa
  Clone ID: PAT_MRT4530_1909C.1.pep
VKFSRHFFLLAREVLHSGNFILTTYSSNMLKTLGGIKKNALVLLNNLLFFFFLWKRLLLISIDKRVLLVPAPGLQQVDAVVFFLLLSHDLHILLQLPWLLHLHHLLPPFVKATPGLCGG

SEQ ID NO: 115510 - protein, 159 aa, Oryza sativa
  Clone ID: PAT_MRT4530_190C.1.pep
QDRQNHHDENHHGQRAQDDNGRGRRCQADRRRRDSHSPDPQRDREQGCRPRGQSPNPSDPSSSLSSSSAASGSRTPRGHRPPHIPEEGCMAFTPTLREVRWPEKFRPGAKEKYNGSTDQEEFLRVYSTVLYAIRRPRSLYNSRVGNKTGHLRSQVVRDH

SEQ ID NO: 115511 - protein, 129 aa, Oryza sativa
  Clone ID: PAT_MRT4530_19100C.1.pep
MAAEVSKVLERGRMAMAMAIGRISTQPCKEITLQIELTRTASEGRIGGDHFLHLFELAFFTSGHVSLSLRCPGSDTCHNIGQIQARGTGVPSSISTDLIMIHINDFVCRQDNLYTNETRSAADEGMRPS

SEQ ID NO: 115512 - protein, 421 aa, Oryza sativa
  unsure (1)..(421): unsure at all Xaa locations
  Clone ID: PAT_MRT4530_19101C.1.pep
FSGGLLGGPPPFFFPGKKPGKKGPKLGPRFFPPKINPNFKRGGPGKKTPNPKGGPPPLGFWKFGVLPKFKFQNFPFWGGKKRGKKKPXXSPFPRXFGXPXXKXNXFAPXGAXNPGXKGXKKFPPXKFSXPXILGXGFGXKFWGGXNPGXPKXXPFLKGXKGXXGXXFWGGAXXXKFGXPPRXFSPGXPFWGFFPGXPPXGGGPPXKTPPRXFFPPXPXGGXPXXKKGGGPPXGEKRXPXKGXPPXGXPPPGAPPPFFFPXKPXXXKXGGGFXPGXPPXGXPPPKXFXGGGAPPXKPPPPPQKXXKKKKXAPPPPXNPPPFFPPPGGGAPKXPXKKXGXKKNXXGGGGXGGKNPGEKXPPXGGXLGGFFXXPFFFFPPPPPRGGGFFXXGXGGGXGXKKKXPPPPGGGGGGGGPPPPGEKKK

SEQ ID NO: 115513 - protein, 89 aa, Oryza sativa
  Clone ID: PAT_MRT4530_19102C.1.pep
LVLDRERPPAIYLYCQGLRGQQQGNFIHLNPGIQPQQQAQHMFVPLLEQQPVINGFHPYDFHLAQLIQHNENIALQRNIAYGTYPYYRR

SEQ ID NO: 115514 - protein, 221 aa, Oryza sativa
  Clone ID: PAT_MRT4530_19103C.1.pep
HPAGRGGRGEGPAACEAAVVTGEAVAVAMTRETRSPQPHRGIASQSTKMNDGGVVCGHEVSSICGAVEHEDGEAVLVEYVHHRTDCRPDHPMDPPLCTAHVTCTNAQPNYMETLLPSSSAQRRAEELGALGFLALGHKMGGDPGRRWWVAPPPWGFGGAGGDEADGVGDDELAAALPAVGHHAHPLLIFSRVERTNVPMMVTLCSRLCDIDARGSAFRQRW

SEQ ID NO: 115515 - protein, 82 aa, Oryza sativa
  Clone ID: PAT_MRT4530_19104C.1.pep
MGAGIAAMTNPSRQEVEVEVKAKSCRSPSPISNSGDTPFPVPRSPSGTPIHHHPLRTDGTPFPSLAAKEGPPAASSAKPAME

SEQ ID NO: 115516 - protein, 2027 aa, Oryza sativa
  Clone ID: PAT_MRT4530_19105C.1.pep
MAEQGKAHDLSPSVSGDDGEPNPRRRARTPPPPPRQSPKQGEALEKVDKSVASPVAGGAGGRQDGERRLLVYGDGGTPQGALQAAGALLRHPPVVHDPESPAQRWLEDVANLVMTAQQRLGAGGRSATTKTSGAATTGSVSSRRRARRAAAAARHSAATPSSTPSTREDQHGEPDARLNIERRRNGRRTPRATEGASSSRVSPRHGREDQPSVPPAGGVGCRAFVASLRNVRWPPRFRPTITEKYDGSVNPTEFLQVYTTGIEAAGGDDRVMANFFPMALKGQARGWLMNLPPASVHSWEDLCQQFTMNFQGTYPRPGEEADLHAVQRGDDESLRSYIQRFCQVRNTIPCIPAHAVIYAFRGGVRHNRMLEKIASKEPQTTAELFQLADRVARKEEAWTWNSSGSGVAASAAPGSAAQTGRRDRRRKKRSDRSGDEGHVLAVEGAPRATRKGRPASDKKKEAGTPSRERPAGKWCSVHNTSLHDLADCRAVKNLAERTRKWEEDRRQERREGKSPAVPSGKRRSEAKQKAPAVDIDDGDDDLGFQEPGATIATVDGGACAHVSRRSFKAMKRELLAMAPTHEAMRRARWSEVALTFDQTDHPPCIARGGQVAMVVSPTICNVKLGRVLIDGGAALNILSPAAFDAIKAPGMVLRPSQPIIGVTPGHTWPLGHIDLPVTFGGPANFRTERVSFDVADLSLPYNAVLGRPALVKFMAAVHYAYLQMKMPGPGGPISVHGDLKVALACMEQRADRLAAASKPEGGDERLGPSAPTAPRQRIATCDEVPEDALVSFLRANADVFAWRPADMPGVPREVIEHRLAVRPGARPVRQKVRRQAPERQAFIREEVARLLEAGFIREVIHPEWLANPVVVPKANGKLRMCIDYTDLNKACPKDPYPLPRIDQIVDSTAGCDLLCFLDAYSGYHQIRMAREDEEKTAFITPVGTYCYTSMPFGLKNAGPTFQRTTRISLGSQIGRNVEAYVDDLVVKTRNQETLLSDLAETFENLRSARIKLNPDKCVFGVPAGKLLGFLVSARGIEANPEKIRAIERIRPPSKLRDVQCVTGCMAALSRFISRLGEKALPLFKLLKRLGPFTWTEEAENALAQLKAYLSSPPVLVAPEPNEPLLLYLAATPQVVSAALVVERDEDNPHSAHPHSVPTWPGSRQGGEAPESNGGLRPLTTGVGPLPACQTVLGAPDPQEGPEATEGRPHLSPFGPEANPVLTRPGREQGEEAPEPNGGQRPLTTGVGPLPACPTMPGAPDPQDGPEATEGRPPLSSSDPEVIGTEDKCAPKGHLNEKRPRDTAPSEEDRPRRKVQRPIYFVSEALRDAKTRYPQAQKMLYAVLMASRKLRHYFQAHRVTVVTSYPLGQILHNREGTGRVVKWAIELSEFDLHFEPRHAIKSQALADFVAEWTPAPETVSMPEASTNPSQLPQTAHWVMQFDGSLSLQGAGAGVTLTSPNGDVLRYLVRLDFRATNNMAEYEGLLAGLRVAAGLGIRRLLVLGDSQLVVNQVCKEYRCSDPQMDAYVRQVRRMERHFDGIELRHVPRRDNMIADELSRLASSRAQTPPGAFEERLTQPSARPDPLGETDAPDRPPRPVGVQASGPEGSAPSSLRLIAWISEIQTYLTDKTLPEDREGSERVQRISKRYVLVEGTLYRRAANGILLKCIPQEQGVELLADIHEGECGAHSASRTLVGKAFRQGFYWPTALNDAVDLVRRCRACQFHAKQIHQPAQALQIIPLSWPFAVWGLDILGPFKRAPGGFEYLYVAIDKFTKWPEAYPVVKIDKHSALKFIKGITARFGVPNRIITDNGTQFTSELFGDYCEDMGIKLCFASPAHPRSNGQVERANAEILKGLKTKTFNILKKHGDSWIEELPAVLWANRTTPSRATGETPFFLVYGAEAVLPSELTLRSPRATMYCEADQDQLRRDDLDYLEERRQRAALRAARYQQSLRRYHQRHVRARSLCVDDLVLRRVQTRAGLSKLSPMWEGPYRVIGVPRPGSVRLATGDGTELPNPWNIEHLRRFYP

SEQ ID NO: 115517 - protein, 1765 aa, Oryza sativa
  Clone ID: PAT_MRT4530_19106C.1.pep
MAEQGKAHDLSPSVSGDDGEPNPRRRARTPPPPPRQSPKQGEALEKVDKSVASPVAGGAGGRQDGERRLLVYGDGGTPQGALQAAGALLRHPPVVHDPESPAQRWLEDVANLVMTAQQRLGAGGRSATTKTSGAATTGSVSSRRRARRAAAAARHSAATPSSTPSTREDQHGEPDARLNIERRRNGRRTPRATEGASSSRVSPRHGREDQPSVPPAGGVGCRAFVASLRNVRWPPRFRPTITEKYDGSVNPTEFLQVYTTGIEAAGGDDRVMANFFPMALKGQARGWLMNLPPASVHSWEDLCQQFTMNFQGTYPRPGEEADLHAVQRGDDESLRSYIQRFCQVRNTIPCIPAHAVIYAFRGGVRHNRMLEKIASKEPQTTAELFQLADRVARKEEAWTWNSSGSGVAASAAPGSAAQTGRRDRRRKKRSDRSGDEGHVLAVEGAPRATRKGRPASDKKKEAGTPSRERPAGKWCSVHNTSLHDLADCRAVKNLAERTRKWEEDRRQERREGKSPAVPSGKRRSEAKQKAPAVDIDDGDDDLGFQEPGATIATVDGGACAHVSRRSFKAMKRELLAMAPTHEAMRRARWSEVALTFDQTDHPPCIARGGQVAMVVSPTICNVKLGRVLIDGGAALNILSPAAFDAIKAPGMVLRPSQPIIGVTPGHTWPLGHIDLPVTFGGPANFRTERVSFDVADLSLPYNAVLGRPALVKFMAAVHYAYLQMKMPGPGGPISVHGDLKVALACMEQRADRLAAASKPEGGDERLGPSAPTAPRQRIATCDEVPEDALVSFLRANADVFAWRPADMPGVPREVIEHRLAVRPGARPVRQKVRRQAPERQAFIREEVARLLEAGFIREVIHPEWLANPVVVPKANGKLRMCIDYTDLNKACPKDPYPLPRIDQIVDSTAGCDLLCFLDAYSGYHQIRMAREDEEKTAFITPVGTYCYTSMPFGLKNAGPTFQRTTRISLGSQIGRNVEAYVDDLVVKTRNQETLLSDLAETFENLRSARIKLNPDKCVFGVPAGKLLGFLVSARGIEANPEKIRAIERIRPPSKLRDVQCVTGCMAALSRFISRLGEKALPLFKLLKRLGPFTWTEEAENALAQLKAYLSSPPVLVAPEPNEPLLLYLAATPQVVSAALVVERDEDNPHSAHPHSVPTWPGSRQGGEAPESNGGLRPLTTGVGPLPACQTVLGAPDPQEGPEATEGRPHLSPFGPEANPVLTRPGREQGEEAPEPNGGQRPLTTGVGPLPACPTMPGAPDPQDGPEATEGRPPLSSSDPEVIGTEDKCAPKGHLNEKRPRDTAPSEEDRPRRKVQRPIYFVSEALRDAKTRYPQAQKMLYAVLMASRKLRHYFQAHRVTVVTSYPLGQILHNREGTGRVVKWAIELSEFDLHFEPRHAIKSQALADFVAEWTPAPETVSMPEASTNPSQLPQTAHWVMQFDGSLSLQGAVDLVRRCRACQFHAKQIHQPAQALQIIPLSWPFAVWGLDILGPFKRAPGGFEYLYVAIDKFTKWPEAYPVVKIDKHSALKFIKGITARFGVPNRIITDNGTQFTSELFGDYCEDMGIKLCFASPAHPRSNGQVERANAEILKGLKTKTFNILKKHGDSWIEELPAVLWANRTTPSRATGETPFFLVYGAEAVLPSELTLRSPRATMYCEADQDQLRRDDLDYLEERRQRAALRAARYQQSLRRYHQRHVRARSLCVDDLVLRRVQTRAGLSKLSPMWEGPYRVIGVPRPGSVRLATGDGTELPNPWNIEHLRRFYP

SEQ ID NO: 115518 - protein, 2027 aa, Oryza sativa
  Clone ID: PAT_MRT4530_19107C.1.pep
MAEQGKAHDLSPSVSGDDGEPNPRRRARTPPPPPRQSPKQGEALERVDKSVASPVAGDAGERRDGERRLLVYGDGSTPQGALQAAGALLRHPPVVHDPESPAQRWLEDVANLVMTAQQRLGAGGRSATTKTSGAATTGSVSSRRRARRAAAAARHSAATPSSTPSTREDQHGEPDARLDIERRRNSRRTPRATEGASSSRVSPRHGREDQPSVPPAGGVGCRAFVASLRNVRWPPRFRPTITEKYDGSVNPTEFLQVYTTGIEAAGGDDRVMANFFPMALKGQARGWLMNLPPASVHSWEDLCQQFTMNFQGTYPRPGEEADLHAVQRGDDESLRSYIQRFCQVRNTIPCIPAHAVIYAFRGGVRHNRMLEKIASKEPQTTAELFQLADRVARKEEAWTWNSSGSGVAASAAPGSAAQTGRRDRRRKKRSDRSGDEGHVLAVEGAPRATRKGRPASDKKKEAGTPSRERPAGRWCSVHNTSLHDLADCRAVKNLAERTRKWEEDRRQERREGKSPAVPSGKRRSEAKQKAPAVDIDDGDDDLGFQEPGATIATVDGGACAHVSRRSFKAMKRELLAMAPTHEAMRRARWSEVALTFDQTDHPPCIARGGQVAMVVSPTICNVKLGRVLIDGGAALNILSPAAFDAIKAPGMVLRPSQPIIGVTPGHTWPLGHIDLPVTFGGPANFRTERVSFDVADLSLPYNAVLGRPALVKFMAAVHYAYLQMKMPGPGGPISVHGDLKVALACMEQRADRLAAASKPEGGDERLGPSAPTAPRQRMATCDEVPEDALVSFLRANADVFAWRPADMPGVPREVIEHRLAVRPGARPVRQKVRRQAPERQAFIREEVARLLEAGFIREVIHPEWLANPVVVPKANGKLRMCIDYTDLNKACPKDPYPLPRIDQIVDSTAGCDLLCFLDAYSGYHQIRMAREDEEKTAFITPVGTYCYTSMPFGLKNAGPTFQRTTRISLGSQIGRNVEAYVDDLVVKTRNQETLLSDLAETFGNLRSARIKLNPDKCVFGVPAGKLLGFLVSARGIEANPEKIRAIERIRPPSKLRDVQCVTGCMAALSRFISRLGEKALPLFKLLKRSGPFTWTEEAENALAQLKAYLSSPPVLVAPEPNEPLLLYLAATPQVVSAALVVERDEDNPHSAHPHSVPTWPGSRQGGEAPESNGGLRPPTTGVGPLPACQTVLGAPDPQEGPEATAGRPHLTPFDPEANPVLTRPGKEQGEEAPEPNGGQRPLTTGVGPLPACPTMPGAPDPQDGPEATEGRPPLSSSDPEVIGTEDECAPKGHLNEKRPGGTAPSEEDRPRRKVQRPVYFVSEALRDAKTRYPQAQKMLYAILMASRKLRHYFQAHRVTVVTSYPLGQILHNREGTGRVVKWAIELSEFDLHFEPRHAIKSQALADFVAEWTPAPETVSIPEASTNPSQLPHTAHWVMQFDGSLSLQGAGAGVTLTSPNGDVLRYLVRLDFRATNNMAEYEGLLAGLRVAAGLGIRRLLVLGDSQLVVNQVCKEYRCSDPQMDAYVRQVRRMERHFDGIELRHVPRRDNMVADELSRLASSRAQTPPGAFEERLTQPSARPDPLGETDAPDRPPRPVGVQASGPEGSAPSSLRLIAWISEIQTYLTDKTLPEDREGSERVQRISKRYVLVEGTLYRRAANGILLKCIPQEQGVELLADIHEGECGAHSASRTLVGKAFRQGFYWPTALNDAVDLVRRCRACQFHAKQIHQPAQALQIIPLSWPFAVWGLDILGPFKRAPGGFEYLYVAIDKFTKWPEAYPVVKIDKHSALKFIKGITARFGVPNRIITDNGTQFTSELFGDYCEDMGIKLCFASPAHPRSNGQVERANAEILKGLKTKTFNILKKHGDSWIEELPAVLWANRTTPSRATGETPFFLVYGAEAVLPSELTLRSPRATMYCEADQDQLRRDDLDYLEERRRRAALRAARYQQSLRRYHQRHVRARSLCVDDLVLRRVQTRAGLSKLSPMWEGPYRVIGVPRPGSVRLATGDGTELPNPWNIEHLRRFYP

SEQ ID NO: 115519 - protein, 198 aa, Oryza sativa
  Clone ID: PAT_MRT4530_19108C.1.pep
QIYNRVQPFHQSQETRSKEQLAQRVNPANEEQQQRLDHPTLFPLIRTCFIAGMAASIMETLSVTTAYDPCIRARRQGPKTSWRSVYSDNEQQHLNHPSLLPLLLELPRAQQYSLILALQLLCCYHPKELAAAFGSGVFSIFIHLLILSLYLLTATSNLLLISPHFPFYVSLSCVSKILPVSLHLCLSNDTSTPHLPLF

SEQ ID NO: 115520 - protein, 250 aa, Oryza sativa
  Clone ID: PAT_MRT4530_19109C.1.pep
MAFGAQLRATGRIGLEPKRADLVPVHSFERAHTHVVAYQKRGSDRCIDARMSVSSIGSSSLACHGASAVGYGLMHGQSLWESLFMSTSQGKVDDKGKKPVMQSRLSSPDNHERNHTTTMGWTPPPMGWVKANVDGSFIQCSEAASAGIVIRDHTGSVLLTSWRIISHCGSAEEAEATACWEGVNLAAEWVKKPLILETDCANLKIRRECNRVAHDLAKFAMRTNHSAVWRMQAPSCVFGALANDCNHIDE

SEQ ID NO: 115521 - protein, 76 aa, Oryza sativa
  Clone ID: PAT_MRT4530_1910C.1.pep
ELALITFLRDNADVFSWQPSDMLGVPREVIEHKLMVRPDAKPVKQKLRRFAPDRKQAIREELDKLLKAGFIREVLH

SEQ ID NO: 115522 - protein, 55 aa, Oryza sativa
  Clone ID: PAT_MRT4530_19110C.1.pep
YIYLLYRQRGSKALGVILTIDTGFYKKLIRKLDGTLRVFTVLNHNLKILGPKIKI

SEQ ID NO: 115523 - protein, 967 aa, Oryza sativa
  Clone ID: PAT_MRT4530_19111C.1.pep
MLEAKGFAKPNSSNKYGMHKSSGGTYSKPDARVKIIPAEEITYVRHGKLCGKTVGSDGLQKRQRRRSVTPPPSSRKVSLVTPTVVNQRPTPPVSPAASRISPNRPGTAKNVHSVVTSCISPNLTGKAENGHSLATSGISPNCPGAVKKIHSLATSPISPNWPGAVKKIHSLATSPISPMWPETAGNGHSLVGGYITNSFTTQIAYLSQRPSPFCRAVLSQPSGTPLGTDATAPKNLSRSGNREAYVKSCSSRTRTFSSAHAHSTVVPPGTNAEPSAESFCAPGNEKSSPMSCKLGTLQCQGTRTAVAPSVQKKLTMEPALPSPKSVLSEKSNEAYPDTAPRPSSRPNLFDTKCKVGSPQSETIIPPSQSPQSTSHARCVEPPDDFEAVPSTKSHIITEKQMNQEAPINCNVSSGIPVILHTKLHKKHYQPEACWKGKFEVTGELTHICDGLEAHFPFEISAQVYEASKQMPEILKLEARPLSHLWPKTFKMKPPEGQDIGLCFISSLQRPNGSSDHLLKNISSHIGLRTKIGATELLIFSSKLLTQEYQRKCDKFYFWGVFRALHRSYNQTSMSFDATGCKEIERHKNKETGKILETQDKKTEKEKCGEIGNKLDSAVSRERDRINECMRMLTPDPNAAASSSDFTCQSAPRVPAGSDLVLDTPPGFPHDDPPGLTKAHCLLHTGETTEPYIDSSPSLNLGVPPGLSLDIPPGFMKAHYLPHTGETTESHINPSHSHSLSWDTPLGFSLDVPPGFTKAHRLPIVSTAGSETVVSEKKPLIKFTLNVPRVAQTEAIPGFIKLLAVKQEPGLPAICMATEKASTGKEDEIKSKQDELILAAVLVQVVTERDESSEERLFPKTRLLSDILSSSAASNANTNASPKPTSKFHDAPDNQIQDRKRDHPESPEPSPADTLKRLRVNGRIALNRVMDRRTLSSQPISREGLVDIQVSGPTVLTRSKCCSWQHFR

SEQ ID NO: 115524 - protein, 35 aa, Oryza sativa
  Clone ID: PAT_MRT4530_19112C.1.pep
EDSLLRATAITYSYSNIYLISTYNNIFNTLYPLIP

SEQ ID NO: 115525 - protein, 104 aa, Oryza sativa
  Clone ID: PAT_MRT4530_19113C.1.pep
MALSGFLVLAPRGFVESRWDCGVTRENIGGGAQVQSGPWAVGSLASAKNGWRLRPLSQVAQLNGELVLDEKLFERLGLAIRWAETPVLQAGHSQGPIAHYCGDR

SEQ ID NO: 115526 - protein, 32 aa, Oryza sativa
  Clone ID: PAT_MRT4530_19114C.1.pep
KIKINLYKFIKTQSNILPFTSVLLPLLQNKLI

SEQ ID NO: 115527 - protein, 94 aa, Oryza sativa
  Clone ID: PAT_MRT4530_19115C.1.pep
MAISLYVEQKKFTSPKYNCFIGTIHCYWCQGSICKYLFNKFVLNANDIDVIPFFVLVTSMRDKEDNVNVTGAVILNHGTKRKWYIFLISFSKDE

SEQ ID NO: 115528 - protein, 82 aa, Oryza sativa
  Clone ID: PAT_MRT4530_19116C.1.pep
MAWRWRPSHLVLMARAAYLIFLKFRRMLDLATADLAATDEAFSSPSSDPPPPPRTRSWDRLREVVIGTELRQKFRMEVEDFL

SEQ ID NO: 115529 - protein, 46 aa, Oryza sativa
  Clone ID: PAT_MRT4530_19117C.1.pep
YLIYTTTLTTGTSGSRNHKTTARITSTDCNTSSTTTTVNGGTILIP

SEQ ID NO: 115530 - protein, 217 aa, Oryza sativa
  unsure (1)..(217): unsure at all Xaa locations
  Clone ID: PAT_MRT4530_19118C.1.pep
VGHFPPPPAPPSSSSXPRREGPPDPPXPAPKYPHPLNPPPXPPPXPPRPWPSPXHPPPPPPPPPPPASPPPPPPPXPPPPPTHGSPPXDRPPPPRPPPPPRLRARPPPXSPPLPPTPTTTPPSAPAAPPPAPPCPSSSPASAIPATPTPPRSSRRARRGARWRTCSASTTGWCRTRGEGSTTTRSRRWWTRGSRGSCRCRRPRRGPGRRGRRRGWRS

SEQ ID NO: 115531 - protein, 609 aa, Oryza sativa
  unsure (1)..(609): unsure at all Xaa locations
  Clone ID: PAT_MRT4530_19119C.1.pep
MAAATVEVTWDVEYVLWAPDCQQRVMIGINGRFPGPNITARAGDVISVTMNNKMHTEGVVIHWHGIRQFGTPWADGTASISQCAVNPGETFVYKFVADKPGTYFYHGHFGMQRAAGLYGSLIVLDSPEQPEPFRHQYDDGGELPMMLLSDWWHQNVYAQAAGLDGKDRHFEWIGEPQTILINGRGQFECTLGPARKSFEKLLNENXWRPASTTRRCAATRRSAXERSECGPYCPRSQCAPVVFNVEQGKTYRLRIASTTSLSLLNVKIQGHKMTVVEADGNHVEPFVVDDIDIYSGESYSVFFKADQKPASYWISVGVRGRHPKTVPALAILSYGNGNAAPPPLQLPAGEPPVTPAWNDTQRSKAFTYSIRARKDTNRPPPAAADRQIVLLNTQNLMDGRYRWSINNVSLTLPATPYLGAFHHGLQDSAFDASGEPPAAFPEDYDVMRPPANNATTASDRVFRLRHGGVVDVVLQNANMLREEVSETHPWHLHGHDFWVLGYGDGRYDPAAHAAGLNAADPPLRNTAVVFPHGWTALRFVANNTGAWAFHCHIEPHLHMGMGVVFVEGEDRMHELDVPKDAMACGLVARTAATPLTPATPLPPSPAPAP

SEQ ID NO: 115532 - protein, 1396 aa, Oryza sativa
  Clone ID: PAT_MRT4530_1911C.1.pep
MVHCFELCYAEGIVTISIRWYTSGQSKTIRIAVPAYLLNAIYTNETILCHPLLSPALAYLLHGLLSMSYTLLAIIHQRRSSKVMLKMPRFKPEYLFGIEGFVQELRAMSFTIGFGTAPLYAQIPHDRDEEKCRVKVTLNSDREDIPSVMFKAGGGSYPHACQEVARIAIGELRGRYNDLLADTEYRYHPRQPQGSDRASYVDPEGIENDATTRHLVEMLWAMDESRVEIVSAAQAREDRNRGKICKLEGKVDRLEKELAELKGEAPPQKARVRLTARKRALFVPRYQLAPKVHVVSREAVPVDPPVVNLSDDEEEDSKRTHSKNQQNQGNNHAPPQNKFAEFLRVRPPTFSSTTNLVEAGDWLHTIEKKLDLLQCTDQEKVSFASHQLHGPAFEWWDHFRLNRATAEPITWLEFTAAFRKTHVPSRVVSLKKKEFRALTQGSRSVTEYMHEFNRLARYAPKDVRTNEEHQEKFLEGLNDELSYPLMTGDYSDFQELRQFYNNNNNRNQAPRPVATPVQHQPVKREQENKPGVCFNCGEPGHYSDKCPKPRRVKTIPVQNNSNAPTSKAHVNHVAVAEAQGATDVILEIQGVPFPANLILLESKDLDVILGTDWLDRYKRVIDYANRKVTLTSNDGQVVTVHALPSEPLRSSLNQITLEEIPIVRDYPDVFPDDLPAKVKRQVDDLLQKGYIRPSSSPWGAPVIFVEKKDHTQRMCVDYRALNDVTIKNKYPLPRIDDLFDQLKGATVFSKIDLRSGYHQLRIKDEDIPKTSFTTRYGLFECTVMSFGLTNAPAFFMNLMNKVFMEYLDKFMVVFIDDILIYSQTKEEHEEHLRLALEKLREHQLYVKFSKCEFWLSAVKFLGHVISAGGVAVDPSYYRRFIENFSKIAKPMTRLLQKDVKYKWSEECEQSFQELKSRLISAPILILPDPKKGFQVYCDASKLGLGCVLMQDGNVVAYASHQLRPHEKNYPTHDLELAAVIHALKIWRHYLFGTRTEVYTDHKSLKYIFIQPDLNMRQRRWLELIKDYDMGIHYHPGKANDVADVLSRKGYCNATEGRQLPWELCKEFERLNLGIVSRGFVVALEAKPTLIDQVREAQINDLNIQEIKKNMRRGKAIGYLEDEQGTVWLGERICVPDNKELKDTILKEAHDTLYSIHPGSTKMYQDLKEKFWWASMKHEIAEYVAVCDVCQRVKAEHQKPAGERQVFGTDILREAEEKVKIIQERLRIAQSRHKSYADNRRRDLSFEEGDHLYLRVMPLRGAHRFRTKGKLAPCFVGPYKIISRRGEVAYQLELPQSLAGVHNVFHVSQLKKCLRVPTEEANPEQIEIQEDLTYVEKPIRILETDEKRTRNRVIRFCKVQWSNHSEEEATWEREDELKSAHPHLFVISSESRGQDSV

SEQ ID NO: 115533 - protein, 84 aa, Oryza sativa
  Clone ID: PAT_MRT4530_19120C.1.pep
MARKGSKRKWRQILPFGTEGYGHTAGANAETENRRCHMGPALLVSAGSQLLVHSNGERTATASEAKLTTHQCDVTLVYSEPSFW

SEQ ID NO: 115534 - protein, 29 aa, Oryza sativa
  Clone ID: PAT_MRT4530_19121C.1.pep
IGGRPFFFFFFFFFFFFFFFFFFFFFNSP

SEQ ID NO: 115535 - protein, 105 aa, Oryza sativa
  unsure (1)..(105): unsure at all Xaa locations
  Clone ID: PAT_MRT4530_19122C.1.pep
FGRRFIKVRPCLHFLSIYMACMQKWCYSFLSGAPPSTGQLTQTCIPXNPXRLINQXFGGFKGKXRAWFKKAPWXSFWKKXLPXXXXXXXXXKXTFPKRGGGAPRG

SEQ ID NO: 115536 - protein, 178 aa, Oryza sativa
  Clone ID: PAT_MRT4530_19123C.1.pep
MAMADLELEKVASFLLAALLPLVLFKLAAAKRGGGDGGMRLPPGPWRLPVIGNLHQIMAGGQLVHRTMAGLARGLGDAPLLSLRLGEVPIVVASSADAAREIMSRHDAKFATRPWSPTVRVQMVDGEGLAFAPYGALWRQLRKITMVELLSPRRVRSFRRVREGGSAVAPGGRRGGPG

SEQ ID NO: 115537 - protein, 622 aa, Oryza sativa
  Clone ID: PAT_MRT4530_19124C.1.pep
MPPSPPPLLLLLAVLLAAAPAAAQSATPREDDVRCLKEVKAELRDPDGRLSAWSFGNTSAGALCLLSGVSCWNPQESRIIGLSLSGFGLQGGIPSALQFCSAATTLDLSNNALVGVIPPALCDWIPFVVNLDLSGNQLSGQLPSELANCRFLNSLKLSGNSFSGQIPDSLGRLDRLKSLDLSDNRLDGQIPPQLATFGKDSFAGNKGLCGRPVSSRCGRALSGAGLGIVIAAGVFGAAASLLLAFFFWRCTGKSKGGRRRRRGGSESGGGSAEDGSWWAERLRAAHNRLAPVSLFQKPIVKVKLADLMAATQDFSTSHIVVAGSSRAGTAYRAVLRDGSALTVKRLHSCPLSEKAFRAEMGRVGQLRHPNIVPLLGFCVVEDERLLVYKHMESGALSSVMKEPGEAPLDWATRLRIAVGAARGLAWLHHGFQVPQIHQNLSSSAVLLDEDYEARFTDVGLTRLVRMAPGEGGDTSPFLNGDFGEYGYVAPECASNPVATMKGDVYAFGVILLELVSGQEAATVTGDAAGEGFKGTLVDWVNQLKASGRIGDAVHKSLRGNGHDSEIDEFVKIAFACIMVHPRERFSMYRVYHSLKSIGQGRDVSEQFDEFPLAYNKDESDTM

SEQ ID NO: 115538 - protein, 261 aa, Oryza sativa
  Clone ID: PAT_MRT4530_19125C.1.pep
MADLTEHPSPTAPPQVQTAGLPAAASPGPASPHSPSEQGDKTAPGAATASTMTTASSGEPSPRSSGKHAFYRGIRCRSGKWVSEIREPRKARRIWLGTYPTAEMAAAAYDVAARALRGADAVLNFPGATASRPVPASASPADIRAAAAAAAAAAAHLERPHGPTGTAYPATAAAEHHQQQQQQQYGSGSPAADDVSGYPPMEGGIGNDDFMDEEAIFELPQLLRNMAAGMMMSPPRLSPTTSDVSPEPSEAGESLWSYRDP

SEQ ID NO: 115539 - protein, 150 aa, Oryza sativa
  unsure (1)..(150): unsure at all Xaa locations
  Clone ID: PAT_MRT4530_19126C.1.pep
SMPIYIITALKIHKQLIQEIDKARRKFLWDRGDEIHGGKGKVNXKRVCRPIKYGGLGIPDAIPRRSSLDHDKCGVEMLGTNCKMQVLHMAFQRMPDDQENLGCGGNADDLPQLKTAKLVRHVIPRGMVVPECQGFINFNLAVLLCIARLP

SEQ ID NO: 115540 - protein, 146 aa, Oryza sativa
  Clone ID: PAT_MRT4530_19127C.1.pep
MGKAQQKRAQNGPTKHQTLIPLPDPLLLTLGARCSTSLAARVCLVSAVRRFPAPPSDGIPALLPPAPLACERPVQPPPVGIPAPCTPASTNAATCRQHRPQLRVFPRAVSKLEAPVGNTKLRPQTSQAEPSQFLARRILMSQTELA

SEQ ID NO: 115541 - protein, 87 aa, Oryza sativa
  Clone ID: PAT_MRT4530_19128C.1.pep
LKEKPSNHGLACNNIYIIPIKPYNWAIEGITSCEHTKKTILLTLWALGTCYSKTLFLVGENPELLFKMGRMESLTHLQEFPAKLLHG

SEQ ID NO: 115542 - protein, 78 aa, Oryza sativa
  Clone ID: PAT_MRT4530_19129C.1.pep
WHACRCWYAIQRSTYAFEHGPTAIVDTHCRDRRIWLHHCTHRLRWTNHRRLQNCIYIYHTFISREDWYDRQHHGIDPY

SEQ ID NO: 115543 - protein, 314 aa, Oryza sativa
  unsure (1)..(314): unsure at all Xaa locations
  Clone ID: PAT_MRT4530_1912C.1.pep
MAAGSSAADSPSPGRSLPLPTLYKRSPCLPPPFPPLAALSLRRNRARAVALSLHRRRRAPVRRRRRPGPSPASASPSSGSPQPRRPRPPIRFGRQPPERRRPRQPVPRRRLPPLRSLFPSSPSTRGEPWTAHFVSPFPPLSRPPLRHAYGRRRRPXGRGRAASRRLCRRGRFQARPAAAMWGPAVSRPRPRVRLTHGTHGAGRCEPGATSPPWTHLGHIRTGLRASVAKHYRXFHMSSGTNEGYTSCGPVVEMSWHRAGVLLLGAQSCLPVPGVPAVGGIGSMYTSDQSKIYSNSRALGYGQAEQCTQVSVFNS

SEQ ID NO: 115544 - protein, 134 aa, Oryza sativa
  unsure (1)..(134): unsure at all Xaa locations
  Clone ID: PAT_MRT4530_19130C.1.pep
PKRPXVATXKAARNATTAPPPPPRAAAIPPPADRTPRAPAAETLASSFARPSAVGXRRITFGPXXXSGSQXXXXFRPRXPRRPPGPRYAGXLTRNREDSRKXYXQNSEDXQELCSLTSVPNIRNGSWALCFHSM

SEQ ID NO: 115545 - protein, 53 aa, Oryza sativa
  unsure (1)..(53): unsure at all Xaa locations
  Clone ID: PAT_MRT4530_19131C.1.pep
ASGKVKGQTPKVEKQQKKKKKTGRAKRXRIQYNRRFVNVVQTFGRRXGPNSNS

SEQ ID NO: 115546 - protein, 74 aa, Oryza sativa
  Clone ID: PAT_MRT4530_19132C.1.pep
RRHDSHNKVNSSKDNMKSSRHIKRRLKSAKKQKNSGVIALDYVQTAKNLTDQFTKGLPCNVIDSASREMGLIPT

SEQ ID NO: 115547 - protein, 136 aa, Oryza sativa
  unsure (1)..(136): unsure at all Xaa locations
  Clone ID: PAT_MRT4530_19133C.1.pep
QALTHHLCHHKRDDEPDTEVDSYXEGSSTRLHTQTTDVAVHGQALVREDRRDEMQHKHIEHLGEAGALNVDAFALYEKHEGEXDLDNAHLHWTTAENTGTAGVXAVGYVFHEHHETKTDHKSSQESTAENNHHLFG

SEQ ID NO: 115548 - protein, 72 aa, Oryza sativa
  unsure (1)..(72): unsure at all Xaa locations
  Clone ID: PAT_MRT4530_19134C.1.pep
LRGYPPAQVLTHVPRASQVEETGCYCHLRGADQIKVTYRPGPMHGRYFSGSGNWPSPRGXNCDSWVCCHERK

SEQ ID NO: 115549 - protein, 99 aa, Oryza sativa
  Clone ID: PAT_MRT4530_19135C.1.pep
LQFLNPSISCFASLFMFMTSEGSNRVHYDLLFRSNAYVSQKQSPLCPTLSFSFRIIFQCCCSNSFNSLSRKKIFFISDMMPTALLPTYTKRILPSLHFL

SEQ ID NO: 115550 - protein, 55 aa, Oryza sativa
  Clone ID: PAT_MRT4530_19136C.1.pep
GNQGHILVKQMARLNPPFSCLRKVTEETRHGDFFTTLRPVTGATTRLGEFKIKLF

SEQ ID NO: 115551 - protein, 153 aa, Oryza sativa
  unsure (1)..(153): unsure at all Xaa locations
  Clone ID: PAT_MRT4530_19137C.1.pep
SSGEGWKSMPXLDXGXIRSKKLGTIGTTANLAGXXSPPVYHLPSVRAATLLXFFSGTTNLGPLLGAFLSDTFLGRYXXIXAXPSPPGLGMLVAYLTAAIPSLHPPPCXASSSSSSCXGPTHGQLAALLAAFAFLVXXAXXFRPCILXFXXXQF

SEQ ID NO: 115552 - protein, 347 aa, Oryza sativa
  Clone ID: PAT_MRT4530_19138C.1.pep
MANPAAAAGPSGGARSFLQAVSTVTEEAPSPLRVVQMEGLAVLKIIKHCEEFAPALVTGQLLGLDVGSVLEVTNCFPFPMREDDEEADADGANYQLEMMRCLREVNVDNNTVGWYQSCLLGSFQTVELIETFMNYQENIRRCVCIVYDPSRSNQGVLALKALKLTDSFMDLYRNNGLTGEKLREKKLSWVDIFEEIPIKVSNSALVSAFMTELEPESPVSQCDFDRLKLSTAPFMERNLEFLIGCMDDLSSEQNKFQYYYRNVSRQQSQQQAWLQKRRQENMARKAAGEEPLPEEDPSNPIFKPIPEPSRLEGYLVTNQISSYCNHINGVAGQNFNRLYLMKALQED

SEQ ID NO: 115553 - protein, 70 aa, Oryza sativa
  Clone ID: PAT_MRT4530_19139C.1.pep
DVEVTEIDDAEEMDPSFGAMMIYDQKAVHLELKAIVQTNAIDGTIKKAASAATHPELILALNDNSQIVDS

SEQ ID NO: 115554 - protein, 241 aa, Oryza sativa
  Clone ID: PAT_MRT4530_1913C.1.pep
MGIYRSVYHLTCVRLWLGGSRTVVRSGYTTLIPGRYHSSPLLVFTAVRLSCLQPYHSCSSFSPPVFATSFIADSMAPRKPTKAGSSGEDPGSLSDGWSCYLGKFLVKEADLAELVLSSVLAERQVSAELFATLFMVCVATKDDNTLAGPKKTVFGSVNFMLRPKRSDAWPVLVSMAKWDRNSMQKWFYIDNPYFSKDDSAEDDKAKWLRFRRLSIAMIIKPNVDVDGVLEARLILLRKVAH

SEQ ID NO: 115555 - protein, 51 aa, Oryza sativa
  Clone ID: PAT_MRT4530_19140C.1.pep
FFFFYTCGPTFTIPRGLYNLRMISFQSCHTWHINQHPHPMAFSTSAIGVVS

SEQ ID NO: 115556 - protein, 153 aa, Oryza sativa
  Clone ID: PAT_MRT4530_19141C.1.pep
MCKVITIQSLVWLRRTVRRWRSRAAARPAGSKMERDGDAVPAGHVAVRVGGGGEDARRFVVRVAHLNHPAFRELLRQAEEEYGFPSGASGPVALPCDEDHFRDVLRRVSSDERHDLAFCRPAATCGVTKRRAESSSSSSSRAPLLQGMDSLVW

SEQ ID NO: 115557 - protein, 36 aa, Oryza sativa
  Clone ID: PAT_MRT4530_19142C.1.pep
RRTHIKGNKRLTVRKHMVIFTHGRCSHTNTLYSSCL

SEQ ID NO: 115558 - protein, 114 aa, Oryza sativa
  unsure (1)..(114): unsure at all Xaa locations
  Clone ID: PAT_MRT4530_19143C.1.pep
LIGMTSACVNPIMYGLINDSFRHAFLTMLRPFFGPCTKYIAVYXTTQHTTYSYMNGNGTKKGESPQKKAIPEQSEEAQREPLIAPTPVSKSPTDGEVSQGGEQIFIKFFHTFFM

SEQ ID NO: 115559 - protein, 54 aa, Oryza sativa
  Clone ID: PAT_MRT4530_19144C.1.pep
DVVRYWHNRLKHLFLFPSSFLTSGYFCGLPGSWAFLISLFPPIQEDTVFLPCEY

SEQ ID NO: 115560 - protein, 210 aa, Oryza sativa
  Clone ID: PAT_MRT4530_19145C.1.pep
MAAAVASSSAAAATSSAAAATSSAAAAAAVATAASSSAAMDWYLDAVRGVATTEKALGFFKEKASIMHAKSFWLYKHIPLVYHTIFTMILLPTRRIKGMERARAYVYMRYSAASVKYSLCFITQVVVRCTDAVARWPGVKVQRYEYDRTVDEPDAAFSLDRPHRASHSINGPGVCKAEMPHMATGLSSLFRWASTTVHQYIKAPKTCRPD

SEQ ID NO: 115561 - protein, 85 aa, Oryza sativa
  Clone ID: PAT_MRT4530_19146C.1.pep
GDNDTCEVRKPHCRKGRREYMPHQLKHGYWSALLSVRTGGNATHHAVPPFLPSVAVQASNRISVQRQGQRRWGLLTSSAMVEGKQ

SEQ ID NO: 115562 - protein, 44 aa, Oryza sativa
  Clone ID: PAT_MRT4530_19147C.1.pep
SCRICFRRRCTGTDIICHGTMEWLRLALSAQAEVAYARVTVLTL

SEQ ID NO: 115563 - protein, 373 aa, Oryza sativa
  Clone ID: PAT_MRT4530_19148C.1.pep
MEGNGAVQEAFSCFNKFAGAFYFWLSRASNPKIFHRLSAIAGSSSRACQSQIKQVTSCMQHLAGLRFGSQVREEHAIQILLAKLANATFGRLWNEVEERHACNILMLAAATVPPFENISPKMLADSMTLGRDNGRTREPVDQHSLEENHSGCTCVAVPRIILPEDATEPKTGIKFPTLLEDNSNPTSEVLVGMGFRSMRIMRVKNLNLYAFGLYIQPDSICKRLSPKYASVPVSELKDHPDFYEDLLRENIHMTVRLIVSYNGLSIGTVRDAFEKSLCFRLQKMNPNTDYHCLKTFGSYFSEDICIPAGTKIDFRQTSDGQLITEIDGKQIGAVQSKDLCRAFFDMYIGDPPVSVETKQDIAQNVGGLIRRCY

SEQ ID NO: 115564 - protein, 73 aa, Oryza sativa
  Clone ID: PAT_MRT4530_19149C.1.pep
LKSVLLWNEQKLFTCVDVEKAIYVGSCLENVLKHYWESILRSSLERVLLEQRWELYFYWINNDWKGFYRRNLD

SEQ ID NO: 115565 - protein, 44 aa, Oryza sativa
  Clone ID: PAT_MRT4530_1914C.1.pep
KLQEIEVVWTSITNIAAEHVRVLRVNCTTHKQSMPASRALPLFQ

SEQ ID NO: 115566 - protein, 76 aa, Oryza sativa
  Clone ID: PAT_MRT4530_19150C.1.pep
MTTSATTTAAGGGGEVGRGGSGAVASGGGELGMRVPPPSPLWCSQPAQRPASRSHSGAPGWPPAPAPALVTSVARP

SEQ ID NO: 115567 - protein, 92 aa, Oryza sativa
  unsure (1)..(92): unsure at all Xaa locations
  Clone ID: PAT_MRT4530_19151C.1.pep
GQAARVHDVRVEWSEKLAPHPCADAASFCSFVLLQIRIRFXVLETFRKIRCVQTAWSPDKLRATYPVRLRAVEITPAKSFDQAAGLFVTSVR

SEQ ID NO: 115568 - protein, 161 aa, Oryza sativa
  unsure (1)..(161): unsure at all Xaa locations
  Clone ID: PAT_MRT4530_19152C.1.pep
DVRVEWSEKLAPHPCADAASFCSFVLLQIRIXFVLETFRKIRCVQMAWSPDKLRATYPVRLRAXRSCGRPDQATLLYINRPAVFTQXYTQNQSRVCLLLCTAPSLVDYSIPLAGVHQRSGEQVSGTSAFDILHREKAAIRFLGSASRDGSPSSSLACFVPS

SEQ ID NO: 115569 - protein, 230 aa, Oryza sativa
  unsure (1)..(230): unsure at all Xaa locations
  Clone ID: PAT_MRT4530_19153C.1.pep
RVHDVSVEWSAKIGPSPCADAASFCSFVLLQIRIRFCFWKRSEKIRCVQTAWSPDKLRXLIRFGYAQWRSCGLPDQATLLYINRPAVFTQHTRNQSRVCLLLCAAPSLVDYSILLAGVHLRLGEQVSGTSAFDVLHREKAAIRFLGSALRDCSLFVRDGSSSSSLACCVPSXTPAKSFDRTAGLSATSPLPNNNPNKHSCSIAKGLLSPSKKTQSRFKYRIELFLRRREY

SEQ ID NO: 115570 - protein, 195 aa, Oryza sativa
  Clone ID: PAT_MRT4530_19154C.1.pep
MNRSNMRNILNTYRGDEKTGCLVETFRRCLRRHETRERRGRRAVANEQGAVARSASQKPYCRLLPVQDVKGRGSGDLLSRSLVHAGERDGVVYERRRSTEAPARSLLRVTEPDKSRVTYPDSTPFARTGFFGTFPKQNESEFAAKQNCKRRLHLRKGEEPIFRTIRRVRRAHAPPALPGEARRGERARVSPLLST

SEQ ID NO: 115571 - protein, 85 aa, Oryza sativa
  unsure (1)..(85): unsure at all Xaa locations
  Clone ID: PAT_MRT4530_19155C.1.pep
QTLTKXIGFRSGXIAKTQTPSSXLRAGTDGRAKSAAQRASERAGQEEDRIFXPSATRRLLLPSLPPHTRAPAPNPPSASSLVGLL

SEQ ID NO: 115572 - protein, 70 aa, Oryza sativa
  Clone ID: PAT_MRT4530_19156C.1.pep
MPRGREEEGDVEEAEEARPRVEVRWREADVAGVGVVEATDVAVAVDTDVGRVPPDLEGGEGVITDRNKEA

SEQ ID NO: 115573 - protein, 79 aa, Oryza sativa
  unsure (1)..(79): unsure at all Xaa locations
  Clone ID: PAT_MRT4530_19157C.1.pep
FAGVYEGTKHASEEEGEPSRTNREQSREALSKNLIAGFFRCKTSKAEVPETCSSDRXCTPANRMEYLRATAQFRVRGKP

SEQ ID NO: 115574 - protein, 124 aa, Oryza sativa
  unsure (1)..(124): unsure at all Xaa locations
  Clone ID: PAT_MRT4530_19158C.1.pep
MQPPFAVLFCCKFGFVFVLETFRKIRPDQATLLYINRPAVFTQDXENQSRVCLLLCTAPSLVDYSIPLAGVHQRSGEQVSGTSAFDVLHREKAAIRFLGSASRGCSLFVRDGSPSSSLACFVPS

SEQ ID NO: 115575 - protein, 169 aa, Oryza sativa
  unsure (1)..(169): unsure at all Xaa locations
  Clone ID: PAT_MRT4530_19159C.1.pep
DVRVEWSEKLAPHPCADAASFCSFVLLQIRIXFVLETFRKIRCVQTAWSPDKLRATYPVRLRAXRSCGRPDQATLLYINRPAVFTQHTKKNQSRVCFLXLCTAPSLVDYSIPLAGVHQRSGEQVSGTSAFDVLHREKAAIRFLGSASRDCSLFVRDGSPSSSLACFVPS

SEQ ID NO: 115576 - protein, 2070 aa, Oryza sativa
  Clone ID: PAT_MRT4530_1915C.1.pep
MALKTLQVPSSFARPINRSFIGSSSSSSSSSQFSLRPKPASARLAASVAGERRLECRGGSSLHGCVDEGAAAASRRRQEQAAEIPIVLFPSVVFPARRCSSRRSSSGTGPWCTRGSRIGVVYSGGRRRRGGVGGGVAAGEVGYVGGDRFRVVGAVKTKPYVVARIRRAAAPHSAPLYHPREASSSTAMADMGRPLTAKPISRTGLQGRGFAAGEVVCRGDGGGDEAEAAGATNNFSNKLGGGGFGFVYKGVLPDGQEIAVKRLSNRSSQGLEEFKNEDSRLKIIHRDLKASNILLDDDFNPKISDFEYAMEGKFSEKSDIFSFGVLILEIVSGRRNSSFVDEEWSMNLLGYAWTLWKEGSVSELIDPLMGTICSYDEVCRCIQVGLLCVQELPGDRPSMPLVLRMLSGDVTLPAPKQAAFFVGRVPLDDNNTGSGNQLTQSSNLLRLVAFFFLLSGQTSAAAAAGVADKLDKGQNLTDGQTLVSSGGGSYTLGFFSPGKSTKRYLGIWFTVSGDTVYWVANRDRPLDGKSGVLLLNDDGSQLVLLDGGSRRTVWSASFLAASAAVVQLLDSGNLVVRNGSGGDAYLWQSFDQPSDTLLPGMKMGKSLWSGQEWFITAWRSADDPSPGDYRRTLATDGLPELVLWRGGGGGGATKVYRTGPWNGRFFNGVPEASNYSDKFPLQVTSSAREVTYGYGSVATAGAAPLTRVVVNYTGVVERLVWVASSRAWQRFFQGPRDPCDSYARCGPFGLCDADAAATSFCGCVDGFTAASPSAWALRNTSGGCRRGVALDCAGGGGGSRTTDKFKVVRGVKLPDTRNASVDMGATAAECERRCLGNCSCVAYAAADINGGGCVIWTDDIVDLRYVDRGQDLYLRLAKSEFAVKRLKQSALTNKGKKDFAREVAVMAGLHHGSLLRLLAYCNEGNERILVYAYMKNKSLDNHIFGPLPRRANLHWRRRLDIIQAIAKGVAYLHEGPDGSVIHRDLKLSNILLDDELKPKIADFGTAKLFVADQSGQTLVVSQGYASPEYALRDEMTLKCDVYSFGVVLLETLSGVRNGSMQTLLPQAWRLWEQGNLMDLLDPAMARPAPDDAELLYDLERCIHIGLLCIQDMADDRPTMSEIVAMLTSRTSQMEQPKRPTLDSRAAMRPLRQRGLGTQGSTTMSSSLVDNSVNTNLSQVFPASTMLVWTQVGEIVFPVYTTMPISTGPPMTRNENAMATNQDDSMSKDPPAEAENGTSTTSELEKDSNAAKPCRSDMNRELTKMTSEVTRALAPCALASPSPPPLQPCAAVVSAVAVAREDRRRVRKVVAVLVRPFAVAGDRRSFIAVVNPKVSAASSSSPSPSVASPPLLWSPRTRSNHQLAMPMVKTLNGGNRLIEPPLHLAALAISEITSTAAERHDAHETMRIVPGVMSLHGAIITKIEETAQTKTEAMITATTATITTITNGGCQTILVEDVAITMTMMETGAETTAGDDDKILEIQADILTDIHEGHTIADNPPPPALDLWQQFVANFQGTYKRHAIEDDLHALTQNSGESLREYVQCFNECKNTIPEITDASVIRAFKSGVRDRYTTQELATRRITTTRRLFEIVERCAHADDALRRKNDKPKTGGEKKPATDAPESSKKKNRKNGKRKAQAEEAEEAFVALKRYLSNPPVLVAPQPNEELFLYIAATPYSVSTVIIVEREKVQRPVYYVSEALHDAKTRYPQIQKLLYAVIMTSRKLRHYFQAHRVTVVSSFPLGEVVRNKDVVGRIAKWVVELSQFDVHFAPRTAIKSQVLADFVADWTMPDNKSDNQVDNETWTMAFDGALNSQGAGAGFILTSPSVDQFKHAIHLNFRATNNTAEYEGLLAGTRAAAALGVKRLIVKGDFELVANQVHKDYKCSNPELSKYLAEVRKLEKRFDGIEVRHVYRKDNIEPDDLARHASRREPLEPGTFLDILTKPSVKEVSGEVSPVTPDISSEATKAEHAVADIETTDDWRIPLIKFINSEELPEDDTVAQQSIQESAKRVPTGEIKADNAIKFIKGIFCRYGLPHRIITDNGSQFISADFQDYCIGLGVKICFASVSHP

SEQ ID NO: 115577 - protein, 105 aa, Oryza sativa
  unsure (1)..(105): unsure at all Xaa locations
  Clone ID: PAT_MRT4530_19160C.1.pep
PGKGAKFGPGVPGPLPPPPSXAGPSPRGPPPVLSPATPPPWPAPPPPGAPPCPCSFPRRSTPAPPCEPHNPYFFSPPGDFSGGPATSLLFYPPPLGFGGSRVNPP

SEQ ID NO: 115578 - protein, 64 aa, Oryza sativa
  unsure (1)..(64): unsure at all Xaa locations
  Clone ID: PAT_MRT4530_19161C.1.pep
QCCMEINGMMPQCHCGTCCQISXSMRKVICDGLGQQRMIKMAMLMPDMCNMAHVKVQLSSRGWC

SEQ ID NO: 115579 - protein, 83 aa, Oryza sativa
  Clone ID: PAT_MRT4530_19162C.1.pep
MAHQMGWRKTTLLRAEISSKERSPGNRLCAGGVARGEREEVSLERKEGWIKVKLEAEIEFGNRAVISWSPDRLRLGSAGSESG

SEQ ID NO: 115580 - protein, 67 aa, Oryza sativa
  Clone ID: PAT_MRT4530_19163C.1.pep
ATSQGEKNMGTQSCIRCIPLYNSLTLTSGKLLRPEQLCQTILPIVVTNHITSWRTRILLMLDGLNVP

SEQ ID NO: 115581 - protein, 90 aa, Oryza sativa
  Clone ID: PAT_MRT4530_19164C.1.pep
MSGLKVATMGKHRGSQGGGGSHIQATTAGSNVGEKLCNDNNDHVLRQRLCGSPMHLWRPLVTTQGGAIEAFNGDGVTTLCDAGVRGVEAG

SEQ ID NO: 115582 - protein, 166 aa, Oryza sativa
  Clone ID: PAT_MRT4530_19165C.1.pep
MILPLAKLGTLALKTMSKPIAIRLKTEASRHPQFRQLIINLAQTNHRVSTNIQRRIYGHSTKVEIRPLNEEKAVQAAADLIGELFVFSVAGAAVIFEVQRSARSEARKEEARRNEVEALRQKEDQLAREIEIVKQKLGEIERQANSRGLSGVLFRSSSAPDQTKAS

SEQ ID NO: 115583 - protein, 79 aa, Oryza sativa
  Clone ID: PAT_MRT4530_19166C.1.pep
YAINFYFPIWFWTISRASALRPICKNLFPPFPTGFIVKVLQFSLGKNILKQSPGYIPPKYVFRAILINWSPIKKMDGIT

SEQ ID NO: 115584 - protein, 187 aa, Oryza sativa
  Clone ID: PAT_MRT4530_19167C.1.pep
FVVTAFFYATAGAGGVPAPFMVRNRESNWMGYVAVATDAGVAALGRRDVVVAWRGTVRPMEWLNDLDFTLVSAAGVLGAGGRSPAPRVHRGWLSIYTASDPASKYSKLSAREQISDEIKRLMDKYKDEETSITVVGHSLGAAVATLNAADIVSNGLNQHGACPVTAVAFACPRVGDSGFRKLFDELP

SEQ ID NO: 115585 - protein, 422 aa, Oryza sativa
  Clone ID: PAT_MRT4530_19168C.1.pep
MSTTAPRAVAERWRELHGEDHWKGLLDPLDADLRRSVIGYGELAQATNDAFIREAWSPHAGACRYSRDRFLEKAQASTQLAGLYEVTAFFYATAGAGGVPAPFMVRNRESNWMGYVAVATDAGVAALGRRDVVVAWRGTVRPMEWLNDLDFTLVSAAGVLGAGGRSPAPRVHRGWLSIYTASDPASKYSKLSAREQSHIVDWDATSTKPSIYTIIGLDYTVYISDEIKRLMDKYKDEETSITVVGHSLGAAVATLNAADIVSNGLNQHGACPVTAVAFACPRVGDSGFRKLFDELPGLRLLRVCNSPDVVPKYPPMGYADVGVELPVDTRRSPYLKSPGNQAVWHSLECYMHGVAGAQGKRGGFKLEVDRDVALVNKNVDALKEEYHVPPSWSVQRDKGMVRGADGHWKLMDYEGEESSQDK

SEQ ID NO: 115586 - protein, 60 aa, Oryza sativa
  Clone ID: PAT_MRT4530_19169C.1.pep
SERRRRPPWAGAEAAAARRSFCTTTTRITQRPASRRRQQPASRRHGFAFGWPATAGGRGG

SEQ ID NO: 115587 - protein, 105 aa, Oryza sativa
  unsure (1)..(105): unsure at all Xaa locations
  Clone ID: PAT_MRT4530_1916C.1.pep
LRDEIKRVKELLAAEKSNHEAERRRGADLDAELKGVQKEVAALEEEIKALKASAAAADAEDEDEAARAAGRXRKPEVGYHGLMAAAAAGAAATAVVAVVILHLKR

SEQ ID NO: 115588 - protein, 80 aa, Oryza sativa
  Clone ID: PAT_MRT4530_19170C.1.pep
PMLQKKIPVILFHFIEEELRGAVPVISPNAIRFGSLDKQSSDHVKEVIKPFLCRCHVSDGFVPVQVARVDEGSSQARAPP

SEQ ID NO: 115589 - protein, 54 aa, Oryza sativa
  Clone ID: PAT_MRT4530_19171C.1.pep
MELTSTYAECDDELANLAKAKRSCQEKATATRSAQDDEVAVQMDATVYLLIADD

SEQ ID NO: 115590 - protein, 75 aa, Oryza sativa
  unsure (1)..(75): unsure at all Xaa locations
  Clone ID: PAT_MRT4530_19172C.1.pep
KYHYTYSFHYPSSILHTTPPHLLXFTHILYIILIKQHILLLIQPTFFSTFSLNIHTYIYTFLYLLFNPSKIPLLN

SEQ ID NO: 115591 - protein, 60 aa, Oryza sativa
  Clone ID: PAT_MRT4530_19173C.1.pep
QPTINHSQLALKRIGPLGRQHTISILNYLIPTLYLPARDAVGSDPGNSWTGTCRRTQLSL

SEQ ID NO: 115592 - protein, 107 aa, Oryza sativa
  Clone ID: PAT_MRT4530_19174C.1.pep
MAGMQQGGRCAEVEERQHGSDGGDNRVAHKSATKGLRWSVLRWGVAVAATGSGRVLARRGDGGGERRWRQRGAAACLRGAAAIAAVAVAETSLASPRPPPWSSSPGT

SEQ ID NO: 115593 - protein, 75 aa, Oryza sativa
  Clone ID: PAT_MRT4530_19175C.1.pep
GFPKAKGPGPRGPTSTRSSGIWGPLFKSFPGPFLEGHPGPNSFRLPGLLTYWLFPCPGARETLKFGPFGPFSHLE

SEQ ID NO: 115594 - protein, 60 aa, Oryza sativa
  Clone ID: PAT_MRT4530_19176C.1.pep
MAWANTVRWGGSQHLPWHTKSAGYERFQRRRCEIGRCIGMVFHSPSSSSPRRDKRLESAE

SEQ ID NO: 115595 - protein, 93 aa, Oryza sativa
  Clone ID: PAT_MRT4530_19177C.1.pep
MVIGDASAVRARVRSGDYFFFHFFPVDVDIDRLLPFVDRCGSSFFKSLVWAAKRTQYQPVTNVLSLGYRIIVPLPVCHRFDWLISWEILLLRV

SEQ ID NO: 115596 - protein, 154 aa, Oryza sativa
  Clone ID: PAT_MRT4530_19178C.1.pep
SRGSRRRRQEEAGAGQAPAAPAPAPPPCRRRRPGPPAPPPRGGGGCSRWRRPSVRSPRWSRLSSSSRRRRRGEGGDEDDGRRGGRQSCSLSPPPPPPPPLPPSGKAWRWTGRRRSGGPARWRTGAAADREGSGVGGEEARSGVGGEETPGGERR

SEQ ID NO: 115597 - protein, 164 aa, Oryza sativa
  Clone ID: PAT_MRT4530_19179C.1.pep
SRGSRRRRQEEAGAGQAPAAPAPAPPPCRRRRPGPPAPPPRGGGGCSRWRRPSVRSPRWSRLSSSSRRRRRGEGGDEDDGRRGGRQSCSLSPPPPPPPPLPPSGKAWRWTGRRRSGGPARWRTGAAADREGSGVGGEEARSGVGGEETPGGERRERRGDGSRGF

SEQ ID NO: 115598 - protein, 167 aa, Oryza sativa
  Clone ID: PAT_MRT4530_1917C.1.pep
MDISRANEGYTSCGPVVEMSWHRAGVLLLGAQSCLPVPEVPAVGGVGSMAGSINRRGLDLTGFILELRGMCVVLGYPHGVDYQGKQLPEQEGDDAEPHAAWESAVLLAIGTLHQRYLDELQHSPYRYHPRRGGARDYVSHAAASEDPLFVEVEADVWESEQGKSHHP

SEQ ID NO: 115599 - protein, 99 aa, Oryza sativa
  Clone ID: PAT_MRT4530_19180C.1.pep
MAYTGVEIPLPPEAPMATRSPGGGLVRGGKRAQGLTTSQLRALASVSRLFAESPQEEVSRSGGEEEGEGASELKLAIPFAVRRQRRGEGQEQRWQRCES

SEQ ID NO: 115600 - protein, 86 aa, Oryza sativa
  Clone ID: PAT_MRT4530_19181C.1.pep
FFFFFFFFFFFFFFFFFFFFFFFFFLNPPKKSTRLNYLTGKHAVLKGPKKTIKKKKWGNSPQDFSYQFLAPTTLVPKQKGNSFSKS

SEQ ID NO: 115601 - protein, 71 aa, Oryza sativa
  Clone ID: PAT_MRT4530_19182C.1.pep
MNTTSFLLQILLLLAMVILMAMAMEPAAPETMARRSPGNVNANHDPSKQSGSAVHPLNTPCNYPGQAGCPH

SEQ ID NO: 115602 - protein, 538 aa, Oryza sativa
  Clone ID: PAT_MRT4530_19183C.1.pep
MEIERESSERGSISWRASAAHDQDAKKLDADDQLLMKEPAWKRFLAHVGPGFMVSLAYLDPGNLETDLQAGANHRYELLWVILIGLIFALIIQSLAANLGVVTGRHLAEICKSEYPKFVKIFLWLLAELAVIAADIPEVIGTAFAFNILFHIPVWVGVLITGTSTLLLLGLQKYGVRKLEFLISMLVFVMAACFFGELSIVKPPAKEVMKGLFIPRLNGDGATADAIALLGALVMPHNLFLHSALVLSRKTPASVRGIKDGCRFFLYESGFALFVALLINIAVVSVSGTACSSANLSQEDADKCANLSLDTSSFLLKNVLGKSSAIVYGVALLASGQSSTITGTYAGQYIMQGFLDIRMRKWLRNLMTRTIAIAPSLIVSIIGGSRGAGRLIIIASMILSFELPFALIPLLKFSSSKSKMGPHKNSIYIIVFSWFLGLLIIGINMYFLSTSFVGWLIHNDLPKYANVLVGAAVFPFMLVYIVAVVYLTIRKDSVVTFVADSSLAAVVDAEKADAGDLAVDDDEPLPYRDDLADIPLPR

SEQ ID NO: 115603 - protein, 110 aa, Oryza sativa
  Clone ID: PAT_MRT4530_19184C.1.pep
DKGGLGSLCFLILMNLQEDTKVHWNHKHISTQHPSFGRGIVPFSHSSTLGIIHYMHTLFSPCHHQPANANGLCAHFIFISFHFSSFLSSGLANVYTQAFRGHHFITHGLM

SEQ ID NO: 115604 - protein, 52 aa, Oryza sativa
  Clone ID: PAT_MRT4530_19185C.1.pep
LNPFMFPEEIRIFLANTLCRTFCVVGLLFRTLDGYNFMTGREDLGRIQAWLE

SEQ ID NO: 115605 - protein, 93 aa, Oryza sativa
  Clone ID: PAT_MRT4530_19186C.1.pep
FQHSPYICSNEETSYLTYTKAIQLVTRRCLATTIHHIFLCMLAATLDCWLQLDTTSSPYYIYTYTRPRNPRQHLNSSFRVGTERPIYYHFTGQ

SEQ ID NO: 115606 - protein, 60 aa, Oryza sativa
  Clone ID: PAT_MRT4530_19187C.1.pep
EGGSDARPWNGDEPGAPNPGHGVSSRTEGAAEHVPQDVGAGIPENVKAGARRACSLRAKA

SEQ ID NO: 115607 - protein, 74 aa, Oryza sativa
  Clone ID: PAT_MRT4530_19188C.1.pep
EMGVPLTIPQNKQFRKRYMLQSGVPIAPNYSHSWGLADSTLFSWKTLTATMLIKSTNARGRGLLGYCGALSLPG

SEQ ID NO: 115608 - protein, 290 aa, Oryza sativa
  Clone ID: PAT_MRT4530_19189C.1.pep
MVEIWMENSGVVLRWRMNNGRGNGWRNYASCCAAVMACVNGQCATAAARKRAASAATGAAGNGGAGASGGRVGGAADVVERRPVAGGHDGARALLSWRRRRRGRARARVHGGPGARATVHGNGRPRSILSKTDGRDRTVHDRLTGSGNDDVSDDDSDDVSTGGGSGAQARRRTTALWHKRRAPTGRARCGELTGDQRSGGGTTDSAGDEEEAAAEIGLTAATELWRSSAAAKGRTRTAATWRPRRWPSRVTTTTVATTAHDWSGGDDGGAKAHGARALHMTAGEGKGGDG

SEQ ID NO: 115609 - protein, 119 aa, Oryza sativa
  Clone ID: PAT_MRT4530_1918C.1.pep
FYLDLYDPKFQQSHMHACHALSFFNHHATHSSLFTTFQAPAHHPTRGQCSLGSHSSVSSGSASPTIMAWQVAQVPPAVWACSLQSSITVSTTHSTLLPVCQLFATNRLNQSLNGLVGGA

SEQ ID NO: 115610 - protein, 818 aa, Oryza sativa
  Clone ID: PAT_MRT4530_19190C.1.pep
MDLDKSTSTTASLKKLQDDDTLPARGTMQREIGENSDPVVVVFEEQPDKILEWTAKPDLTPSLQSFIDIIDDLRVRGLSGYKVAAHPAFDYSGPEDATRVSPRGLDSDTVARRVGQVMISGPAMASDIPVPLCEKGPAEHEAAINASDASPPPQRRQRLVTIDKKAARAKAAQDGSGAASSASPVVASTDVVVVTRDREGTPSGPAGGLVPTRGPPANALTWGELQAEIEEARAAASSANQRADKPARDLVEAREDLLKMRELVAGNERQRQGLEHRMSELKNNLSEIRGWLRVSYTSLHQLAGECGVTITIPANPDEFSLTSSLVELATAMEEIPFKHATRIGEETSNGIYTGACHVLACVKLAYPDLDLKRALDRGAADDTRKGVMEEVSDLGEYVLPLFEEDVDIEDVQQHGQPEMPVVVPALALETYVQQEDVAKTVRGDEHGDDVLRLWKPSEVARYGSIRNSGAAAWQWLESVGSSEFLAGIPRRIGKRIDEALKQECRRSSHYAGGHVLACIRDHRPQLQLEFLHEGFSRSRRTPAEIDQLAQSMAPLAEKVFQSMDWRWPSWWGPPVRAVFLLAPPQPLPNSAASFPIRRAPPPLRSSSSLWKATVGIAKSSPSSSTPVTPGNSLRARVHGGPGARATVHGNGRPRSILSKTDGRDRTVHDRLTGNGNDDVSDDGSDDVSTGGGSGAQACRRTTALRHKRRAPTGRARCGELTGDQRSGGGTTDSAGDEEEAAAEIGLTAVTELRRSSAAAKGRTRMAATWRPRRWPSRVTTTTVATAAHDWSGGDDGGAKAHGARALHMTAGEGKGGDG

SEQ ID NO: 115611 - protein, 161 aa, Oryza sativa
  Clone ID: PAT_MRT4530_19191C.1.pep
MAATPGSEEVPSTGEGRPELRDGGGVGREQRGGRGEGEENGQKLINEEWREVVERFGRGYIRNLTTFDLDSIGMGMDIRINTGLLSGSLYVIPKIQGVTLTKDNLAKRKWKGGYYFSHPVDSHLGYPSQTGSSDTITVVIATFGPEAGVGSVGMYHLGVFG

SEQ ID NO: 115612 - protein, 44 aa, Oryza sativa
  unsure (1)..(44): unsure at all Xaa locations
  Clone ID: PAT_MRT4530_19192C.1.pep
MLRRRANWDAVAXSGCRGPMRCGGYIPGWNAELWCTVGKPRAPG

SEQ ID NO: 115613 - protein, 81 aa, Oryza sativa
  Clone ID: PAT_MRT4530_19193C.1.pep
MAGAVWWMDKDVDSIGGVDKDVLWVPYSILPVAVLYVGLHVRGKWRNGGGSYMLMLVASEKGVTKTKDSFLRKFRFLTVDG

SEQ ID NO: 115614 - protein, 78 aa, Oryza sativa
  Clone ID: PAT_MRT4530_19194C.1.pep
MDGGLLTKGQPVDVALDAAVGGEPRRSHRACNAAPVVARDREEGKPRATWAEALASCSMQCPRLPLVHVPVGGIEGVE

SEQ ID NO: 115615 - protein, 103 aa, Oryza sativa
  Clone ID: PAT_MRT4530_19195C.1.pep
SSIKEKIMGWVTDEREAFCSVVLDMSNVVNMDTSGLVALEELHKELACLGIQMAIAKPGWQVIHKMKLARLVDGIGEGWFFLTVGEAVEACLANKAGNALECC

SEQ ID NO: 115616 - protein, 61 aa, Oryza sativa
  Clone ID: PAT_MRT4530_19196C.1.pep
SPKFIYTSLYEKFVSLKDPFPNYRVYISVRAHLPHFFMCSRTKITFMFFFPTKFFWFFQSK

SEQ ID NO: 115617 - protein, 779 aa, Oryza sativa
  Clone ID: PAT_MRT4530_19197C.1.pep
MASRSPTNKQISSEDRVRGARGKRHHHSSDEWSMEHAEEHEHGRGGGERDDAAEPEAEQPELEQEELSDSESGAESIEISDLKKRMWKDQMLLMKLEGGRPGGGGGRGGGGLAAAGAGTSSEGQLEEETPEARCRRKAMLRAQDGVLRHMLKMMEACNARGFVYGVIDEAGQPMSGSSDSLRGWWKDNVSFDRAGPMALIGPAAAGDSPQAGGGGLHRLQDIQDSTLGSVLSALIQHCEPPQRSFPLERGLAPPWWPTGEEPWWGTQGETQAHQGAPPYRKPHDLKKAWKVSLLSAVIKHMSPRFDQMRKLVWQSKRLQQKMSAKESDTWSKVIRQEEALDRRLKTSLHITLLDADGGEEDDSDGLEDVVRGAAAQDKRKREYTRSGSGSSSGNSGGGKFPRGGSGGADHHQLAVMLPELAAAADQEGRSPINELMKLYYSCLQQEEGAADGGEAGGEGCDVAAAALAVPPEVLAGVDEVAQDVLFDLIGSYPEVDDILVVHAPPSDLDTMRCGRARLSNHFLNAYARLFPSRIPVRAQGVRRNALPESLVVTASPGAPCPDHPVLVSGDGEVFDPKTGIWSELPEMPFMKAQVLPTAFLADVLKPIATGMASYKGKLYVPQSLYSWPFFFDIGGEIYDPELNSWETMADGLGDGWPARQAGTKLGIVVNEELYTLEPSSSLDSGQIKRYDSEQDTWKTIVPQVPVHDFTDAEAPFLLAGLHGKVHVITKEANNNLQVMQAVLQNNIENSPSEENIIWNILASKNFGSAELVSCQVLDV

SEQ ID NO: 115618 - protein, 72 aa, Oryza sativa
  unsure (1)..(72): unsure at all Xaa locations
  Clone ID: PAT_MRT4530_19198C.1.pep
XXKVXSXXXIXVLXXXRFQGYSNXXXDXXNXDQLXXXXMVSKVXSXKVNYQLSXTIXPSRNSXHLITVLNMA

SEQ ID NO: 115619 - protein, 60 aa, Oryza sativa
  Clone ID: PAT_MRT4530_19199C.1.pep
MAVRAGEDTSTGEWCSRRIWEEEREGGGQQEAVSWSERAGTIDGLQPTVQIKAAAAAQSG

SEQ ID NO: 115620 - protein, 87 aa, Oryza sativa
  Clone ID: PAT_MRT4530_1919C.1.pep
MAPLHLFTGKKRHWCRGLAALHLFMGMKWHMYWGWALVCWLDCSPCIVVPVGLFDLMLSNMWLLLVTAIISTVEFVIYMLRPIPGHV

SEQ ID NO: 115621 - protein, 103 aa, Oryza sativa
  Clone ID: PAT_MRT4530_191C.1.pep
AQHWCLCSCPVQQCFASPASAVMADSPYLIHGALTAPLFSLVKSCLVRLLNSGVEMWISASASTETYSIELALSLFCIECWQRCSRPRIALKLPSPHSVLIQT

SEQ ID NO: 115622 - protein, 2457 aa, Oryza sativa
  Clone ID: PAT_MRT4530_19200C.1.pep
MEYHECEENCPQLAGILGVLFRLLALRFAWKHDIFCCCLNAYFEEVETSFVVTYDLPRCCSILSTKDIETDRHIVPLWQLTCSFVPMASLVRHDSNPTQYSWWWVSHISPKNSKWLQENVTDMDVMVKAMIKLINEDADSFARRAEMYYKKRPELMNLVEEFYRAYRALAERYDQATGALRQAHRTISEAFPNQMPSMSEDSPSSGQDVEPRTPEVLMPTRAPFDLDDLQDAAGVSPHLLTVKRNGTQPDDIGFSSSRKGLKQFSDLFAGSDSSQRVNFSDGKGQCSLSLRLWIRRSGCRSKNLNKSRKEIESFHLSLQDEMAKRKQAEDALCSLEKQYAQSQKEINRLTLDMEMANDRLNDFNLVRLNLENTVCELKKEVTSLEVKIQILVQELEQKREEADVMHAQLQDEHSNHMHKEAALHALENLHSQSQEDFNLVKLNLENTVGELKKEVTSLELKIQIQAQELEQKREEADTVHAQLQDERSNHMQKEAALHALENLHSQSQEDFNLVKLNLENTVCELKKEVTSLERKIQIQVQELEQKREEADAMHAQLQDERSNHMQKEAALRALENLHSQSQEEVKQMARDVEHSNKKLSDLENNNLKLHDLSQGLKKTVAELNSMKDSALLQQQKSSEKVSYLEAQVLVVRSEMEKMVQKTQMLDQELEHKNKEISELQNSLQEQVQKCILAETSLLRLEDLHTNSQKEAKTLAHDLERLSEQLTEVENDRLDLQNISRELKNTISEINSEKDLMLLQQQHSLERQSYLEAQLLDALSEVEENKKEAQLLEENLAHKNDELNDLQNNLEEEGHKRMHAEAALSMVENLHSKSQEEVGKLVMDLDKLENELSELQGRNSRMEELSYELQNTISLLNSEKDAALLQQQLSSERACDLMSQLSKIQLELEKAEEKMQTMEQKLADKNEMVDFLQLSLQDEGKKRVEVETALISSGNLYSQSQEDNKSSEYKSTILLLNSEKDMSVIQYKQSSLRIYELESKLSGVQEELDNAEQKVQMLDKELKEKREVVETMQASLQDEAQKRMKGEATLLTMTNLHTQSQEEVNRLTPEIERLNRKLNEVENVSCELKNTILLLNSERDTTVLQHKQALVRVSDLESELSDVQAELVNAEKNVQILDKELKQKREEVDSLQASLNEEAQKRIEGEVALLAMENLHSQSQEEVRGLVLKIETLHGKLNEMENSNRDLKNMICKHSEEIHVLGEQNLSAELTIKGLHDQLEKFTEMNIGLQNEVGIHVGEKEVLQQDLARQKEDKDILEKHLCSLEHELKAVNIRVATQQHLIEELQSKNIELEEVCNACDVEKTLLLEKLHGMEELSTEYSILKKSFSNAIVEMEDLKEIVKELEASKNSLKYDVSLHATEKDALALELETLGKRCADVLEEKSILETSFSNVNYELQELRVKYKDSEESSRSYLADNTALLAEKHKLLSQLESTAVSLKFLEDKHADLRDNHGSLLSEKVLLCNQVKNMQDQLGIKNEQHEALLKLHQMQMLEHEQQKCADASISTLILENSLVDARDKNLALFNECQKFIQATDSAEVLIAQLKEEARKEEEDKKALLNRNEKLRDGISEQIKVLNICKDLGPTDVVHDEIMLQTMSRETFNHVKHKEETEERNVFMDAELSVLGAILAQTVIGFRALHQQNCELVEEVESGAAELLFLQKENHKLIELNEQLEQRLQLGGNREEMLKIEILGLCKELSGLRQSYQTSQSEICNLTKKYDSLLQEYKVLVEKYNALDDENAAVIAECIKLDLLSSFFHDLTVESASVLVSLDNDMAMLSSVRHELDHEVTMLNRRAKILEMDFQHLKCTLENLLEALGSRLVLSEFDSNTSKIICQELTIECNSSMTQLMQKDDKLRKVDEKVQFLQERNQELCRVLRDLEVAVEDAEGVKVDLEKKITTLTERGAVQDNETRLLREANNTLQVEVGIHEQKEESLMSTFETMRKEAEQHEREITLLVCDTITRSVNTMVLEEQVLEMMMEREVLETRFFTEKDMLMKEISSRDAYVDDLQKRVASMRGENAGLMAELAAYLPLVASLSDQIRALEELEDGTLLLSELNKEGKLEFVQKDRHVPESQDDSSGALKLRSLIARVEALHVVILDAKGRRDKEFTESVAQLEAANMEIQELKARKGSNAKEECTEDDRQKYDADNSKGKHVQIMKDIELDQVSTCALYGTGATIYPLGGDANVELDDEMLQLWETAERDCKNQTAKSSSSENDIQAVEEVKSEYPSFELARGRDPGIDRLEISAVSLEPQQLWSKNVLDKLASDAQRLSIVQASIEEIKQKMVGASKGKSTVSSEYSSIRAQLQEIDGSVLEQIDFNCNVTKKAENYPAFEVSAELEGYSSRRKISEQVQKGSEKVAKLELELQKIQYVLLKLEEEHEYKRVKAPEKRSRVLLRDYMTARKDKNDAGQKTKKKRIPFCGCVRIKSRTEP

SEQ ID NO: 115623 - protein, 204 aa, Oryza sativa
  Clone ID: PAT_MRT4530_19201C.1.pep
IRKLLSQLESTAVSLKFLEDKHADLRDNHGSLLSEKVLLCNQVKNMQDQLGIKNEQHEALLKLHQMQVNDYEEMVSSLQDKIRHMDQMLEHEQQKCADASISTLILENSLVDARDKNLALFNECQKFIQATDSAEVLIAQLKEEARKEEEDKKALLNRNEKLRDGISEQIKVLNICKDLGPTDVGHDEIMLQTMFSWNFQPCKT

SEQ ID NO: 115624 - protein, 52 aa, Oryza sativa
  Clone ID: PAT_MRT4530_19202C.1.pep
MFPKVGFFDRPLLTGKGPLKNFCNHLPEPVPNKPWVFPPKFPPGSLMAPPPF

SEQ ID NO: 115625 - protein, 49 aa, Oryza sativa
  Clone ID: PAT_MRT4530_19203C.1.pep
MHKVSTRAKIEIREEAGRWGKAEKVVLTLKIRRRHLGKRAGVVAIGRDE

SEQ ID NO: 115626 - protein, 437 aa, Oryza sativa
  Clone ID: PAT_MRT4530_19204C.1.pep
MGNVVFLHVSRPDVVRDINLCVSLDLGKSSYLKATHEPLFGGGILKSNGEAWAHQRKIIAREFFLDKVKGMVDLMVDSAQTLLKSWEEGIDKNGGTIDIKIDDDIRAYSADVISRTCFGSSYIKGKNIFLKIRELQKAVSKPNVLAEMTGLRFFPIKRNKQAWELHKQVHKLILEIVKESGEERNLLRAILLSASSSKVELAEAENFIVDNCKSIYFAGYESTAVTAAWCLMLLGLHPEWQDRVREEVQELTMVIQETLRLYPAGAFVSRQALQELKFGGVHIPKGVNIYIPVSTMHLDPNLWGPDVKEFNPERFSNAQPQLHSYLPFGAGARTCLGQGFAMAELKTLISLIISKFVLKLSPNYEHSPTLKLIVEPEFGVDLSLTRVQGKMSMDKWFMSTSYGYVVSTKRQHILETLKKIPFSSSGYHLKVNKSMMD

SEQ ID NO: 115627 - protein, 917 aa, Oryza sativa
  Clone ID: PAT_MRT4530_19205C.1.pep
MATATAALLLLTLAAILAAAGAVNDDVLALVVFKSGVSDPGGVLAAWSEDADRACAWPGVSCDARAGRVDAVALPSAGLSGRLPRSALLRLDALLSLALPGNNLSGPLPDALPPRARALDLSANSLSGYLPAALASCGSLVSLNLSGNLLSGPVPDGIWSLPSLRSLDLSGNQLAGSVPGGFPRSSSLRVLDLSRNLLEGEIPADVGEAGLLKSLDVGHNLFTGELPESLRGLTGLSSLGAGGNALAGELPGWIGEMAALETLDLSGNRFVGAIPDGISGCKNLVEVDLSGNALTGELPWWVFGLAALQRVSLAGNALSGWIKAPGDNASALQELDLSGNAFSGVIPREIASLSRLQHLNLSSNTMSGKLPVSIGRMALLEVMDVSRNQLSGGVPPEIGGAAALRKLLMGSNSLTGIIPPQIGNCRNLIALDLSHNKLTGPIPATIGNLTGLQMVDFSENKLNGTLPVELSKLANLRVFNVSHNLLSGNLPISHFFDTIPDSFILDNAGLCSSQRDNSCSGVMPKPIVFNPNASSDPLSEASPGAPSSQHHKKIILSISTLIAIVGGALIIVGVVTITVLNRRVRSAASHSAVPTALSDDYDSQSPENEANPGKLVMFGRGSPDFSAGGHALLNKDCELGRGGFGTVYKAVLRDGQPVAIKKLTVSSLVKSEDEFKRQVKLLGKVRHHNVVTLRGFYWTSSLQLLIYDFVPGGNLYQHLHESSAERSVSWMERFDIIIGVARALAHLHRHGIIHYNLKSSNVLLDSNGEPRVGDYGLVKLLPMLDRYVLSSKIQSALGYMAPEFTCRTVNVTEKCDVYGFGVIVLEILTGRRPVEYLEDDVVVLCDVVRAALDDGRVEDCMDPRLSGEFSMEEAMLIIKLGLVCTSQVPSHRPDMGEVVSMLEMVRSSQGTPEDDLV

SEQ ID NO: 115628 - protein, 95 aa, Oryza sativa
  Clone ID: PAT_MRT4530_19206C.1.pep
GEQSMEVLEQVAELAKQCLEISGEKSPSMREVAEELDRLGKLSLHPWGQPNSGELAALLGGSPSMAADSDQIELSTSTRNISFSDTAYIGIRSPR

SEQ ID NO: 115629 - protein, 71 aa, Oryza sativa
  unsure (1)..(71): unsure at all Xaa locations
  Clone ID: PAT_MRT4530_19207C.1.pep
YHISPPWASALNTYXIISSLPLRAGLLLEXYHYPWVRXXXNKPXXYXPQKCSXXYLXKFLXNKKNGLVXRS

SEQ ID NO: 115630 - protein, 50 aa, Oryza sativa
  Clone ID: PAT_MRT4530_19208C.1.pep
HGETRERHMLHCTLDSALLCDPSNRAHTLSLHCTHTQVRSTSSTDNVHTF

SEQ ID NO: 115631 - protein, 302 aa, Oryza sativa
  Clone ID: PAT_MRT4530_19209C.1.pep
MRGQTGPLEAGMVLLGMADTEPTEPASVALDHLHAGSLLVTLGGCRLLDGLWRSCPMTSPRRLWRRPGADTDDDRKYPIIEYTIVEFLSVSLRNSMSKLNNTGGDMGYLSSVIPTDGSPVSGGGLSQNGKFSYGYASSPGKRASMEDFYETRIDSVDGQIIGLFGVFDAIAVSKDHKPDQTDERQRIEDAGGFVMWAGTWRVGGVLAVSRAFGDKLLKQYVVVDPEIREEVIDHSLEFLILASDGLWDVVTNEEAVDMTRSIHDPEEAAKKLLQEAYKRESSDNITCVVVRFLHGQGSSGYA

SEQ ID NO: 115632 - protein, 67 aa, Oryza sativa
  Clone ID: PAT_MRT4530_1920C.1.pep
LTHTYTRHLYHTLYNFTHGFGCGTRGMWASRVYISIRTTSILRGHTCGLSLYIRTHPSLLCGYYPHV

SEQ ID NO: 115633 - protein, 185 aa, Oryza sativa
  unsure (1)..(185): unsure at all Xaa locations
  Clone ID: PAT_MRT4530_19210C.1.pep
MGYLSSVIPTDGSPVSGGGLSQNGKFSYGYASSPGKRASMEDFYETRIDSVDGQIIGLFGVFDGHGGAKVAEYVKQNLFSHLLRHPKFISDTKVAIDDAYKSTDSEFLESDSSQNQCGSTASTAVLVGDRLFVANVXGDSRAIICRGGNAIAVSKDHKPDQTDERQRIEDAGGFCNVAXTWRVGG

SEQ ID NO: 115634 - protein, 337 aa, Oryza sativa
  Clone ID: PAT_MRT4530_19211C.1.pep
MGTMVGHVAPGAGFILIGMWQLFNHIRLFALRPSSYAAPVWFPVRGVRHLELILVIVGAAISILMELVIGPARHQPFDDDGTIPSNHLHNFEHASISLALLVYAAVTIHMDRARAPMRDAVSQLVAAAAFAQQLLIFHLHSADHMGVEGQFHWLLQTVIAVTLATTVLGIPCPRSFAVSLVRSASLVFQGVWFVVMGVMLWTPALIPKGCFLNLEEGHDVVRCRTDEALHRAKSLVNLQFSWYLTATVVFVVVFYLHLTKLYPEEPRYLPLVKGGGGGGDGDSDGGRFSIGDDEDDLEAAKGGFGHVAGGGNAVEIERQVASTPATIITKIKEEART

SEQ ID NO: 115635 - protein, 58 aa, Oryza sativa
  Clone ID: PAT_MRT4530_19212C.1.pep
MEAMRPSKSPHICAEVVIQATIGPICQLLRMMKGGSTGFNRNIPQGSSPLPEDIMASG

SEQ ID NO: 115636 - protein, 236 aa, Oryza sativa
  Clone ID: PAT_MRT4530_19213C.1.pep
MDWYAWLCRAGLHPDVAFEYARLFARNELAADDLRHLDHGLLATMGVPIAKHRLEILKLARRESPPSSSSSSSLAAVRLPWRATRLLAAAARRAALSLAARLRSVARRDRAAVAVAPRPPPPPQLWKPPRARAPPPPSATRNGGRKMALLRHLSKPMLTNHSSGGGGGGKRTRTTNGAATTYKAAAPAAASAAAAAITGCFAANPDAYSYSDDEFDLYDDGEDMRWESMFQDLKPT

SEQ ID NO: 115637 - protein, 76 aa, Oryza sativa
  unsure (1)..(76): unsure at all Xaa locations
  Clone ID: PAT_MRT4530_19214C.1.pep
FKILXSSXXGPXXAYITXLXLFCLPXQXLPQQLKGLTDNFKEKXHCLLGLCXXHLXKLSCXLYSLFXLHKMAVLLR

SEQ ID NO: 115638 - protein, 176 aa, Oryza sativa
  Clone ID: PAT_MRT4530_19215C.1.pep
MAASALLSPVRPLAGTTLSFGVPYQNKRRIPTMRVYCAADEEEEVNDLGVNVALSMLKFYKREISPLLPSSCRYVPTCSQYSMQAYKKYGVAKGTILTAWRLCHCNPLGGHGYDPPRWFGVRLYIRKDSIAYCLPMQLSQARVFRSSTAPDKGNLFVYSSIDSCHVEKVIRCSEFL

SEQ ID NO: 115639 - protein, 43 aa, Oryza sativa
  Clone ID: PAT_MRT4530_19216C.1.pep
KNMCRRHLQTHIKRLPPFTGYLFYRKVVDVRTHGPIPDIQFFL

SEQ ID NO: 115640 - protein, 67 aa, Oryza sativa
  Clone ID: PAT_MRT4530_19217C.1.pep
WRIASSASMACSVTCAASATSSRRATSTMPRFGRRGRMTTASVYSVAMMIAPPSTASGSTAAPTPVG

SEQ ID NO: 115641 - protein, 219 aa, Oryza sativa
  unsure (1)..(219): unsure at all Xaa locations
  Clone ID: PAT_MRT4530_19218C.1.pep
WQSALAATACPPSPTTSSSASSTSRTPWRPRPPACSRGGSARSGAHPARSTSPRASPAPAAETPSSVPLMRRSPPPAASSRGSPYTSTTEITAATAPPCTTCSEITTWSTXAAASGSTTSSSPPFRRKPSACWTSPTAATXTPASAAAAATAFPWLDTLRLRHCIVRRTSTISTASSTPRQCSPPCTSSPSTSCPMATAPMSGQSGPPASASRRPPCSC

SEQ ID NO: 115642 - protein, 372 aa, Oryza sativa
  Clone ID: PAT_MRT4530_19219C.1.pep
MIDREPAGSSRHGSNMDPSINIPVNRDAITEEVAAAFAESEVIPERYCRPDEVHDGIVVGHDDDEAYELPVVDMEKLLDPELAEAEIAKLGSACQDWGFFQLVNHGVDEQVVNEMKDSTVKFFSLPLESKRTVEIQDNGFEGFGHHYRRASGKLDWAESVILLTQPIQERNPEMWPTNPSSFRDALDKYSAEMTKLAMRIASIMATDLGVDQEALVGAFRDKQQSMAIHHYPPCRHPDKVIGITPHSDGLGLTLLLQLDDTPGLQIRKDGRWLPVRPRPGTFIINVADILEVLTNGAYKSVEHRVLADAEKGRTTIVTFHEAYVDGMVKPIPEVLKLNGAEARYKSIERIEYIKGNFVALSEGTRFLESLKI

SEQ ID NO: 115643 - protein, 385 aa, Oryza sativa
  Clone ID: PAT_MRT4530_1921C.1.pep
RPGRAIRSSSLYPLLMDLLCGEMEGTPNKSVQSFAGSRTEKSTGSSHHREAEQNDSFTRREYTCADFIEALRLIDQEAFKCSIVLNDFSMRANITEPSYRTVKLDGICSTFVSSVLAGGYTYTGEVATTDGDAKENAARVAIKSILVDIIAVTRSNHMLESIRSNKPTGTTIQGEQSSQQTSAHPAVIFTPPASNNIPCAPHHHYMLHAPFAPLEQMQWRHPGTPQMVPVFPHEQIQWRHPTPVHMPFHPHEQMQCRQSPAPMPFLPREQMQWRHPAAPMPTFPPHEQMQWHNPVAQMAYLPPEQMQRNVPIVHTPSEMMQMWQLPQSISSSNPVLQNGLYSNTGGDDDMVVEVGSAEETMTLSGTKRKMDQTEEAEGKQAKISK

SEQ ID NO: 115644 - protein, 117 aa, Oryza sativa
  Clone ID: PAT_MRT4530_19220C.1.pep
RHLVASVAISVLLCTSIAICKVCLSSIQITGHLSGQFARFVFLRFKSLDICLVKMKFTMLFFVVSACNCCNIFRNTLLYLVLSEKLYFCCTLVRCSTIAGLYLICHLCFLTHSKNCF

SEQ ID NO: 115645 - protein, 80 aa, Oryza sativa
  Clone ID: PAT_MRT4530_19221C.1.pep
GDGLVREIEFRRPVVVSILSERRVHAPRGLKGGRNGARGANYLVKKDGRRVYLGGKNTVMVNAGEILQILTPGGGGFGSP

SEQ ID NO: 115646 - protein, 372 aa, Oryza sativa
  Clone ID: PAT_MRT4530_19222C.1.pep
MEAAGGAGGASGGGGESQPPKTLVDWALEILGTADPDEKARLGDLAATEWLRGAIPLPYDPSRPARPPPDRPARSAAVRLLPPSRAPKLGKGGSAQSRLALLHSLAHTESWAVDLSWDIVARFGAPLRMPREFFDDFARVAQDEGRHFAVLSARLRELGSHYGALPAHDGLWDSATRTSHSLLARLAVEHCVHEARGLDVLPTTISRFRAGGDEQTAKLLEDVIYPEEITHCAAGVRWFRYLCLRSRNGDPTASSIPQAITQCSELPRDGTGDIHKVEEVEGDGPKAELAQASNGDDKTVQQVEDELAKCKLVDIGDDVEAAVIRTFHSVVREYFRGPLKPPFNTEARKAAGFEPAWYEPLAVKEVEGQAVE

SEQ ID NO: 115647 - protein, 27 aa, Oryza sativa
  Clone ID: PAT_MRT4530_19223C.1.pep
MSVSNAHGHFRTGIYGRSFVQVNQSAV

SEQ ID NO: 115648 - protein, 742 aa, Oryza sativa
  unsure (1)..(742): unsure at all Xaa locations
  Clone ID: PAT_MRT4530_19224C.1.pep
MGTRMPTLRRLSATLSSVLLEWILMLLLFIDAVYCFLVTRFARLCRLPAPCPFCSRLDHVLGNEKPCFYRELICKTHKSEISSLAFCRLHQKLAGAQSMCERCSDSLVENNDDRTDEPTMAATLPDSNQGLYSHDTRICSCCAQHYTQQRPTMFSRMITELEPAEAVCSPKICTDYSILHQVDKSLDKDICHQSDHSIHERYSVLQMTSGSEDEAPCADDGKISHHHKTNCMEEDLNEDATAEKFAASSTELYIGEGQMEAEDASLEKQTCQHDPLAVKEESGLTDDLEGHRSEITVTSSREFHQKSALVDDDPVNFRDDHVSQVNSSSEAVDEAEDYAKEAEQTCDMVTHEAALXDPSNTNSKDPTAKGFVEEAPISPQAIRPNSEVFQGLNVIEEHPQTSATIGERRPSLSTQISMNEAYKLAIGAKSSLPSPTLTDVILGKDSSSSVNEELRLLLSQLSASRGLEAPWVDPGPSPRAYGRGDDLIVQNITNRISIERNASGLESLEGSTVSEMEGESATERLRRQIDLDRKSIHLLCKELEEERNASAIAASQALAMITRLQDDKAAMQMEALHYQRMMEEQAEYDSDALAKANELLAQREQQIEELEAELENYRMQFAGGPTEKQSNQVSFNEENIAETLLDETGLEAPAITTPSGINSLVSFEEERAYIVDCLTKLEQKLQSYSNNSTNIHLSNSDVIEDYLSNKMHVVDDGSLQCQESSREAQEPVFLAKEAHSST

SEQ ID NO: 115649 - protein, 726 aa, Oryza sativa
  Clone ID: PAT_MRT4530_19225C.1.pep
AVEVSMAATLPDSNQGLYSHDTRICSCCAQHYTQQRPTMFSRMITELEPAEAVCSPKICTDYSILHQVDKSLDKDICHQSDHSIHERYSVLQMTSGSEDEAPCADDGKISHHHKTNCMEEDLNEDATAEKFAASSTELVRPLEMNVPMETDVGDSYDISLPYVLVDDHPDSIIGEGQMEAEDASLEKQTCQHDPLAVKEESGLTDDLEGHRSEITVTSSREFHQKSALVDDDPVNFRDDHVSQVNSSSEAVDEAEDYAKEAEQTCDMVTHEAALKDPSNTNSKDPTAKGFVEEAPISPQAIRPNSEVFQGLNVIEEHPQTSATIGERRPSLSTQISMNEAYKLAIGAKSSLPSPTLTDVILGKDSSSSVNEELRLLLSQLSASRGLEAPWVDPGPSPRAYGRGDDLIVQNITNRISIERNASGLESLEGSTVSEMEGESATERLRRQIDLDRKSIHLLCKELEEERNASAIAASQALAMITRLQDDKAAMQMEALHYQRMMEEQAEYDSDALAKANELLAQREQQIEELEAELENYRMQFAGGPTEKQSNQVSFNEENIAETLLDETGLEAPAITTPSGINSLVSFEEERAYIVDCLTKLEQKLQSYSNNSTNIHLSNSDVIEDYLSNKMHVVDDGSLQCQESSREAQEPVFLAKEAHSSTVSRKTDLSTLQEEISNLNKRLKTLEGDRNFIEHSINSLRNGKEGVMFIQEIASNLRELRAIAGSK

SEQ ID NO: 115650 - protein, 162 aa, Oryza sativa
  Clone ID: PAT_MRT4530_19226C.1.pep
MGTRRRGAVAAVTAVGSDGGGGGDEAEGSGDGSGREEEEKAEEVVYGDDCGGGEQRRRMRRRRRACFVLQGGARAAAAALASRRFFGAKAGRVLRPLFFSYFKELVGKEVTVELKNDLAIRGTLHSVDQYLNIKLENTRVVDQDKYPHMQTQCFLVLYGGLL

SEQ ID NO: 115651 - protein, 806 aa, Oryza sativa
  Clone ID: PAT_MRT4530_19227C.1.pep
MAGQTVPTMAGQTVYYTGQTVPTIAGFHTTTSSTDFNYYSSPVNTGSHATSHIPNTYNDPNRGYLHDTGYGQYNHIAPQQPPLRPLNPPPNPPRPETMEELISVIIRDKFGIEARNRARVYQKPYPDYYDNIPYPRGYRVPEFTRQKHDESVTDYIERFRDARNRCFSLNITDKDLADIAYNGLLDSIKERLNGQIFLDVDHVLHEALAQESRVDDNSLNASLDDNAITNIAEPSVGSDCVTSLSNDGIAESSDGLDCASSLDNDTVENIAELSDGSNCITRESEIVLSPKTESQIDHVNVGKDSDNVLRDGNEIESKIAMYTYQRPYPEHIDSVPYPQGFDVPNFTKFTGEDARTTMEHIGHFVDQCGKAGSADLLKLKFFPLSLSNFASTWFSLLAPNSISTCLMEQRPIDDSSVTYDTILVTPIAKTGIVSNPLPIAPIDFDNKKVVIRPSQAESTKGKSVIIGDPRSETIRINNAKAEDHKVVKDESSSSQKTKKPKLTFEMLMAKYKKGLAGQRFDNQTSDSKRLRSSRRKRIGQTLKQLEPSTIPTSYKPPTRPFSQKNRSDGSKVKNVKKVWVRKEAKASEVVTIKEESQDVRVPTGDAVKTIQAEKTEGDIATVNNGGLTGTSSRSDRRLTAGPTEPPGWSNRQSMAGLTGPRGGMTGGTREAELIVNSDICAQELEENMRIPLIEYLKYPSFRVDQKIRRRAGFYWPKVIDDCFKYYRGCEACQRFNNVQLASTAVLNPIIKPWPLRSWVLNFIGQIYPSSLKGHRFVLVAMDYFTKWAEAVPSRILLTWRLMDKPS

SEQ ID NO: 115652 - protein, 105 aa, Oryza sativa
  unsure (1)..(105): unsure at all Xaa locations
  Clone ID: PAT_MRT4530_19228C.1.pep
CFLTANKGFIGISADELSGCCIGLQGLHPIGFYXIILLIXLYYHQSIVFISLSTXGYIADCSKPYRXRLQQTDWHARISSTFGPALELSTSPRPVCVFRINTSPP

SEQ ID NO: 115653 - protein, 392 aa, Oryza sativa
  unsure (1)..(392): unsure at all Xaa locations
  Clone ID: PAT_MRT4530_19229C.1.pep
MTGRDTGLTAPYAGQTVPTIAGQTVPYLGQIAPPVAGLTAPLTTGQTRPWAGRTGSLGVSPGFHTTTSSTNFNYYSSPVNTVSHATPHIPNAYNDPNRGYSHDTRYGQYNHIAPQQPPLRPPNTPPNQQRPETMEDWIGDIIRKSFRKIDLSDLTSVRQRYNEPVIDYIKRFRDVRNRCYSLKITDKDLADIAYDGLLDSIKERLNGQIFLDVDHVLHEALAQESRVDDNSLNANLDDNAITSIAELSVGSDCVTSLDNHGIAKPSDGSDCVGSLDNDAVENIAELSDGSDCITSESELVLSPKTEPQIGHVNVGKDSDNVLWDSSEIESKVAMHTYXRPYLEHIDSVSYPQGFEVPNFTKFIGEDARTTMEHIGQFIEQCGNKSGTIFVFK

SEQ ID NO: 115654 - protein, 120 aa, Oryza sativa
  unsure (1)..(120): unsure at all Xaa locations
  Clone ID: PAT_MRT4530_1922C.1.pep
DGSRAGRRYFVAAGERSASFARPTALSAGITLPDAIRNRYRVEEFTKEEQDEMYVFSSSQKRVSVELVGKNKVEEKLKNLNDLTSASVSYXGVSSIGPGDELKNLAPNLRQLDLTGNLLS

SEQ ID NO: 115655 - protein, 123 aa, Oryza sativa
  unsure (1)..(123): unsure at all Xaa locations
  Clone ID: PAT_MRT4530_19230C.1.pep
CLAVDVLGAGVRAGVKVPVTHVERRELPXVQVRSGEVASAVEELMGDGAAAAARRARARELAAEARAAMADGGSSARDLADMVWHVARRRDMVVVDPPPPPSPGGIAGGHGKMVSPSVASEVA

SEQ ID NO: 115656 - protein, 70 aa, Oryza sativa
  Clone ID: PAT_MRT4530_19231C.1.pep
DQFCLEDLPELYPGFDTKQGFIMVYQIEYYKKSVYRSNISWVTASHFFRHVAGSCADEAFECMFLFRFCT

SEQ ID NO: 115657 - protein, 48 aa, Oryza sativa
  Clone ID: PAT_MRT4530_19232C.1.pep
MSKQEVMKGENAHMKVPERGDAGAFHDKDLAGVGRYAAEAGDMHIAEA

SEQ ID NO: 115658 - protein, 43 aa, Oryza sativa
  Clone ID: PAT_MRT4530_19233C.1.pep
NRTAPKVHILGALFFGTTYPISLGHHSKARFSDLFEKPGGGCW

SEQ ID NO: 115659 - protein, 135 aa, Oryza sativa
  Clone ID: PAT_MRT4530_19234C.1.pep
MSNNKVLTLEEVSKHNTKDDCWLIIGGKVYNVTKFLEDHPGGDDVLLSSTAKDATDDFEDVGHSTTARAMMDEYYVGDIDATTIPTKVKYTPPKQPHYNQDKTPEFIIKILQFLVPLAILGLAVAVRIYTKSESA

SEQ ID NO: 115660 - protein, 68 aa, Oryza sativa
  Clone ID: PAT_MRT4530_19235C.1.pep
MVDDGVLKKFKFEYIARCVNYMYHRAGADVGGSLMTMPRIPAQMEKTGPGRRFNLKKPEPEVSTVRSS

SEQ ID NO: 115661 - protein, 27 aa, Oryza sativa
  Clone ID: PAT_MRT4530_19236C.1.pep
GPVSWSCLEVVHQFVVLLASPAWTVLR

SEQ ID NO: 115662 - protein, 330 aa, Oryza sativa
  Clone ID: PAT_MRT4530_19237C.1.pep
MAQPQRPLQVPDITKSTHSGGNTVLAYASSAMQGYRSTMEDAHATIENLDALTNTSFFGVYDGHGGSAVARMDEMLRNQAASKELTEYGSGNEYWRTAGRSWLRCAPCVLGPVYCGPLAEGCTACVVLIRNTQIVVGNAGDARCVISRNGQAIALSNDHKPNFPEETQRIVAAGGSVSFSRGSHRVNNGIAVSRAIGIAYMFVGGDLSYKNNKKLRPEQQLLTCSPEIRADQLTDDTEFLVIACDGVWDVLANQAVVDFVRLHLNNGVELSVICESLLQEAITRDPPSTDNMSVILVRFLHPEGNRGARAATSSTSTGTVPSRHSKSISL

SEQ ID NO: 115663 - protein, 950 aa, Oryza sativa
  Clone ID: PAT_MRT4530_19238C.1.pep
MEQLRTIGRELAMGSQGGWGQSKEFLDLVKSIGEARSKAEEDRIISRELDHLKRRLADPDVPRRKMKELLLRLVYAEMLGHDASFGHIHAVKMTHDESLPLKRTGYLAVSLFLDERHDLVILVVNTIQKDLRSDNYLVVCAALTAACRLIGEEAIPAVLPQVVELLAHPKEAVRKKAVMALHRFYQRSPSSVSHLVSNFRKRLCDNDPGVMGATLCPLYDLILEDPNSYKDLVVSFVNILKQVAERRLPTSYDYHQMPAPFIQIKLLKILAVLGSGDKQASGNMYMVLGDIFRKGDTASNIGNAILYECICCISSIFPNAKMLDAAAETTSKFLKSDSHNLKYMGIDALGRLIKINPDIAEEHQLAVIDCLEDPDDTLKRKTFELLYKMTKSTNVEVIVDRMIEYMINITDHHYKTEIASRCVELAEQFAPSNQWFIQTMNKVFEHAGDLVNIRVAHNLMRLIAEGFGEEDEGADSQLRSSAVDSYLRIVGEPKLPSSFLQIICWVLGEYGTADGKYSASYIIGKLYDVAEAHPTDDTVRAYAISAILKIFAFEIALGRKIDMLPECQSLIDELSASHSTDLQQRAYELQALLGLDKQAVENVMPADASCEDIEIDRNLSFLNGYVQQAIENGAAPYIPESERSGVVSVGNYKAQDQQETSAHALRFEAYELPPAASQASISPTTDLVPVPEPSYYKEDHQMSRSQPSGDSLSGEFGLKLRLDGVQKKWGRPAYSSSSTPSSSTSSQQATNGGVSSEVGGSTSSQARESTYGSKRQQATEVSAEKQRLAASLFGKADRKTQAGRKTAKESSSTEKVATANATPQPAKEQVIPSAPPPDLLDLGEPVSSSPPLADPFTQLEGLLGPASASPVVSETPASSTSKTPDLMSIFSDDVQTGVTSGSTEPSLGVNVVAAKKGPSLQDALQKDAAARQVGVTPTGNNPILFKDLLG

SEQ ID NO: 115664 - protein, 112 aa, Oryza sativa
  unsure (1)..(112): unsure at all Xaa locations
  Clone ID: PAT_MRT4530_19239C.1.pep
AVPEHKVSVGCAPGGDGGDGGXELWVSIDGKRAVQARRLRWNFRGNQTVFVDGQPVDVMWDLHGWWFRREPPAPGWAVVMLRARSALDTRLWLEXEAAAPAFYSRTRGRTRG

SEQ ID NO: 115665 - protein, 99 aa, Oryza sativa
  Clone ID: PAT_MRT4530_1923C.1.pep
GAAAGESKAKKFLKRALSFTGSSSLGSAMVGILWPRTESCTAEQGSRRPTAAQRGRLNYNEMETGLLPRACADRRHTMEKDDDTVAVDDGGRRAVAGGG

SEQ ID NO: 115666 - protein, 127 aa, Oryza sativa
  unsure (1)..(127): unsure at all Xaa locations
  Clone ID: PAT_MRT4530_19240C.1.pep
KAVETGDGGCGXXTXXGAXXQRCSWCSGKXXYXXXSPGXXRIYXMDXXTVDQSFDXALNLLALXPSLXVGRPXLLXXRXNKTXXXVVXXXXCRSMLDGSLASXXGSSIIXGISSXXPAPXPXAXQXS

SEQ ID NO: 115667 - protein, 151 aa, Oryza sativa
  Clone ID: PAT_MRT4530_19241C.1.pep
AKRRATPKKNNGGQPEPPNTNPKQKPNPPPEEKKKKPPKHKPKKTRAGKKKKPGQKKPPPEPTKPPPTPPAPANGPARPDPGAHPGKPDPAREGNQPSLRGNGKKPGETKEKAAPRGKKKSHNQKKKKAGSKKGKAGGAEGRGKPQIRGGE

SEQ ID NO: 115668 - protein, 78 aa, Oryza sativa
  Clone ID: PAT_MRT4530_19242C.1.pep
SRSTLEKCVHLLASRSHSDLTLASSTVVEYAVGASSDILVCLIYTDPQSKTVPIASGGRHHTSINNISQVYKMTLLIK

SEQ ID NO: 115669 - protein, 94 aa, Oryza sativa
  Clone ID: PAT_MRT4530_19243C.1.pep
HASDHASADPRATASASLSLSTTTTPRAPREGGGRRGPTPEGALYDADAPDTDGAGDPGVGSRTIGFGQTRADMEPSSQAQPVMGAATGGSQAY

SEQ ID NO: 115670 - protein, 152 aa, Oryza sativa
  Clone ID: PAT_MRT4530_19244C.1.pep
MAMGKEEEYQMMCMALQNENRHYERFKIQSIVAIDEKFYFDISASELGVIKLNPNPTFTTIQVKTLKVSRNCWELAFPHLVVESRGRLYLVVYDRHCIRDMCLFKMDFSRLEWCSVDRLYDQIFFVGKLHFTASYCARQLGLKQGLPVCFSI

SEQ ID NO: 115671 - protein, 198 aa, Oryza sativa
  Clone ID: PAT_MRT4530_19245C.1.pep
MKAEKAAVAVGGGGGGDEWRCRKHPVARSGGGVCPHCLRDRLLRLCPNCAHVRPCPCTCASPSSSSSASGEAVGRVHTLIEREHRIARSRSVAASSSLAAASTASATAGAVGGRRKARVWGWPPFWKPAAKDGVAAAAEEDEEEEGGMGLARSSSVSATVVEAKAAAAAAKARWGWHFPSPLKAFRHRRSSASMPERG

SEQ ID NO: 115672 - protein, 62 aa, Oryza sativa
  Clone ID: PAT_MRT4530_19246C.1.pep
QDKSLRDHYIGTARHPFLLTINKSMVVVPMTSSDAVPAPTTNYNVRWDYCSHLFNSAPFTRE

SEQ ID NO: 115673 - protein, 194 aa, Oryza sativa
  Clone ID: PAT_MRT4530_19247C.1.pep
MPLPSLTVNESSQPPPLVVSHRLPSFSPPPLPPVSGTALCRHHRPSATALPGYMLMGGRGDRGDHRDHGASTRSSTVSRSPPTLRSSLEERSTSSRRCSGTTSLCPTHTPCIASLARAPVLALSATAFLLALPEGRQLHALATKLGLVPSHTIIAKSLLHLYSSGGLSGVALDLFRCIPDRLLVSWNTAVDALG

SEQ ID NO: 115674 - protein, 128 aa, Oryza sativa
  Clone ID: PAT_MRT4530_19248C.1.pep
WGRGGRGRRCDSTGTTRVRTAPCPGRGGGAGGETSAKAALPDNDDYELPAPPHPLGDDDDAADRLPPPPSSPGLARRPLRPQPAAAMPAACIRARPPSAPPQLAAALLSRSPATRIHALPSLLRPPPA

SEQ ID NO: 115675 - protein, 94 aa, Oryza sativa
  Clone ID: PAT_MRT4530_19249C.1.pep
RPPPLFQVLRVFQRGQRSLLLMGQGPFVLLLKPINGSMANLTPVTPIQKKICHKNMKADGLVPPLPPKGVCFGPKRNAPIFPGGPWGPPARAPM

SEQ ID NO: 115676 - protein, 398 aa, Oryza sativa
  Clone ID: PAT_MRT4530_1924C.1.pep
MAARLLFDLRSDMVSAASMSLDYRPEYDDIEEAKSPNTSVAAVAVKNADASVYKIIHGFLKQKNNSIIKVAANVARKAASNKLSRKTSDVFDSLIQKQQSKWGNKTGPLLSGICYCIASCSMILLNKVVLSNYNFNAGISLMLYQNLISVIILLVLELFGVISTEKLTWKLIKVWIPVNLIFVGMLVTGMYSLKYINVAMVTILKNMTNILTAVGEIYIFRKGQNKKVWAALCLMVISAVCGGITDLSFHPVGYMWQLFNCFLTAGYSLTLRRVMDVAKQSTKSGSLNEVSMVLLNNALSIPLALILIVIFDEWQYVYEVEVTRDPMFWAFATASGLLGLAISFSSVWFLHRTGPTTYSLVGSLNKIPISVAGILLFNVPVFLLGYSLQRQKCPNVYL

SEQ ID NO: 115677 - protein, 76 aa, Oryza sativa
  Clone ID: PAT_MRT4530_19250C.1.pep
FDLDTMDIYQHIYALRPSDPHEALVLTVAVRVLSACPCLAFLYFPFSRDVIYRFLLFGLHCTNYINVLTFFGPTIF

SEQ ID NO: 115678 - protein, 111 aa, Oryza sativa
  Clone ID: PAT_MRT4530_19251C.1.pep
KRQQLMTANALPTLGHARIGDFYSWSNNIFIVLLCGHRGVWSCCRGILQIQPSMESNSSPASHSSKAGALVFSHVENTEFSYYISLFVDDRHFHCCREQHLRFACVLAIPP

SEQ ID NO: 115679 - protein, 137 aa, Oryza sativa
  unsure (1)..(137): unsure at all Xaa locations
  Clone ID: PAT_MRT4530_19252C.1.pep
TMTTTFRWLAARTEGRTGFSLLLLCRRRLLPRPARTATVARLXEHGIRWNRSASRRRRCSDGLRLRGGSCRACFRRCGAEGSGGAGXRQPGRRRTVAGATASGGERWSSRGEDFRRQRKKGEVAAERGEGGGSIYRH

SEQ ID NO: 115680 - protein, 100 aa, Oryza sativa
  Clone ID: PAT_MRT4530_19253C.1.pep
QQTIDSEFIYGWSSGDGRRSIDRSHAYTLGAAPAAPSAAPATLAAAPTPAPTAAPAPTPAPTPMAALAPAPTPAPAPAPAPMAALAPAPMAAPTPAPAPA

SEQ ID NO: 115681 - protein, 84 aa, Oryza sativa
  Clone ID: PAT_MRT4530_19254C.1.pep
MAGPPPILGAAARVACTALLASLPSLPAPCRCSDLIHHHNGITPPARVHRGRGDVPVPFVFKAVTAGSGCLVAYANCYVLVCVM

SEQ ID NO: 115682 - protein, 300 aa, Oryza sativa
  Clone ID: PAT_MRT4530_19255C.1.pep
MMASGGGGGGEAVEEGTTTRVGDLPEACLADVIALTSPRDACRLAAVSPSFRAAAESDAVWDRFLPPDYRAIAPLPPPPATAAASGGKRMKKGVYLGLCDKPVPVDDGSMMVWLEKESGAKCFALPARKLSLPWEDGEFSWRWTPHPLSRFEEVAQLVDCTCLDIYGRLPAAALTPATPYAAYLVFGTAAAAEGHRGLSFPDQETTVSAAGRVVARHAVCLRPDDAEARKFRGVGLAGAGVPVRRPARRGDGWSEMELGRVAADEVAGAGGEDVVASFEVLGWYPKRGLVVECMEFRPVV

SEQ ID NO: 115683 - protein, 122 aa, Oryza sativa
  Clone ID: PAT_MRT4530_19256C.1.pep
GALPWFLFPGGGPSSSRWAKTNPPRRPPFIRAPRSNNKLPSSNRPFPGWGSKKNPPLRGPPQRNPFSRGRGPPPPPPQRTSFPPEMFFFQIKKKKKSSKMFVPSNKRLVKVSSQFPKIQMFL

SEQ ID NO: 115684 - protein, 106 aa, Oryza sativa
  Clone ID: PAT_MRT4530_19257C.1.pep
YDIEGGVMPKFQRLNIRYHAHITVPERGCGSDFSIHQLTSLKLFLVDIYCAGATAREVEVAEVAIRNHANLHPNHPSLEVRKFLKEHMATNEDNDATEQLEGTSTS

SEQ ID NO: 115685 - protein, 584 aa, Oryza sativa
  unsure (1)..(584): unsure at all Xaa locations
  Clone ID: PAT_MRT4530_19258C.1.pep
MSSADSHVPTSRLLPAEVEIYQNTGVEYYASQRPEPVYIARVFGDDGEPNPRRRARTPPPPPRQSPRREEALERVEGSATSTSMGDGEGRRDGERRLLVYGDGSTPQGALQAAGVLLRHPPVVPDPESPAQRWLDDVANLVMTARQHLGVGGRSSATKTSGAATTGSASSRRRARRAAVVARHSAATPMSAPPTREDQRGGPDARIGIERRRDGRRAAHATEGASSSGVSPQHGRGDQPSVPPVGGVGCRAFVASLRNVRWPPRFRPTIAEKYDGSVNPAEFLQVYTTGIEAAGGDDXGTYPRPGEEADLHAVQRRDDESLRSYIQRFCQGGXVRHNRMLEKIASKEPQTTAELFQLADRVARKEEAWTWNPSGSGVATSAAPGSAARIGRRDRRRKKRPAHSDDEGHVLAVEGASRATRKERPASDKKKEAGAPSTERPTGKWCIVHNTSLHDLADCRAVKSLAERTRKWEEERRQDRLEGKSPAVPSGNRRSEAKQKAPAEDIDDGDDDLGFQEPRATIATVDGGACAHVSRRSLKAMKRELLAAAPTHEATRRARWSEVALTFDQTDHPPCVARGGQIAMV

SEQ ID NO: 115686 - protein, 95 aa, Oryza sativa
  Clone ID: PAT_MRT4530_19259C.1.pep
CWRATGQVAPPPPPLLSLFLAASQEEEQEEGGGRDDEPVVAPPNWRARARVVVLLFFPPSRAPPCPPLFLLPLRRRSLANRRPSRCSPPFSLPPR

SEQ ID NO: 115687 - protein, 138 aa, Oryza sativa
  unsure (1)..(138): unsure at all Xaa locations
  Clone ID: PAT_MRT4530_1925C.1.pep
MGLRDEFSDNKLLDNFATTFEIDQYQYTRHINWWRARLTASKPNTASISTNKTSASWSGNQSEQLSTRLGCGQVHRIIENDLDKCRVVTPNPPTKTDDLSHSTRHGWTTREKYVAISRTXNLHWCSRDNSTRSLVLEP

SEQ ID NO: 115688 - protein, 93 aa, Oryza sativa
  Clone ID: PAT_MRT4530_19260C.1.pep
MATAHDSMGHEGGVREIEIWPVYLLGSHEHGAAPPQSHADWAENSWAGRPKRRRNLNKIIGSHAMHYTNGSPRSDVTELTLGRFIFIISDYQS

SEQ ID NO: 115689 - protein, 61 aa, Oryza sativa
  Clone ID: PAT_MRT4530_19261C.1.pep
MACCGCDCDLGYSSSSSCCCFGGHDRHADVLVTVYDRVDTTRHLPVYETHIAKNPNSPRHR

SEQ ID NO: 115690 - protein, 76 aa, Oryza sativa
  unsure (1)..(76): unsure at all Xaa locations
  Clone ID: PAT_MRT4530_19262C.1.pep
LFRFWLLPVFLFSFFFFSFYFSFLFVVIFNFFLFLFXIFFFYFIFFFFPVFYLYLLVWVFIIIFFFLFSFFTYFFN

SEQ ID NO: 115691 - protein, 196 aa, Oryza sativa
  Clone ID: PAT_MRT4530_19263C.1.pep
GQTCGTARLTHVSQDCPVCDRPVPRHDRLDGRLCPHVASVSGGVERNVARRTAHGTARTRKATAKAIRSRRTALKPRRSHPNPTKGNTTRRTAHRAPAVLLLHCTTPIESNPTRPDVYGAPSPHPYLVVASRARAQARFSTALVSLSASSTRLIPGVYLADMAVVSVQIHHLDALDSRAHRSCECERSASRKALGS

SEQ ID NO: 115692 - protein, 230 aa, Oryza sativa
  Clone ID: PAT_MRT4530_19264C.1.pep
MAEPAGEAAPQADGVSEEAAARPRGFRLLGGDKSVHQALGGGKAADVLLWKDKKISAAVIGGATVLWVLFEVVDYHFLTLISHVLIGVLAILFLWSKATIFIKKSPPNIPEVKISEDLAVNVALALRTDINQALHLLREISLGHDLMKFLGVIVALWILSEIGSLCDFLTLFYVAVLMLHTVPILYHKYQDKVDHFAGKAHVELSRQYSVLDAKVLSKIPRGPAKDKKQN

SEQ ID NO: 115693 - protein, 57 aa, Oryza sativa
  Clone ID: PAT_MRT4530_19265C.1.pep
CDIGISSLLRGLFVVIVFVGVRRECNQQFFWCVGVGVLGVSSLYAALLRVQEKNVCI

SEQ ID NO: 115694 - protein, 225 aa, Oryza sativa
  unsure (1)..(225): unsure at all Xaa locations
  Clone ID: PAT_MRT4530_19266C.1.pep
TKEVLGNQRRSGGKMRKMRWQRSTSASLSGRAMPLESRLSPQLPNPALIGGGCVGDRDEEEEGVAAAAAAVAGCHAXTQKMEAMDDKMTKHGGRLDHAVVKVDLALEAVGKRRRRRRRQGSILISTSRRGVSRRRSRRRRSTSPARWSMAASPPPRSPSSGDPAEAADLAASAAAAASPARVWSSLARLPSLSDYSRLLSVGRGRGRRRRRAALPLPIRPFALCF

SEQ ID NO: 115695 - protein, 105 aa, Oryza sativa
  Clone ID: PAT_MRT4530_19267C.1.pep
MADGTVTPFARPRWDEFVREIFTDRFSGIFAYPQSKLASILHSTELQLARILKGAATTCYVALHPQVKGISGKYFSNCNLDSPSSHASNAELAKKLWEFSSKVVS

SEQ ID NO: 115696 - protein, 52 aa, Oryza sativa
  Clone ID: PAT_MRT4530_19268C.1.pep
SDAGARRVRLEAVASDGTCTAGIIPSGNAEMEQIIAIDDVAWVAADARRGWL

SEQ ID NO: 115697 - protein, 74 aa, Oryza sativa
  Clone ID: PAT_MRT4530_19269C.1.pep
MEPRDYRVNSIKSLAAGPLQCHATIPWAVGPAFWSYEIIAVMRFHPAGWVYLYKSFPCRRAGAPPFPLRGMIEL

SEQ ID NO: 115698 - protein, 1241 aa, Oryza sativa
  unsure (1)..(1241): unsure at all Xaa locations
  Clone ID: PAT_MRT4530_1926C.1.pep
MKVTTASGHLLLVLFASIFHPAVSSISGNGTDRLALLEFKNAITHDPQKSLMSWNDSNHLCSWEGVSCSSKNPPRVTSIDLSNQNLAGNISPSLGNLTFLKHLSLATNEFTGRIPESLGHLRRLRSLYLSNNTLQGIIPSFANCSDLRVLWLDHNELTGGLPDGLPLGLEELQVSSNTLVGTIPPSLGNVTTLRMLRFAFNGIEGGIPGELAALREMEILTIGGNRLSGGFPEPIMNMSVLIRXSLETNRFSGKMPSGIGTSLPNLWRLFIGGNFFQGNLPSSLANASNLVDLDISQNNFVGVVPAFIGKLANLTWLNLEMNQLHARSKQDWDFMDSLTNCTQLQALSMXGNQLEGHLPNSVGNFSVQLQRLYLGQNQLSGSFPSGIENLPNLIVFGLDYNRFTGSVPPWLGGLITLQVLSLTNNNFTGYIPSSLSNLSHLVELYLQSNQLLGNIPSSFGKLQFLTRIDISDNSLNGSLPKEIFRIPTIAEVGFSFNNLSGELPTEVGYAKQLRSLHLSSNNLSGDIPNTLGNCENLQEVVLDQNNFGGSIPASLGKLISLKSLNLSHNILNGSIPVSLGDLELLEQIDLSFNHLSGQVPTKGIFKNSTATHMDGNLGLCGGAPELHLPECPIVPSNKSKHKLYVTLKVVIPLASTVTLAIVILVIFIWKGKRREKSISLSSSGREFPKVSYRDLARATNGFSTSNLIGRGRYSSVYQGQLFHDINAVAIKVFSLETRGAQKSFIAECNALRNVRHRNLVPILTACSSIDSSGNDFKALAYKFMPRGDLHKLLYSNPNDERSSGICYISLAQRLSIAVDLSDALAYLHHSHQGTIIHCDLKPSNILLDDNMIAHVGDFGLARFRIDSKTSFGNSNSTINGTIGYVAPECAIGGQVSTAADVYSFGVVLLEIFIRRRPTDDMFKDGLTIAKYTEINIPDKMLQIVDPQLVQELGLSQEDPVRVDETATHCLLSVLNIGLCCTKSSPIPILTACSSIDSSGNDFKALVYQFMPRGDLHKLLYSTRDDGDASNLNHTTLAQRINIVVDVSDALEYLHHNNQGTIIHCDLKPSNILLGDNMIAHVGDFGLARFRIHSSTSLGDSNSISSFAIKGTIGYIAPRNECSEGGQVSTASDVFSFGVVLLELFIRRRPTDDMFKDGLSIAKHVEVNFPDRILEIVDPQLQQELDLCQETPMAVKEKGVHCLRSVLNIGLCCTKPTPSERISIQEASAKLHGIKHAYLREN

SEQ ID NO: 115699 - protein, 99 aa, Oryza sativa
  Clone ID: PAT_MRT4530_19270C.1.pep
FMNDKGLELVKLVLSVVSVLCEFLYKPLQARVALVPPLPGMMEQPLHKHEVRLNLFHVEAELGVGYVSHKQLVGQLCHHLVYETARCADGCLHRSTLLL

SEQ ID NO: 115700 - protein, 206 aa, Oryza sativa
  Clone ID: PAT_MRT4530_19271C.1.pep
MEEADRPRIVLAGDAFEVYPHISSRRPSTVQGALLRMFYPSAIGLPEFRTPALTWRDYKRSTNERIMSPANRVLKEFWYCFKCDPTDKVEADKVLEQNFKKKVPQMLFEEKKRATNKLYKKGKVPAEDVDEDGGQQGLAAAWQHTHEMQQGNNEQLCNQRTEEAWSDFDQEEGNEIDDDEGNDFDLEEGNEIPEEEGNRRRTTLVA

SEQ ID NO: 115701 - protein, 246 aa, Oryza sativa
  Clone ID: PAT_MRT4530_19272C.1.pep
MEEDDRPRIVPAGDAFEVYPHISSRRPSTVQGALLHRFYPGAIGLPECRTPALTWRDYKRSTNERMMSPADRVLKGFWYCFKCDPTDKVEADKVLEQNFKKNVPQMLFEEKKRATNKLYKKCKVPAEDVDEDGNHWPTVQALVSAKPNDFSVTEEGWHLLCEHWSTPEFRKKSLYRKRNRFAGGGQQGLAAAWQHTHRMQQGNNEQLCNQRAEEAWSDFDQEGGNQIDDDEGNDFDLEEGNEIPEE

SEQ ID NO: 115702 - protein, 281 aa, Oryza sativa
  Clone ID: PAT_MRT4530_19273C.1.pep
MEEADRPRIVLAGDAFEVYPHISSRRPSTVQGALLRMFYPGAIGLPEFRTPALTWRDYKRSTNERIMSPADRVLKEFWYCFKCDPTDKVEADKVLEQNFKKKVPQMLFEEKKRATNKLYKKGKVPAEDVDEDDNHWPTVQALVSAKPKDFSVTEEGWRLLCEHWSTPKFRKKSLNGKRNRLAGGDTGYQCGGSRGLVAMKQFLQHKKGGQQGLAAAWQHTHEMQQGNNEQLCNQRTEEAWSDFDQEGGNEIDDDEGNDFDLEEGNGIPEEDGNRRRTTLVA

SEQ ID NO: 115703 - protein, 81 aa, Oryza sativa
  unsure (1)..(81): unsure at all Xaa locations
  Clone ID: PAT_MRT4530_19274C.1.pep
APQHHYKKTEVFGLEIPPEIGGVPSEILDPINTLDGQAAYXQETLLKLAGLFKNNFEVFASYKIGDDSSLTDEILAAGPNF

SEQ ID NO: 115704 - protein, 574 aa, Oryza sativa
  unsure (1)..(574): unsure at all Xaa locations
  Clone ID: PAT_MRT4530_19275C.1.pep
MATAAAALLRLSRSRRPLLPLSSLRLPPPAPYHHHSHSQTPPSSSSSHARLPAFLSFLAAAAAAGGTTVALCDSGIDHRVGGKESTELVVRGERKRVPNEFIDELASFLGENLTVDYEERHYHGTPQNSFHKAVNVPDVVVFPRSQDEVQKIVMACNKYKVPIVPYGGATSIEGHTLAPHGGVCINMSLMKFALNRSQKIKSLHVEDMDVVVEPGVGWIELNEYLKPYGLFFPLDPGXRPGATIGGMCATRCSGSLAVRXVLPNGDVVKTGSRARKSAAGYDLARLIIGSEGTLGVITEVTVRLQKLPSHSVVAMCNFQTIKDAADVAIATMLSGIQVSRVELLDEVQIRAINMANGKNLPEVPTLMFEFIGTEAYALEQTLLVQKIATEHHGSDFVFVEELDAKEELWKIRKEALWAGFAMKPDHEAMITDVCVPLSRLAECISVSKEKLDASPLTCLVIAHAGDGNFHTIILFDPSQEDQRREAERLNHFMVHTALSMEGTCTGEHGVGPPIVLLMAVITPITDFYFFYAFWQYLEKELGIESLRTMKRIKAALDPNNIMNPGKLIPPQVCI

SEQ ID NO: 115705 - protein, 169 aa, Oryza sativa
  unsure (1)..(169): unsure at all Xaa locations
  Clone ID: PAT_MRT4530_19276C.1.pep
HARSKLQGFDKRXXXXXXXXXXXXXXXXXXVSAKPNDFSVTEEGWHLLCEHWSTPEFRKKSLYRKRNRFAGGDTVYQCGGSRGLVATKQSLQHKKGGQQGLAAAWQHTHRMQQGNNEQLCNQRAEEAWSDFDQEGGNQIDDDEGNDFDLEEGNEIPEEXGNRRWTTLVV

SEQ ID NO: 115706 - protein, 162 aa, Oryza sativa
  Clone ID: PAT_MRT4530_19277C.1.pep
MPQWPHPAQIVAAPPSAVIASLTHRTFVVVASLPRRPSVIPPLRAALSRSPRHPSPLEPIPPPVHRRTPHHSDQCRRRTPSSAHRPDRHSPSPHTLVLGQMGTTAVAVALIPPRPTRGPRHSQPCPRDPATKQWLEVAGELACHSSVMRLKLLGPSVLESGK

SEQ ID NO: 115707 - protein, 88 aa, Oryza sativa
  Clone ID: PAT_MRT4530_19278C.1.pep
AWAPAFSEAVLFNYLWTDLGTGVDYPCKFIAKRKLITKEDLEDLRRESQIMHHLAGHRYVVVIKGAYQDPLLPHNVMELCAAASLFYL

SEQ ID NO: 115708 - protein, 81 aa, Oryza sativa
  unsure (1)..(81): unsure at all Xaa locations
  Clone ID: PAT_MRT4530_19279C.1.pep
PPPFFFFFFFFFXXXXXILXXXYKNKQXNSMXXPKWRSLKLRTXXIXXRYPXPPXTKKPXXVRXSXXVHXRXETXXXPSXP

SEQ ID NO: 115709 - protein, 84 aa, Oryza sativa
  Clone ID: PAT_MRT4530_1927C.1.pep
KLCLSVIWARVSSLEGGGCPPMPRGPPPRRVRPEVTTYGGLGVCLQVPTYPHLWRPERLRHAAFNAACSGLNRSVTGRMTDGTG

SEQ ID NO: 115710 - protein, 42 aa, Oryza sativa
  Clone ID: PAT_MRT4530_19280C.1.pep
KVPPRKEKGGCKLGTNCSCPDFKLGKLNSKTTEPLPPGSSPP

SEQ ID NO: 115711 - protein, 63 aa, Oryza sativa
  Clone ID: PAT_MRT4530_19281C.1.pep
RIIMCQFHKEHLFNGHANHDYTLKVKQTTISLRISLPQCHWTPTCLQLFDQVISELHSPKHRK

SEQ ID NO: 115712 - protein, 93 aa, Oryza sativa
  Clone ID: PAT_MRT4530_19283C.1.pep
MASGGGGGGGMEAVEVRFRLDDGSDIGPSMHDQATTVTALKEFVLARWPQGKEIAPRTVNDVTIINAGQVLENNRTLAESRNLAAESPEGCLK

SEQ ID NO: 115713 - protein, 997 aa, Oryza sativa
  Clone ID: PAT_MRT4530_19284C.1.pep
MAGNDNWINSYLDAILDAGKAAIGGDRPSLLLRERGHFSPARYFVEEVITGYDETDLYKTWLRANAMRSPQERNTRLENMTWRIWNLARKKKERVSLATVYVIVPRATILEALNFVILLSTICSYMQFEKEEACRLLKRQPEAEKLRTDTNADMSEDLFEGEKGEDAGDPSVAYGDSTTGSSPKTSSIDKLYIVLISLHGLVRGENMELGRDSDTGGQVKYVVELAKALSSSPGVYRVDLLTRQILAPNFDRSYGEPTEMLVSTSFKNSKQEKGENSGAYIIRIPFGPKDKYLAKEHLWPFIQEFVDGALGHIVRMSKTIGEEIGCGHPVWPAVIHGHYASAGIAAALLSGSLNIPMAFTGHFLGKDKLEGLLKQGRHSREQINMTYKIMCRIEAEELSLDASEIVIASTRQEIEEQWNLYDGFEVILARKLRARVKRGANCYGRYMPRMVIIPPGVEFGHIIHDFEMDGEEENPCPASEDPPIWSQIMRFFTNPRKPMILAVARPYPEKNITSLVKAFGECRPLRELANLTLIMGNREAISKMNNMSAAVLTSVLTLIDEYDLYGQVAYPKHHKHSEVPDIYRLAARTKGAFVNVAYFEQFGVTLIEAAMNGLPIIATKNGAPVEINQVLNNGLLVDPHDQNAIADALYKLLSDKQLWSRCRENGLKNIHQFSWPEHCKNYLSRILTLGPRSPAIGGKQEQKAPISGRKHIIVISVDSVNKEDLVRIIRNTIEVTRTEKMSGSTGFVLSTSLTISEIRSLLVSAGMLPTVFDAFICNSGSNIYYPLYSGDTPSSSQVTPAIDQNHQAHIEYRWGGEGLRKYLVKWATSVVERKGRIERQIIFEDPEHSSTYCLAFRVVNPNHLPPLKELRKLMRIQSLRCNALYNHSATRLSVVPIHASRSQALRYLCIRWGIELPNVAVLVGESGDSDYEELLGGLHRTVILKGEFNIPANRIHTVRRYPLQDVVALDSSNIIGIEGYSTDDMKSALQQIGVLTQ

SEQ ID NO: 115714 - protein, 72 aa, Oryza sativa
  unsure (1)..(72): unsure at all Xaa locations
  Clone ID: PAT_MRT4530_19285C.1.pep
VGRHSSKPWGKFINAHKQHVVXAQAVHVLAQDVRDDREDILNAGEGMGQGYYVQVRAPQNSRRRAQYHEQPL

SEQ ID NO: 115715 - protein, 45 aa, Oryza sativa
  Clone ID: PAT_MRT4530_19286C.1.pep
TTQIEPPQVIEEDYSCYKLGRYRFIHNTRPSGTISFVKILFLCRI

SEQ ID NO: 115716 - protein, 211 aa, Oryza sativa
  unsure (1)..(211): unsure at all Xaa locations
  Clone ID: PAT_MRT4530_19287C.1.pep
MWGPHVRPSSSSLSPFSLFLSPSSPSPLLPTTGELQPLPRSRTAGEPLPTRGRPASSSPACRRPASSSAVRYRRHRRHDASAHLPLPRAPSESDSGGALRRLPRCRSCRRRPPLLAKHCHFSSPELVARNALTFFYWAASSSPSSSTPHSLRAYCLLVQLLSRTAAAAARCRRRSLSLSPRATSRRXEEGERKREKGEREEEEGGPTFLFV

SEQ ID NO: 115717 - protein, 45 aa, Oryza sativa
  Clone ID: PAT_MRT4530_19288C.1.pep
QWFHSFFFMFPPVVFAHVLCNFFFSSSDVIFLSMMGVALLFFFSN

SEQ ID NO: 115718 - protein, 595 aa, Oryza sativa
  Clone ID: PAT_MRT4530_19289C.1.pep
MASASPRHVASCLCLLLLVTAAAAQRLPVKSYSYGSFYRDDPSVSSLLFRGAAGVSNGALQVTPDSRNLNNFLSNKSGSVLLPEPFTLWRRLDAAAAAAGNGSSTSTRVVSFNTTFSMNVYYDNESRPGEGLAFVVAPTADGPPPGSHGGFLGLTNATLEATPATNRFVAVEFDTFKEPGGYDPDDNHVGLDVGTVASNKTASLAGFNITIATNKTAPANYTAWIEYDGAARRIAVYMGVRGAPRPATPVLASPLDLSELVPERAYLGFTASTGVSFELNCILDWNLTIETFPADKKSKGWVVPVAVAVPVAAIAAAAFVVARMARARRSMERRRQERLEHTLTNLPGMPKEFAFEKLRKATKNFDERLRLGKGGYGMVYKGVLPAAAVDDDDGRPPAATEVAVKMFTRDDAKCVDDFLKEVQIIHRLRHRNIVPLVGWCHKKGQLLLVYEYMPNGSLDQHIFRRGAVHEQRPALSWESRRDIVADVAAGLHYVHHEYGPMVLHRDIKASNVLLDASFRARLGDFGLARVLDLDRSSFTDLGVAGTRGYIAPEYSVGHKATRQTDVFAFGVLVLEVVTGRHALLGDPACPMLSDW

SEQ ID NO: 115719 - protein, 72 aa, Oryza sativa
  Clone ID: PAT_MRT4530_1928C.1.pep
WIDGRLVASLAPDLLFAVPQRLRGSRTVAFALANNSWVSDIRGVLTVPVISQFLLIWDVVLHVQLSPGVEDR

SEQ ID NO: 115720 - protein, 178 aa, Oryza sativa
  unsure (1)..(178): unsure at all Xaa locations
  Clone ID: PAT_MRT4530_19290C.1.pep
WHACGAGTLYRGRPTLSVLFAEELMVDMVAISVSQLIQHKIRFKHTHCQREVLDIPLDACQHALLRELTARHRLQLMFLLPGALELQMQCXQLLHDVSRECRCAGIRRMVTIFQERMLMPVEHGXPPPPSLFYGHEDALLEHAHYAEDGWAEGFYGEQLQLPAMIHAKVNSARQDAHQ

SEQ ID NO: 115721 - protein, 505 aa, Oryza sativa
  Clone ID: PAT_MRT4530_19291C.1.pep
MRGGTVQINWHEQQPVLTLDFHPVSRRLATGGSDHDIKIWVIASDDSDKKLPTATYHSSLSSHSSAVNVLRFSPSGENLASGADGGGIIIWKLHSTDDGEAWKVQKTLLFHHKDVLDLQWSQDGAFLVSASVDNSCIVWDAIKGSVQQKLEGHLHYVQGVAWDPLGQYIASLSSDRTCRIYANKPQGKSKNTDRMNFVCQHTLVKAEHQNHDESKPPVRAHLFHDETLPSFFRRLAWSPDGSFLVLPAGLCKYSSEVINTAYVMSRRDLSRPAIQLPGASKAIVAVRFCPVLFKLRGSQSDCFFKLPYRVIFAVATLNSLYVYDTESVAPILIHAGLHYAAITDIAWSSDAKYLAVSSRDCFCTIIEFENEELGLPYNLSGTKELDEGNTNCENMKPLKVDSMEIDAGSSKAKIKASSAAVEVTPSPPVLAQNNILMTKDVAEGNATSENDRPSAVDNMEVDVGENKAKMEVTPVAVQVTAPPVSTKNSASSKPTKKRITPIAIN

SEQ ID NO: 115722 - protein, 158 aa, Oryza sativa
  Clone ID: PAT_MRT4530_19292C.1.pep
MGGGRNGGGQARRRGASGAATGAQKLFPSPPRSPAHLPSPPGRRQVGPTCRSSLTSGSRHHPLLKPPPTPPLPPHPRPTPRPHVPTSPPHALSTSSPRNRRSRPRPASPPLYNRPPRLSPPFSLFRRPLPSSLSPPPSARAASAIPRSTSSAVLPSNS

SEQ ID NO: 115723 - protein, 862 aa, Oryza sativa
  Clone ID: PAT_MRT4530_19293C.1.pep
MPGAACKKTNLISPRRSPRLKNIHVIYGEHSETNYPTLGPVKTEVIDLEEIASPSNPEFNDDSVGDEDFQNVSLKDLRAQCKAKNRRALKVDSERPDFKNQRQCGKRNLEDEVPKEEVDLDEPIIAFRQKRQKSPTKSNRTMGKPISLNAVKLQDTTLRREETEPIKLPPLEVTSHDSMSTAEKMERSAADVKHSTIAAGNTEEIVGENILYAEMENTPLSTGAVISGRSPDIFCEIKTEDEDIYSDEQVGVSSPGKDSFQDSFAELHREPIEYDGCQQHSGVIPQPIELKDVSDDSCELANSIKAYCLDDIILQNKTNDSLSSLDITDEMSNCHKTSGNITNLDEDKSSVVNDYLVCSVNMSCEDHIDIDEYWYPRDLHGSTLESTKTIESSTDQCNAEVGSPSVVIQSDLCGSAESNFTSLAEVVQMKADGQFDSLVQHSVGTKDVLPIDVGHATIDCTFAFNKTLDSVKAANFTTQDGRLESIVYDALNNHAQRKSTETETPVGVSGAAIISSPFVSEGTDREPTGSKAPHGGQLLLPCVTEWLSKDTDQLKVTVDDDICKTNSDQGSREQFGLQPQLLQSCSDLDKVCVTSESSSPEETQEMPAGSLDSTAASLDTDGQSEKLQPFIDEGALEEHAPKKLLSKRKIMSPTSQEKLCSALTGIDLCGVQRLKRKILLEDCGKTRRPNGRSSLSPTSKGILKGTESPSPQKTTCTCMKAASVILDAEKAVEFSQRQMHDIENIASKLMRSLNHMRSIVDGNLLSESHSLLPTFNTAEIRAASEDALEVERTTRKWLTIMNKDCNRFCKILRLAGKKAVSHSEVPRKRKKITFADETGGKLCHVKMFTDGQNSLLSECHSE

SEQ ID NO: 115724 - protein, 46 aa, Oryza sativa
  Clone ID: PAT_MRT4530_19294C.1.pep
LNQQCNYVRAKPGNRKLVNLFHCTCPLKFRMVNCKKKNILPDSLLS

SEQ ID NO: 115725 - protein, 164 aa, Oryza sativa
  unsure (1)..(164): unsure at all Xaa locations
  Clone ID: PAT_MRT4530_19295C.1.pep
MSPSPLLARPPAPSSPSTYPSLPPRRCAPAVASAALRVAPATASRAPFSRLVTKRNFAASDIREDXSTPIDVVADVKTEKIVVLGGXSGFVGSAICKAAVSKGFEVVSLSRXGRPSYSDPWVXDQVTWLAXGDVFYARXDEVLVGATAGVXPLGGFGNEEPEKR

SEQ ID NO: 115726 - protein, 104 aa, Oryza sativa
  Clone ID: PAT_MRT4530_19296C.1.pep
MENGRLRFFPKGLDGPENPVALLQLCVDRRCLIFPFLHTDYVPGSLGHFIAGAADCFVGVGVGVDKDTERLSDDHGLPVGNTADLRPLAAQRLGRPELRQAYLD

SEQ ID NO: 115727 - protein, 130 aa, Oryza sativa
  unsure (1)..(130): unsure at all Xaa locations
  Clone ID: PAT_MRT4530_19297C.1.pep
MPDPCPIATIHQILIACSLETANHILLDSVFARXVWLRVLSPLGWTALSPPGGSCLQDWWPSSRVCLPGHLRASFDSMVFLVSWQLWKERNSRVFDSALSSVSEVLESILSEGHLWSLAGIANFGVLLGR

SEQ ID NO: 115728 - protein, 190 aa, Oryza sativa
  Clone ID: PAT_MRT4530_19298C.1.pep
MAASARALLVVAVAAAAAVLATTAMGATTYTVGAPAGSWDTRTNYAQWASAATFRAGDRLVFRYSPAAHDVVEVTKAGYDACSAASPIATFNSGDDTVPLAAVGTRYFICGFPGHCAAGMKLAVKVEAAAAAPGGSSTTPSPSPSPAALPPVNGGRPVTPSSSASKSGGVVESLVGLGVGAMAAGLMVFY

SEQ ID NO: 115729 - protein, 53 aa, Oryza sativa
  unsure (1)..(53): unsure at all Xaa locations
  Clone ID: PAT_MRT4530_19299C.1.pep
GGRIGPIEPSKASXVVERGNYDGRVEGCEEDDCLVERLLVAHLDYIYTQGKHN

SEQ ID NO: 115730 - protein, 164 aa, Oryza sativa
  unsure (1)..(164): unsure at all Xaa locations
  Clone ID: PAT_MRT4530_1929C.1.pep
LTEPKSDAEREMTTVTRRQHMETTTTQGPNXFWIKTLWINYTDERHRREESSPRDVRQRGRGGDGVGSAMETTFQXSSAKKTRWPGFTLLLRTQWRRRRPKATTXDEHLANPTAAAAALRFTTTGNLRWDLAQNNQRXGIELDFAVPREVAALTGDGGRRDLRG

SEQ ID NO: 115731 - protein, 77 aa, Oryza sativa
  Clone ID: PAT_MRT4530_192C.1.pep
VSNKAVLKIGGAIQQGGGGGNGGGKKKKKGGAQTLKGEKQDVSKEDKMEVFSQSSFPPFLFREKEVGIFPPPGFLGF

SEQ ID NO: 115732 - protein, 537 aa, Oryza sativa
  Clone ID: PAT_MRT4530_19300C.1.pep
MAPAAAGRVPLSRRRSTAALLLVALALVLGVQLRSAAARPDKEMREKFYGKLVTNGSGNATGDGSIAEMFGRVLDKEFSDSDTPEAPDKSSFNNSISDHQAVLETVAVITHDKKKNDSEQANSSKPFQIGDMFGGQNENSDDLETVIDKEDNVFVMSNRKTKYPTLQLDLRLIKDLVVIIVSATAGGIIFSCLGQPVIVGYLLAGSLVGPGGLNFISEMVQVETFAQFGVVFLLFALGLEFSLTKLKAVGPVAVIGGLLQIVLFMFLCGLTAALCGAKSSEGVFVGAFLSMSSTAVVSKFLVEKGSTNALHGQVTIGTLILQAACIIRIYNCCIYDDLVICSSILETDDSAIIAVRSQYHTNELYQLASVAFCLLLAWCSDYLGLSLELGSFLAGVMISTTDFAHHTLEQVEPIRNLFAALFLASIGMLIHVKFLWNHVDILLAAVILVIIVKSVVVTVVVKAFGYSIRTAFVGKMYLLLLGTTALSLVTTPLIFKLIPVVMHLGILMRWFPSESSMQNELPLQDKATMLEAYNRSL

SEQ ID NO: 115733 - protein, 455 aa, Oryza sativa
  Clone ID: PAT_MRT4530_19301C.1.pep
MAALASLLLLRRRGGSHAADALLRALTTAAGEQPLTASAAKTRLRREHDPDRVVSLFEAIDDASLSASSTRHALSLAARRLSRSRRFADAEALLSSHIPASPTEPQLAAVLCSYAAASLPEKALAAFRSAAPSLPSPISPLPFNAVLSVFLRCRRHRRVPVLFDELSKEFSITPDASSYGILVKAYCMLSKDAKAHEVLDQMRGQGFTPTNSIYTTMIDSMYKQKKMEQAERLWKQMLESGRKPDQAVYNTKIMHHSLHGKTEDVLEVIAEMEEAGVKPDTITYNFLMTSYCKHGKMETAKELYRSLGEKGCSANAATYKHMMAQLCAHGDLDGALVIFKESYRSNKVPDFRTMSGLVEGLTKAGRVAEAKNIVAKMKKKFPEQLLSGWMKLEKELGLNSDSGDAGTRAECISEETPSEAEAAMPKTLELEDPSSDETECMAEASTSEEMPRDSA

SEQ ID NO: 115734 - protein, 57 aa, Oryza sativa
  unsure (1)..(57): unsure at all Xaa locations
  Clone ID: PAT_MRT4530_19302C.1.pep
DLEGPMCPFSKLFCNAYLSFCFFFLLTPVLIGSLLVLIFTFWXDKAYILPEKKKKKK

SEQ ID NO: 115735 - protein, 79 aa, Oryza sativa
  unsure (1)..(79): unsure at all Xaa locations
  Clone ID: PAT_MRT4530_19303C.1.pep
MGPTCQWSKTTKINFRPTCLLPLYPLFLTLRWMAAVASEMELHKLGGCGSHAGRARLQGLSXSPPPWRWRRGAQRGTGG

SEQ ID NO: 115736 - protein, 121 aa, Oryza sativa
  unsure (1)..(121): unsure at all Xaa locations
  Clone ID: PAT_MRT4530_19304C.1.pep
MASRTASKDIITLRGSAAIVSEFFGYAANSILYNRGVYPEESFTKVKKYGLTMLLTQDEGVKTFIANLNTQLSEWLEAGKLQRIVLVIMSKATSEVLERWNFSIQTDPXVGRQGVIKEKSD

SEQ ID NO: 115737 - protein, 129 aa, Oryza sativa
  Clone ID: PAT_MRT4530_19305C.1.pep
YATPPRRHAGRRHCATPPPPPRGRHAAATPLGRHRLELATPPLRHAAAAARRHRARTPLGPPTPPPRPHAAGPDAAAAPPRRRAPTLPPPARPHAAGPAHGAPTPPPLHANFPGNVAEKTSASPLKPKW

SEQ ID NO: 115738 - protein, 260 aa, Oryza sativa
  Clone ID: PAT_MRT4530_19306C.1.pep
MASRTASKDVITLRGSAAIVSEFFGYAANRCALRAVAGAMASRTASKDIITLRGSAAIVSEFFDSGLISDPGCFVFLVCAWRSILYNRGVYPEESFTKVKKYGLTMLLTQDEGVKTFIANLNTQLSEWLEAGKLQRIVLVIMSKATSEVLERWNFSIQTDPEVVDKGVIKEKSDKEIMREIQAIMRQVASCITYLPCLDEPCIFDVLAYTDMDVAVPFTWVESDAKLIENPQMVKLHSFDTKIHKVDTLVSYKVDEWDEE

SEQ ID NO: 115739 - protein, 51 aa, Oryza sativa
  Clone ID: PAT_MRT4530_19307C.1.pep
FLPRAVLMDLEPRTMDSARTGPYGQIFLPNNIRLRSARHRQQLNQGGLHQG

SEQ ID NO: 115740 - protein, 1309 aa, Oryza sativa
  Clone ID: PAT_MRT4530_19308C.1.pep
MGCCLNDITKADKIFDLLLREKQIQLPAGHIIPSAEELGKRKYCKWHNSGSHSTNDCKVFRQQIQTTIEGGKIKFDDSKKPMKAKYYEQDDDGFDPHWGCEFFRFCWNEGMRLPSIEDCPGCSDSAGSSSRSYNRSNRLSQKRIHVHQRLGPVNQDRHQDEDEGRKTQWCPSGIFTKNQKRRVQRMRNRERFQEVEQEINHRLKRTKPRQEWRVKSKVATTDEVKADKAKRLAKGKSVASASVNMVFFLPAEYEAKQADVDEVEDASATLILSPEQAIFYKPEETENRHLKPLYVNGYVNVKPMSKMMVDGGAAMNLMPYATFGKLGRISDDLIKTNMFLKDFGGNPSETKGVLNVELTVGSKTIPTTFFFIDGKGSYSLLLGRNWIHTNCCIPSTMHQCVIQWQGDKIEIVLADSQLKMETPNYYFKGVVQGSNFYTKDTVDDLDGKLGQGFMSADGLEDIDIGPGDRPRPTFINKNLLAEFRTKLIELLKEYRDCFALEYYEMLGLSRSIVEHRLPIKPGYKPYQQPPRRCNADMYDAIKAEVTRLYDVGFIRQCRYTEWVSNIVPVIKKNGKLRAFIDFRDLNKATPKDEYPMSIADQLVDATLGHKIISFMDGNAGYNQFFMAEEDIHKTAFRCPGATGLFEWVVMTFGLKSAGATYQRAMNYIFHDLIGLLVEVYIDGVVVKSKKVEDYIADLKKVFERTRKYGLKMNPTKCAFGVSAGQFLGFLVHERGIEVTQKSVNAIKKILPPEEKKQLQKLIGKKGIPFKLYLSVGEKSIGSVLIQELEGKERVIFYLSRRLLDAETRYELPKAIKGQAIADFIVEHHDDSIGSVDIVPWTLFFDGSVCTHGCGISLVIIFPRGASFEFAYTIKPYAINNQAEYEAVLKGLQLLKKVEANAVEIMGNSLLVISQLAGEYECKNDTLMFYNEKCRELMNSFRLVTLKHVSREQNVEANDLAQGASGYKSMIKDVEVEIAMITADDWRYDVFKYLQNPSQSASQKLRYKALKYTLLDDELYYRTKDGVLLKCLSADQAKVVMGEVHEGICGTHQSAHKMKWLLRHAGYFWPTMLEDCFRYYKGCQDCQKFGAIQRAPASAMNPIIKPWRFRGWGMDMIGQINPPSSKGHKFILVATDYFTKWVEAIPLKKVDSGDAIQFVKEHTIYRFGIPQTITTDQGSIFVSDEFVQFADSLDIKLLNSSPYYAQASGQAEASNKSLIKLIKRIKSTGTLTNLKARFWTCTEVRQIFQASKAGAKTDTAYSLGVTIHKLLTGKHPAESEMTMVWIDLQQWVTSNVKEEWTNGVRPSHRW

SEQ ID NO: 115741 - protein, 333 aa, Oryza sativa
  Clone ID: PAT_MRT4530_19309C.1.pep
MASPGSSGRCSRTPGFPAGPLGGGGRAVPAVGLGTASLRSVGEESFRGALLAALEVGYRHIDTASVYGSERVVGEAVAGAARRGVIACREEVFVTTKVWCTQCHPDLVLPSLRESLQNLQMEYVDMYLVHWPMSVKPTKPHYPMKREDIMPMDLRGVWQAMEECHQLGLAKMIGVSNFTTKKLQELLAFAKIPPAVNQVELNPVWQQKKLMEFCKAKGIHVTAYFPLGGRHSTSTVNPVLDSDVLKEIAAAKGKSVAQISLRWIYEQGASMVTTSTKRERLKENIDIFDWQLSDEDRLKISQIPQHKTVSVLSILCPDGVSSVELSEVDVVEV

SEQ ID NO: 115742 - protein, 44 aa, Oryza sativa
  Clone ID: PAT_MRT4530_1930C.1.pep
MAEDPPFLIEVDQNGSIKARHQKLLDVLDPKSRTIQRITVKLMK

SEQ ID NO: 115743 - protein, 106 aa, Oryza sativa
  unsure (1)..(106): unsure at all Xaa locations
  Clone ID: PAT_MRT4530_19310C.1.pep
SRESLISRSERLITAAMPSSAMAVDTTAPEHWLDWRFMLCAVWPSXVYSCMVLACFLIWKYEGPSSQDGNGDGGGDSEDARPPRAASGVVSLQSLFGRCTGQQKPP

SEQ ID NO: 115744 - protein, 53 aa, Oryza sativa
  Clone ID: PAT_MRT4530_19311C.1.pep
NRGYTVHDLTKLQMEDWMLSNQCICVFIQKKQRISAVVAACSKNKKVNTISSM

SEQ ID NO: 115745 - protein, 64 aa, Oryza sativa
  Clone ID: PAT_MRT4530_19312C.1.pep
PRGPRTRGLHCRKLCMHPFDKSVSNDLTRFTHAQELGREKKRAKECVCDLLKKQKKKSEAWVFL

SEQ ID NO: 115746 - protein, 104 aa, Oryza sativa
  Clone ID: PAT_MRT4530_19313C.1.pep
MDPCRQYMMQTSGMGSSTAMFMSQPMALLQQQCCMQLQGMMPQCHCGTSCQMMQSMQQGMCAGLGHQHMMNTAMQMPYMRIMAPVNLQLSFCRLLLIKPWLHVL

SEQ ID NO: 115747 - protein, 146 aa, Oryza sativa
  Clone ID: PAT_MRT4530_19314C.1.pep
MSDGTANCIDILIAIILPPLGVFLKFGCKVHKSPLPCDDCDKRLFQAATTINVGNGEKINFWHDKWHLFNVCPFFRKVWLMVCQWQNIPGAQPFKFRVKGSLLATWWNVWLERNRRIFQNISYTEDRVARIVKEELDLRHTAFQPP

SEQ ID NO: 115748 - protein, 219 aa, Oryza sativa
  Clone ID: PAT_MRT4530_19315C.1.pep
MDRSRHKNSPSSERFLGSFLPSAAAGDQPGSAAFELDEDDLFASGAGSPERPQPSRRPLILSAVRAANPSPLPRLRRPPEGILDALPERRSPFSPPPSSSSNSSTTASPAAAAAAPPRLIPTIPRPAAALAPHIPQSAPVNVPVAQFRRLSVEALMDKAEDDDDDDEEMLPPHEMVARARARDSPMTTFSVLEGAGRTLKGRDLRQVRNAVWRKTGFLD

SEQ ID NO: 115749 - protein, 73 aa, Oryza sativa
  unsure (1)..(73): unsure at all Xaa locations
  Clone ID: PAT_MRT4530_19316C.1.pep
PMALLQQPCCMQLPGLMPQCPCGPRCPDDPEHANQLFVLDSGRRQMMKMAXRQMPYMCHLAPVNFPLSSCGCC

SEQ ID NO: 115750 - protein, 478 aa, Oryza sativa
  unsure (1)..(478): unsure at all Xaa locations
  Clone ID: PAT_MRT4530_19317C.1.pep
LAMEPLHKLFQVAEEASLLTPIGGRFSRFRCSLYADDVALFVKPDPIEIDAVKRVLNLFAQALGLHTNLNKTEIYPIRCDTTDLTHVITPFPGTLKSFPCRYLGLPLHFRKLRKVDFLPLIEKIGSRLPGWKERYFMSEGRRILVQSVLSALPTFHLTALQAPKWVISRIDRYRRSFLWKGEDPDKFKWKEDNKPWVGMDLPCDDCDKRLYQAATTITVGNGEKINFWHDKWLQNACPKDIAPLCFNLAKRKQRSVKTELTNNSWLLSFRQMTTIEEINDLVXLGILLQNVQLLPQTNDSIIWNLNESGSYSANSAYLFQFQGSFSSIHFHSIWRCPAEPKMRFFGWLILHQKTLTAQNLLRRHWPCNWICSLCGEAFEDTNHLLNVCPFFRKVWLMVCQWQNISGAQPADDNAAWWADLNQLHPKPFKFRVKGSLLATWWNVWLERNRRIFQNISYTEDRVARIVKEEFDLRHTAFQ

SEQ ID NO: 115751 - protein, 97 aa, Oryza sativa
  unsure (1)..(97): unsure at all Xaa locations
  Clone ID: PAT_MRT4530_19318C.1.pep
PVTLYPNAWPLGSSTAMFISTAHGSPCSKQCCXQLQGMMPQCNCDTQXQMMQSXMQQVICAGLGQQQMDDEHWRWQMPYMCNMGPCQLPHSLSCGCC

SEQ ID NO: 115752 - protein, 248 aa, Oryza sativa
  unsure (1)..(248): unsure at all Xaa locations
  Clone ID: PAT_MRT4530_19319C.1.pep
LPSFTPPNRAPRSKSLLPIRFLTHNLALPLSRSTAVVSTRHWGHRLRLASPPPISSPPKPSCAATGALSTTPXSQVGFDPSCAATGALSTVPPSVRRSLARRHRIPPHRVASQKCKIVISVDVINNATFMFLIQSPPKVKLKGFSLANSIGGDKXEGAKLMTMGRRSDYLIIFFDLYXVCIEVAIELFELLARFAFGYSYLLVWVLETGGVAERLMMNVVLFMGDGDLVVLVFDTEFLDKXSSKFLID

SEQ ID NO: 115753 - protein, 64 aa, Oryza sativa
  Clone ID: PAT_MRT4530_1931C.1.pep
KISFDLIFVLADYGNFLINVQICSKKERLHVLLSLLEKDAPKSGIIFVAEQVLLLVDSIYSMAC

SEQ ID NO: 115754 - protein, 138 aa, Oryza sativa
  unsure (1)..(138): unsure at all Xaa locations
  Clone ID: PAT_MRT4530_19320C.1.pep
QPALAVYTLKSFALCALIACFGCATTRVTTMQXFPPPLAMRTMDPSEACTLMQTXGMGRSTAMFMSQPMALLQQXWCMQLQGMMPQCHCGTRCQMMQSMQHVICAGLAQQQMMKMAMQMPYMCNMTPVNFQLSSCGWC

SEQ ID NO: 115755 - protein, 750 aa, Oryza sativa
  unsure (1)..(750): unsure at all Xaa locations
  Clone ID: PAT_MRT4530_19321C.1.pep
MEELDLKPSRNLLSQVLLNGSPGTALQHAKGLRQGDPLSPLLFILTMEPLHKLFQVAEEASLLTPIGGRFSRFRCSLYADDIALFVKPDPIEIDAVKRVLNLFAQALGLHTNLNKTEIYPIRCDTTDLTHVITPFPGTLKSFPCRYLGLPLHFRKLRKVDFLPLIEKIGSRLPGWKGCYFTSEGRIILVQSVLSALPTFHLTALQAPKWVISRIDRYRRSFLWKGEDPDKTNPGSSLVNWGTVCRPKILGGLGIPDLEKFSRALRLRWLWFKWKEDNNSWVGMDLPCDDCDKRLFQAATTITVGNGEKXINFWHDKWLQNTCPKDIAPLCFNLAKRKQRSVKTELTNNSWLLSFRQITTIEEISDLVQLGGMLQNVQLLPQTNDDITWNLNESGSYSANSAYLFQFQGSFSSIDFHSIWRCPAEPKMRFFGWLILHQKTLTAQNLLRRHWPCNWICSLCGEAFEDTNHLFNVCPFFRKVWLMVSTCLSILKVEDMTKSPSLSQLLIRSCISNGDAGSPRLVETTQPSSQLIAGDQRYDGVIALASPPPISSPPNLFCAATGALSTAPPXQVVFDPSRAATGALSTVPPSVCXSLARCHRIPPHRVASQKCKIIISVDVINNATFMFLIQYPPKVKLKGFPLANSIGGDKVEGGKLMTMGRRSDYLIVLFDLYFSMRLASWQSIVDARELFELLARFVFGYPYVLVWVLETGSVAERLMMNVVFFMGDGDLVVLMFDTEFLDKQSSTFLID

SEQ ID NO: 115756 - protein, 212 aa, Oryza sativa
  Clone ID: PAT_MRT4530_19322C.1.pep
MAPLPPRAISLVFLFLFFTAASATRRLDDAGGQPTAASSATAFLRSRCATTRYPDVCYDSLLPYASTFQTSHVKLAVAAANVAAAKLRAFSARINDLLAQGGAARVDAALKDCKSTISDAGDLARQSSAELGQLDAGAAAAGVSSRQARWHVSNVQTWLSAAITDEGTCTDGFEEAGEAAAGSPAGKEVAAGVARVKQHTSIALALVNGIPL

SEQ ID NO: 115757 - protein, 161 aa, Oryza sativa
  unsure (1)..(161): unsure at all Xaa locations
  Clone ID: PAT_MRT4530_19323C.1.pep
PAGISLHVLSTPSTILFALPTVESCNVTHTPPSYSALFALFALSASVTTAITTMQHFPSTLXMTNHGILYRQHMMHTMRMRSSTAMFISQPMTPLQYQCCMQMQCMMSQCNCDTSYQMMQSMQQVXICAGLGQQQMMMNMAMQMTYMCNMTPVNFQLSSCG

SEQ ID NO: 115758 - protein, 96 aa, Oryza sativa
  unsure (1)..(96): unsure at all Xaa locations
  Clone ID: PAT_MRT4530_19324C.1.pep
PWIRCSKYMMHNVGMVAPXTMFMSPPMALLQQQCCMQLXGMMPQCXVAPVAQMMXSMPPVICAGLGHPQMMKMAMQMPYMCNMAPVNFPLSSXGCC

SEQ ID NO: 115759 - protein, 135 aa, Oryza sativa
  unsure (1)..(135): unsure at all Xaa locations
  Clone ID: PAT_MRT4530_19325C.1.pep
MAAYTXKIFALFDLIALSASATTAITTMQYFPPTLTMGTMDPXRHDMMQTLGMCSSTVMIMSHSMTLLHQKCCMPLQCMMTHCHCGTSCHMMQSMQQVICAGLGXQHNMMKMXMHMPYMCNMVPVNFQLSSCGWC

SEQ ID NO: 115760 - protein, 134 aa, Oryza sativa
  Clone ID: PAT_MRT4530_19326C.1.pep
MAAYTSKIFALFALIALSASATTAITTMQYFPPTLAMGTMDPCRQDMMQTLGMGSSTAMFMSQPMALLQQQCCMQLQGMMPQCHCGTSCQMMQSMQQGICAGLGQQQMMKKGMQMPYMCNMGPGNFQLFSCGWW

SEQ ID NO: 115761 - protein, 664 aa, Oryza sativa
  Clone ID: PAT_MRT4530_19327C.1.pep
MSLCGSPICSEQDVVSCAMKETLDSSTCVNHLVVISIVAVLTVALVHQLLMKIPKSRASARQLVAFNSLLQLAAVVFTGCLGLLNLGLGLWMVGISFNQETSIYRPHWWLVILAQGFSLILTSFSFSIRPRFLGATFVRFWSLLLTICAAFICCCSVVYMVGEKEITIKACLDVLLLPGALILLLYAIRHSRDEEGYETTENALYMPLNTERDHGTADSESHVTPFAKAGFFSVMSFWWLNPLMKMGYAKPLEEKDMPLLGSTDRAQNQYLMFLEMMNRKKQLQSHATPSVFWTIVSCHKSGILISGFFALLKVVTLSSGPLLLKALINVSLGEGTFKYEGIVLAVTMFVCKFCESLAQRQWYFRIGAIYKKQQKLSNSAKMKHSSGEIMNYVTVDAYRIGEFPYWFHQIWTTSVQLCIALAILYNAVGLATVSSLVVIIITVLCNAPLAKLQHKYQSKLMEAQDVRLKAMSESLVHMKVLKLYAWENHFKKVIEGLREVEYKWLSAFNLRKAYNSFLFWSSPVLVSAATFLTCYLLRVPLNASNVFTFVATLRLVQDPIRQIPDVIGVVIQAKVAFTRVVKFLDAPELNGQCRKKYIAGTEYPIALNSCSFSWDENPSKHTLRNINLVVKSGEKVAICGEVGSGKSTLLASVLGEVPKTEGTE

SEQ ID NO: 115762 - protein, 150 aa, Oryza sativa
  unsure (1)..(150): unsure at all Xaa locations
  Clone ID: PAT_MRT4530_19328C.1.pep
YCRITHGSIHQHRSLPLFALIALSASATTAITTXQYFPPHLPMAPWIRCXQYMILTLGMGSSTAMFMSQPMALLQQQCCMQLQGMMPQCHCGTSCQMMQSMQQVICAXGLGQQQMMQMADQMPLHVHMAPVNFQLSSCGLLLIQRWLHVL

SEQ ID NO: 115763 - protein, 90 aa, Oryza sativa
  unsure (1)..(90): unsure at all Xaa locations
  Clone ID: PAT_MRT4530_19329C.1.pep
CQPLAMGSSTAMFMSXQPMALLQQQCCMQLQGMMPQCHXCGTSCQMMXQSMQQVICAGLGQXQMMKMAXQMPYMCNMAPVNFQLSSCGCC

SEQ ID NO: 115764 - protein, 341 aa, Oryza sativa
  Clone ID: PAT_MRT4530_1932C.1.pep
MSSSNNGGGGDKKPASGGRGGPTIRTLADISRGPSGFPGGGGGGGSDSDGGPTIRTLADISRGPSGFPGGGGGGGSDSDEPQEYYTGGEKSGMLVQDPTRRNTVDSIFEQARQMGALQDQPPPFEDQSSSSRSFTGTGRLLSGETAPAAPPPPGNVLHNIQFWNNGFTVDDGPLRDYDDPANADFIESIKKSQCPQELEPADRRTPVHVNVIKRLEDYQAPLRPPSPFQGVGRTLGGGSSAEESQAPAPATQEPRRSVGIVVDDSLPFTSIQLRLADGTRMVARFNMHHTVGDIRSFIDASRPGATRPYQLQTGFPPKQLADPAQTVEQAGLANSVIIQKM

SEQ ID NO: 115765 - protein, 82 aa, Oryza sativa
  Clone ID: PAT_MRT4530_19330C.1.pep
HVAERREVAAGGRPPQRSPPFFRGRAGNTSGGETMGARHRGRRAPCRCLPACAWIRSHLHQALASTGELRQQSRRTCSAGGV

SEQ ID NO: 115766 - protein, 553 aa, Oryza sativa
  Clone ID: PAT_MRT4530_19331C.1.pep
MEETKWTYMYNLIRRAHRDEDVQIKVTEYLRCIERSSSTIWQRYGRQEDKNLNTKEMVEVMVLDGLFIIEVLIRHWINNGKIKTDQSVYPEAEGPQVPPKVKLEPHALRLDLVILSNQIPFFVLEDLFTMTPRVPELRDTKLKVLILYYLFGSVGDGELVCDESSVYHILHLVYKYLTFSKEQALPETPVPRLSLVGRAMNMLKKKRIDLYAFCKRTFSRSSTKPVNWLSWKEIPPLKELVRVGVRLKQAETYRFTEVKFKDGKLEIPAFTCRLYDARLLANLVFLEMCGWWPREERLFCSYVMFMAELISDKKDFALLFKKGIVHGNSYKENFGDLFMDSIVKLAEVGQGSINVPHFSDLIADTVHCYLRWTKEEGRGQRIRPRERRVRRIRPPDSRWKCIGNRSGADGGFVHSCMVAPPVFLFPRTNLLCRPYPQPPPPVVQSTRSMQRRWRSVMTSSLVQEQRNGGSNAAARRRAQGCAILFLGITAVSSEPFLFLHCLYRPSRSSTAVPCFGVDDPSVFGMKFRFVPVTRSVTKFPERGTHPRSMFPVT

SEQ ID NO: 115767 - protein, 79 aa, Oryza sativa
  Clone ID: PAT_MRT4530_19332C.1.pep
EQGRKGRTIAMSSEIRIPTLLGSSSDGLPKALHSFSLSSVSATVFDRSVWRSRRRPTVTALSQHGGSIKPLCGPNETKT

SEQ ID NO: 115768 - protein, 322 aa, Oryza sativa
  Clone ID: PAT_MRT4530_19333C.1.pep
MAAARVAMWVACVLAMAAACQGRLRVGYYKRKCAPAEYVVRAVVGNAVRQNPGVGAGIVRMFFHDCFVQGCDASVLLDPTAANPQPEKLGPPNFPSLRGFEVIDAAKAAVEKACPGVVSCADIIAFAARDASFFLSGGGISYRIPAGRLDGRVSLANETLAFLPPPVFNLTQLVASFQAKGLDADDMVTLSGAHTIGRSHCSSFADRLSPPSDMDPGLAAALRSKCPASPNFTDDPTVAQDAVTPDRMDRQYYRNVLDRKVLFDSDAALLASRPTAAMVARNAAARGRWERRFARAMVKMGGIEVKTAANGEIRRMCRVVNE

SEQ ID NO: 115769 - protein, 135 aa, Oryza sativa
  Clone ID: PAT_MRT4530_19334C.1.pep
MARVLAGKTKRRSDFGVYFARVSGVVMDLGLYRQKKSEYSDYHSVLREEIVSSTVKWQCPPLRQIQREERKWAAAAPHSADPVVGGCSVFPSARSNGRGGGGRGSGLPTRRQWWERSALPSPPARKQKVEQRSPG

SEQ ID NO: 115770 - protein, 357 aa, Oryza sativa
  Clone ID: PAT_MRT4530_19335C.1.pep
MAAEGKTRVVVVGGGIAGSLLAKTMQPHADVVLLDPKDYLEIPWAELRSMVEPSFAERSLIYHRDYLTNATIVTSSAVNITEQAVLTADGQSLAYDYLVIATGHALTSPGSRSERIKEFQRDKGKIESSESVLIIGGGPTGVELAGEIAVDYPEKKVTLVHRGSRLLEFIGDKASKKCLDWLTSKKVDVLFQQSIDLDSLSNTEKLYRTSAGETVTADCHFVCIGKPLSSSWLHDTILKESLDNKGRLMVEKDLRIKGYNNIFAIGDITDIPEIKQGYLAHKHALLVAKNLRLLIKGSPNSKLETYSPGFALALISLGRNEGLAQLPFLTLGGCLPGKIKSRDLFIGRTRKQMGLNA

SEQ ID NO: 115771 - protein, 74 aa, Oryza sativa
  Clone ID: PAT_MRT4530_19336C.1.pep
VTVLYIKKKWDKNIYQSWSSHCGTTGSTMSLQQQGHGFNPRPGKYLSLPQLWPSSKLWLRFNPWPGNSIIHGGS

SEQ ID NO: 115772 - protein, 114 aa, Oryza sativa
  Clone ID: PAT_MRT4530_19337C.1.pep
LSNYGLYTRRPPSRLRVSSPPWLHGEPQATGPCEDPSHGSPPRAPSHRPIPAPPPRDPAPRLPPPSPPPPMTTTPRLRHGHAHQRLHRAGAPPPPGRTGAAGTVGWHERWRSPT

SEQ ID NO: 115773 - protein, 223 aa, Oryza sativa
  Clone ID: PAT_MRT4530_19338C.1.pep
PAASSSAHAAAAAAMDWSSVTAEDLVDALREVDWSTPPRPVSEFFSRFTRPRSYSKWTSRLKCNLYYYRTNYFILIMFILGMGFLRKPVSILAAFSTGLSIAFLNDSFAVTFNEKVTRTVRQFSPHLAAKMRPPLRPVIRGRPSSKRSIHICGRPRWVFVVLFSVVSCFLWMTSCSLLTVLWALIVGLLATLLHASFRTPNLKARLNTFREEFRAVWRNYSEF

SEQ ID NO: 115774 - protein, 77 aa, Oryza sativa
  unsure (1)..(77): unsure at all Xaa locations
  Clone ID: PAT_MRT4530_19339C.1.pep
FAEADPTVSXIVYALTRLFVYERVQKPLELGEHMILLLIIITWFMDLSVYNIAVFTTGGGGLLTYYNHCLLILLDGA

SEQ ID NO: 115775 - protein, 532 aa, Oryza sativa
  Clone ID: PAT_MRT4530_1933C.1.pep
MARGGSGGGRWRRLNVRPDLASDQEGTRTLNLTVLRRLDPAVADILIIAAHVVLYSFDDNIHQWCELSLLIVVSDTRAIPKELNQVTIRWDIALLNVDVHIDVAFAVPFTEFWGNTQPRFQFIVMNRKNTENLTEDLLGGFEYQVQVPYIMYHNAADEITGIWFYDPQECEQVGYLFSRIQKAFSRVSPKAKVSVTESEYEKPEVVPAVPSNEDTLKQPTSSIMLLDNAKYDFLSALLKGAACVGATMDEASAVQSNKSVGMVHSSTHASPHAIPPQSPAIQSNKSFGMVHSSTQAPLAIPPQSPAIRSNKSVGMIHSSTHASPFDIPPQSPAVQSNKSVGMIHSLTHASHLAIPPQSPALHGLHPSQISAVPVMPHDAHRSSSTSTIQPTSLANPLFFPPMPSLQTASHAASSLCSAAPLHPPITVQQLQSAPLHQPFSLPTASSIQPPYGMPLLQPFPPPNPSPFLTSGVSYGRPVITRDQLKDVLLSLCQPCKLAPIFAQPLLGPHDSGVLYPLNDFMVSSVNHSFLLA

SEQ ID NO: 115776 - protein, 351 aa, Oryza sativa
  Clone ID: PAT_MRT4530_19340C.1.pep
MVSAAAQAGVVAACVVLFVPMGLAGWHLSRNKVLFFSGALFVSLAVGVHLSPYLPSLPHLLLAASFHPHPISSSSSSSAASSSCVPLLHRVSWADAGGESGVGRAWAWPPSLASTCGLARLSRDDASLLLNGSWVMVAGDSQARLLVLALLRLLLDPAAAAAAEPELFRRHSDYRATVPARGISVDFVWAPFESNLTRLLHEDLRLAPRTPDVLVLGSGLWHMLHVTDAARYGDALASVVDAAKSLRSPLPVPPPHMFWLGLPLLVNHMLNTDAKKVHMNDTILQAYDLEVEQRGLLQRDGGPFLLLDVGKLSRGCGQQCTADGMHYDGDVYDAVLHIMLNALVIESQQRI

SEQ ID NO: 115777 - protein, 36 aa, Oryza sativa
  Clone ID: PAT_MRT4530_19341C.1.pep
SDDGAQNWNRRDSHVKMSEGISVNHYPHICPRPWDT

SEQ ID NO: 115778 - protein, 75 aa, Oryza sativa
  Clone ID: PAT_MRT4530_19342C.1.pep
MIVDGHPDMLQVGWSRYDYDWSLTNSVVVLAPRLQMVEERHSAVFDLAGCGFEKEGYPVVDYESALQTAKSTTVR

SEQ ID NO: 115779 - protein, 98 aa, Oryza sativa
  Clone ID: PAT_MRT4530_19343C.1.pep
MIVDGHPDMLQVGWSRYDYDWSLTNSVVVLAPRLQMVEVKGPRAFSSENLSPMTRLGARESERHSAVFDLAGCGFEKEGYPVVDYESALQTAKSTTVR

SEQ ID NO: 115780 - protein, 382 aa, Oryza sativa
  Clone ID: PAT_MRT4530_19344C.1.pep
MAEQANQPTVLQKFGGQFHLGSSFSEGVRARNICPSVSSYDRRFTTRSYMTQGLVNGGINVPMMSSSPIFANAPAEKGGKNFMIDFLMGGVSAAVSKTAAAPIERVKLLIQNQDEMIKAGRLSEPYKGIGDCFGRTIKDEGFASLWRGNTANVIRYFPTQALNFAFKDYFKRLFNFKKDKDGYWKWFGGNLASGGAAGASSLFFVYSLDYARTRLANDAKAAKGGGERQFNGLVDVYRKTLKSDGIAGLYRGFNISCVGIIVYRGLYFGMYDSLKPVVLTGSLQDNFFASFALGWLITNGAGLASYPIDTVRRRMMMTSGEAVKYKSSMDAFSQILKNEGAKSLFKGAGANILRAIAGAGVLSGYDQLQILFFGKKYGSGGA

SEQ ID NO: 115781 - protein, 1101 aa, Oryza sativa
  Clone ID: PAT_MRT4530_19345C.1.pep
MNRSKAKLSGVLHKGFKPDKCKTALRMALARIKLLRNRKEVQVRQMRREVAQLLEADQDQTARIRVEHVIREEKFMQAYDLIEVYCELMVARMSIIDSQKTCPIDLKEAIASVIFASMRCSDVTELADVRKHFTSKYGKEFAAAALEVRPDSGVSRLVIEKLSAGAPDTQTKIKTLTSIAEEHNIKWEPKAFEEKLPKQNDDLLHVTSTYPGGNIPTRGSSASNSGMPTSQPAAPSHSYMESSNSHMSTAHSYSSAEVPDNRAPYVTANSNAFPQENRRGSDAPMSPRSQHGPNSFSHDTAGGSNVSRPYSQYGATVPDTDTASRREEFNHSRERKSSVSGSNWNIEFKDATSAAQAAAESAEMASIAARAAAQLASRGNLSAEQNTGAFESPAYTHETTPRKQQAEHLMKDGQRSSNEQSSGAYDPRLISSNDARKDGGRTETSRVGSQNMPTNSLGQSPPYSPHIHSDEYDMPTDPHRSHSPDPQYSDDSSEKESNFGRPEDHQFNLPGERLSEAQLGGHNIKDTESKHATFDQENTDNYYSNYSSSHGTFTHGSSTIWDSQNDKAGPDSSAVVFDQYDSDVGEENLLDPFSSKHTEEPTVEDHKGFSSADWGQQHRNESPVNHSSSTLFSGTEANRKDVSSPHSYDNVPPTFDSDGVSSDEEMTTGMHARSLRSHSRGSDFSESRENIISGKVVHDVNENIEDHVSMSRKNYLNSSGSNAFNKERYSESSPRSDYSWVDGELDRTKIRDLEEERVPHKLEGASSLTTGENKNQLFSLGRQTSTSSADYDEGDPGLNFGRLTPGLRNKLRQPPPYIKDSGNTSLHKVPTAIEKSVHSEEDTSFGNTRNTSTGMARSSFGADYNSELHDQNQSVGASVEARSTMRNYYGSEGDRGKLSEQSYNAPSSVMNKSSGGVNSSQDLYHEKPGAGARRGTTTKTAKSYFDSDDSEDELAQRKEVQTKWSREQIQSRRTQMTSDTKKETGVRVGVQHADETEAKSPAGSFSRFTEQRRDSPVYSRVPVPRTSPKPVRVEPPLGKGKSQEADLNTVSVTGKEENTESPAETPKESTSKTAPSHVHPKLPTDYDSFAAHFMSLRTNRR

SEQ ID NO: 115782 - protein, 118 aa, Oryza sativa
  Clone ID: PAT_MRT4530_19346C.1.pep
VVFEFVLQARQAAAQTPPSRTRLRRRRPLRAPLAAAILPPAAKLPPHRAGLLPHSPDPPGRPQAAAAMADRRPTIVATARAAVASARSPGRAAAPAVARLASRSPRSIGRRERERREE

SEQ ID NO: 115783 - protein, 94 aa, Oryza sativa
  Clone ID: PAT_MRT4530_19347C.1.pep
RIAIFFTTTHMLRVPGFLILNTRVPNLGVRELNLRRLSTLPTSRRALFSPVRFSCDLPHIIEFFVFHLRFFFLPSLFISFRDPSGVVDSAAALL

SEQ ID NO: 115784 - protein, 587 aa, Oryza sativa
  unsure (1)..(587): unsure at all Xaa locations
  Clone ID: PAT_MRT4530_19348C.1.pep
VNINGERTDFFRTFRGLRQGDPLSPLLFNLVSDALAAMFDSAKKRGVLSGLVPNIFPGXTHLQYADDTVLFIANDMHQIVTTKFILYCFEEMAGLKINFHKSEVFSIGMSELDTERVAQMLNCPVGHFPMKYLGLPISPDKILNVGFDFLGQKLEKRLTKWGSNLSHAGRAVQINACLSSIPFYAMGFYHLPEGIHQSFDKIRGRYYWASNKLRGKYHMVKLEDMAFPKDFGGLGFTETRKMNIALLAKWIMKVDSEDKSLCIELLRKKYLTNESFFSCKIGNVSQFWRGLLNIRGWMMLGAEWSIGNGLSVKFWKDTWFGNCPLMTLFPAIYRVCNQQEILVSQVGQGGPGCLSFRRSFGPEELEEWNDLKEIIDQIVLSDTHDKLNWGLNANKKYTTRSLYRALTFRGIGDVNAKMWGCPCPMKHKHFLSLALRDRIQSAEQLKKKNWEGSEFCQLCGELETTNHILFNCPMARFVWCVCRDTLRWNFIPRNSDEFFLMCDGAPDLCSVRITLSLLAAVCWNLWITRNNMIFRDKLVYSPLAILFQITSNLVQWKKLCRPGEATKLETLAEEMKRMVATLRPSRT

SEQ ID NO: 115785 - protein, 101 aa, Oryza sativa
  Clone ID: PAT_MRT4530_19349C.1.pep
HGRRENERRRGCEGPWRRWIGWWKSNREHGLAWLGVVKVGASSCCSGVSGFVPPGSGSGVPRLARIRRRPRAQSATATSGGGATTISSSPPPPTTWRKRRA

SEQ ID NO: 115786 - protein, 134 aa, Oryza sativa
  Clone ID: PAT_MRT4530_1934C.1.pep
MGGCQRQTGARRPVNPAELRRRYRTDATRHCSHLSSPFPTAPPGVHHGFALLGCGGSGRRWERRPAALAGEGKRRAERGAERPAVEDRSRRELASRGIQDRDGGWWQSHESAAKADWLLGDGVGGGWCQRQGGQ

SEQ ID NO: 115787 - protein, 108 aa, Oryza sativa
  unsure (1)..(108): unsure at all Xaa locations
  Clone ID: PAT_MRT4530_19350C.1.pep
MAGTGVWVFKRDGVMQLEADVEXGTGRRQRRLVYVPANETMGSLQALERRLAGLGWERYYEDRAVVQLHRRDGGADLISLPRDFARFRSTHMYDVVLKNRDHFKVLDN

SEQ ID NO: 115788 - protein, 151 aa, Oryza sativa
  unsure (1)..(151): unsure at all Xaa locations
  Clone ID: PAT_MRT4530_19351C.1.pep
NLVNTSIVESPNCHALHPRQDLCPCFPLISLFLASATYLPITHLFHVFPTNITMGTMDPCXQYMMQNVGHGSSTAMFMSQPMALLQQQCCMQLQGMMPQCHCGTSCQMMQSMQQVICAGLGQQQMMKMAXQMPYMCNMAPVNFQLSSCGCC

SEQ ID NO: 115789 - protein, 120 aa, Oryza sativa
  unsure (1)..(120): unsure at all Xaa locations
  Clone ID: PAT_MRT4530_19352C.1.pep
CPSSATRGFAATRLPLWRRRQHGSSSTPSNLQLRPGSLTMXGDGDARTWAMAQLRVSWRESRRAVRSAAWRGTGPGTTRXGSDAAEGKEARLRRGTGVTGAAGSDVVHAVDGIERLADSE

SEQ ID NO: 115790 - protein, 59 aa, Oryza sativa
  Clone ID: PAT_MRT4530_19353C.1.pep
VLTCQICPALTFLKVVIFEPCQIFMENLANLKQGSCLGTFFFLNATALNIFKVGLGGLI

SEQ ID NO: 115791 - protein, 103 aa, Oryza sativa
  Clone ID: PAT_MRT4530_19354C.1.pep
MGVHVFTNRLDIAAADWCFRLHGRPIMPPLSGVYTFTAGRHHHRRLVSSSSRPVYSTAVAYGNHVFTTGCSHRRRPVFLLPLMDDFVPTSATSAITKGKITKL

SEQ ID NO: 115792 - protein, 77 aa, Oryza sativa
  Clone ID: PAT_MRT4530_19355C.1.pep
FGFFFFFCFFFFFFFFFFFFFFFFFFQTKNRNLMATKVNLSTRNPPRPRGKIPFLKPPIPPRERGENGKIGQAPPQK

SEQ ID NO: 115793 - protein, 134 aa, Oryza sativa
  Clone ID: PAT_MRT4530_19356C.1.pep
MAAYTTKIFALFALIALSASATTAITTMQYFPATLAMGTTDPYRQYMMQTLGMGSSTAMFISQPMAPLQQQCCMQLQGMMPQCHCGTSCQMMQSMQQVICAGLGQQQMMKMAMQMPYMCNMAPVNFQLSSCGCC

SEQ ID NO: 115794 - protein, 548 aa, Oryza sativa
  Clone ID: PAT_MRT4530_19357C.1.pep
MDKTEPSPPASAQTTARDHHCEAPRPELEVGRSGGRAVLPPSPWGKPGSRWTSRNAVEHLTSPPSAPVLHRVELHFAAFRHLAVSRFPHPHAHQLFDEMPPRALPPVEDDAGRDWLGDLPEEVLHHIMSFLDARQAVRTCVLSRRWRNLWRTVPCINADFDEFDLVFYQGDDEDYDDVLAFKRFVNRLLELRDPTAMIDTFWLRYTTRPEGNTNSNEDAYGWISHALQKQARVLEVVVFCCLFELDHSVFTSCYLRRIAFSGIVLCKGFFAQLEAGCPALEDLFLHQCGVHDDEISSHTLKVLTFDSVFFYMPMDTVEFTLLNKTSISLPSVTSLTISTPEGFTPILKDTASVVTASVSVSVTMSSFRFRFDANDLGQYLQSLSGITNLEFNYQGSKFLLHDLHGKYPSIAIFSDYIHLNLSKLTIENHLQWCPEFLNVVNLTLGQWCLDSNFYALIVFLQNSPRLQKLTLKLEKSNMRISRRIIGELTEISFTCEHLNTVEVICSENDPQVITVQDFFVSSGMTSVQFHIKHWSPYANDLPAFIRSI

SEQ ID NO: 115795 - protein, 136 aa, Oryza sativa
  unsure (1)..(136): unsure at all Xaa locations
  Clone ID: PAT_MRT4530_19358C.1.pep
MQHTPARSCLFYALSASPYSITTIQYFPPTLAMGTMDPCXQYMMQTLGMGSSTAMFMSHPMALLHQQCCMQXLQGMMPQCXHCGTSCXQMIQSMQXQVICAGLGHQXMMKMAXMQMPYMCXNMAPVNFQLSSCGCC

SEQ ID NO: 115796 - protein, 168 aa, Oryza sativa
  Clone ID: PAT_MRT4530_19359C.1.pep
MIKLRYSKRLFKRSCSSSKATACVGGGGGGHGNAVAAGGGGGGAGEIGWEVRPGGMLVQKREGRGGEEVILVRVSTGFAWHDVSIAATSTFGELKVRLSMVTGLEPREQRLLFRGKEREDTDHLHMVGVRDKDKVLLLEDPALKDMKVRAALAAARVMQSPCQPFIQV

SEQ ID NO: 115797 - protein, 145 aa, Oryza sativa
  unsure (1)..(145): unsure at all Xaa locations
  Clone ID: PAT_MRT4530_1935C.1.pep
MHLSPTSLFWMNSVQSHIMCVGDMGPGVSDLERGGCPTMPRGPPRRGVRPEVTMYGGLNVRLQVPTYPHLWRLEXSRNAAFNAVCNALHRSVTGRMTDGTRVVRLCAARVSGDVQPDMSHQIMMVRGSRKKNLFVSHWAVNKAFV

SEQ ID NO: 115798 - protein, 51 aa, Oryza sativa
  Clone ID: PAT_MRT4530_19360C.1.pep
PLQFNYLKIPNPVSSSFSVEEKYCQQLPVNVQDAAAPARGPDPAVASRRWP

SEQ ID NO: 115799 - protein, 158 aa, Oryza sativa
  unsure (1)..(158): unsure at all Xaa locations
  Clone ID: PAT_MRT4530_19361C.1.pep
CGCRVVVTHLSCGYVLAWWPAFPPANDPLRPVVPCKLPPFPAKSHYCNHPIQYFPPTLRHGXTMDPCXQYMMQTLGMGSSTAMFMSQPMALLQQQCCMQLQGMMPQCHCGTSCQMMQSMQQVICAGLGQQQMMKRAMQMPYMCNMAPVNFQLSSCGCC

SEQ ID NO: 115800 - protein, 34 aa, Oryza sativa
  Clone ID: PAT_MRT4530_19362C.1.pep
MRILGDARCLYGSQVANHTMFDYDNLKVGFPEAA

SEQ ID NO: 115801 - protein, 111 aa, Oryza sativa
  Clone ID: PAT_MRT4530_19363C.1.pep
SGGREMPAFFFPGAPDQLKQLLFFFKTRAFGSFFQAPWGDFSGGGNQKRGAFVPQKPPFFLLFVGGLLNRARSGGFSPIWAVFIPLGSSRSKGIPLGLGGPPPRGAVGNFP

SEQ ID NO: 115802 - protein, 134 aa, Oryza sativa
  Clone ID: PAT_MRT4530_19364C.1.pep
MAAYTTKIFALFALIALSASATTAITTMQYFPATLAMGTTDPYRQYMMQTLGMGSSTAMFMSQPMALLQQQCCMQLQGMMPQCHCGTSCQMMQSMQQVICAGLGQQQMMKMAMQMPYMCNMAPVNFQLSSCGCC

SEQ ID NO: 115803 - protein, 288 aa, Oryza sativa
  unsure (1)..(288): unsure at all Xaa locations
  Clone ID: PAT_MRT4530_19365C.1.pep
MGGVTSSSAGGGGGGETALGDLPESCVAEVLRRLDPPEIXXRMARLSRTFRGAASGDGVWEAKLPRNYARLLAVAADGEAAALEAIPKKEVYARLCRRNRLDGGTKEFWLDKGGGGVCMTISSRALSITGIDDRRYWNFIPNDESRFHAVAYLSQIWWFEVRGEVEFCFPEGTYSLFFRLHLGRPLKRLGRRVYSSEHIHGWDIKPVRFQLSTSDGQQAQSKCYLTDPGVWINHHVGDFVVKSSNELVKIQFAMVQIDCTHTKGGLCVDSVAVKPQYLAKKKASRIYV

SEQ ID NO: 115804 - protein, 88 aa, Oryza sativa
  unsure (1)..(88): unsure at all Xaa locations
  Clone ID: PAT_MRT4530_19366C.1.pep
PNXHLHAAPYLPASIAASPDHTIRRAARASASIRSRPPDPSHATQCSPLGARAAGRGSSRASESDVCERESESASEAVLLEKWTGRVG

SEQ ID NO: 115805 - protein, 205 aa, Oryza sativa
  Clone ID: PAT_MRT4530_19367C.1.pep
MSGAAAAAARALPKAVTFVTGNAKKLEEVRAILGSSIPFQSLKLDLPELQGEPEDISKEKARMAASQVNGPVLVEDTCLCFNALKGLPGPYIKWFLEKTGHEGLNNLLLAYEDKSAFAMCIFSLALGPGEEPMTFVGKTAGKIVPARGPADFGWDPVFQPDGFDQTYAEMPKSVKNQISHRGKALALVKEHFAAANYKVQNDGSA

SEQ ID NO: 115806 - protein, 134 aa, Oryza sativa
  Clone ID: PAT_MRT4530_19368C.1.pep
MAAYTSKIFALFALIALSASATTAITTMQYFPPTLAMGTMDPCRQYMMQTLGMGSSTAMFMSQPMALLQQQCCMQLQGMMPQCHCGTSCQMMQSMQQVICAGLGQQQMMKMAMQMPYMCNMAPVNFQLSSCGCC

SEQ ID NO: 115807 - protein, 146 aa, Oryza sativa
  Clone ID: PAT_MRT4530_19369C.1.pep
MAAAAGWSGGVRAEGRRTEREGKGSPVRRPWKVFPKIAEQINKMAVTNRNKIATKSTPPLHGPEDAAGGWGGGRNGAAPSSVRRVGQRQRRRGDVDAASSLRRHRRLEVDEQGKCETARSRASKQRYHSSNQRYRSSKDRYRASPI

SEQ ID NO: 115808 - protein, 46 aa, Oryza sativa
  Clone ID: PAT_MRT4530_1936C.1.pep
MEISRQKGGGCPPMPRGPPPTGVGPEARHAAFNAAWSAPDRCMTGQ

SEQ ID NO: 115809 - protein, 231 aa, Oryza sativa
  Clone ID: PAT_MRT4530_19370C.1.pep
MGANDGHLDATSNNRGGLHEQTTTGCLPVDQSCFALSRLSYRRSSSSNPRACCSTTSYLEVLAISLASLLVIVLVLCAIRCYRMRRAVNRVTVAAASAAAAAAAAGNVTNKKRPAPGLGEDAIAALPKFEYRGTGDECDRWECSICLCAVADGEVARQLPRCMHLFHRGCVDMWLVAHTTCPVCRAEVVVNKPPDEDDGRCAETPEDEAAPPASALEPARLENGERDLEAQ

SEQ ID NO: 115810 - protein, 37 aa, Oryza sativa
  Clone ID: PAT_MRT4530_19371C.1.pep
VLLWFIRCVYASYFVCRFRGVKGNGCGVYYLKGIGFF

SEQ ID NO: 115811 - protein, 172 aa, Oryza sativa
  unsure (1)..(172): unsure at all Xaa locations
  Clone ID: PAT_MRT4530_19372C.1.pep
IPGRYWWDTAGLSADPETFARNREXLEVIHSRXAMLGALGCVFPEILSKNXVXFGEAVWFKAGAQIFSEGGLDYXGNPNLVHAQXILSIWAVQVVLMGFVXGYRVGGGPLGXGLHXVXPXGAFXPLGLSXXPDTFXXLXVXELNNXRLXMFSMFXFFVQXIXXGXGPIXNLF

SEQ ID NO: 115812 - protein, 532 aa, Oryza sativa
  Clone ID: PAT_MRT4530_19373C.1.pep
MSQVGSAPVCQFSSFWWDFEDLTMVGGPQDALDNRSDDNDFDKNDNSDPVVYQLVRVEGDGTLIPATEDEVLQFETFLHDEKVDDDLPSIDDVTHVEEYFTNDCIVKKPEFEEGPSKLDTADVQTQKLDAGLEEDRLCTLNDSIVLPSNCSAVHDQQLDKLNTEQGANIIAQQDNASTETTKSTVLNDLSSDKEKADACSKPVNEASAGQSVSGVTSSVPDFSILKGEVCLDDLTMRELQEAFRATFGRQTTVKDKLWLKRRIAMGLINSCDVPSSGCVVRDYKVIAMGAKQEIPVVEAIPKMELEANLVRDQVMNPGHERDLPSSLSYHSEEQQRSSKRLKRVPTDNDEPQVTIFAEQGTTKRIRKPTKRYIEELSDIDTHESTGRLSSPGKRHVYDEVLLRPRIAPLHEVDSLSTAYPTREDTLGGCSVHVPYVSRMRRGRPRSNFIPFLDPEPSVECTEAPAADVVNLEKEGERKNHQKNTGKKGVHVETSCEKDVQGLQDKDFPAAAETLDAAADLLPCSRLLSTPVE

SEQ ID NO: 115813 - protein, 65 aa, Oryza sativa
  unsure (1)..(65): unsure at all Xaa locations
  Clone ID: PAT_MRT4530_19374C.1.pep
PPPPPPPPXPPPPPPPPPPPHSPLPAMPHYTNSIPLDFRSRFFLFFSCFPPPPPPPPRGKERVWS

SEQ ID NO: 115814 - protein, 100 aa, Oryza sativa
  Clone ID: PAT_MRT4530_19375C.1.pep
AWRYIKNPVGSTCIQGGTQRVDQLYAWQLVGPLLVLVSGVFRHVSKGFLILHHGLLLRHGLSSFKWCNWYQRLHHVNLIYIDRVQSEKYRVMSPLLLIHK

SEQ ID NO: 115815 - protein, 58 aa, Oryza sativa
  Clone ID: PAT_MRT4530_19376C.1.pep
ITQLTKYNSVKDNADNRRLLRPSPPCHIRWPCSSPLTLLVKSDTPPSGARGRERGSGG

SEQ ID NO: 115816 - protein, 113 aa, Oryza sativa
  Clone ID: PAT_MRT4530_19377C.1.pep
MDHQELEEGAEKMKLLGIWSSPYVVKVIWALRIKHVEYDIEEDLRNKGNLLLECNPVHQKVPVLIYQGKPSDVIIEFIDDVWKDSGQGRIYSTQLSPPIWKWFTTQGKEQEDA

SEQ ID NO: 115817 - protein, 64 aa, Oryza sativa
  Clone ID: PAT_MRT4530_19378C.1.pep
MTALQCSGRPTRLNLHEQSWTHQIGTAKDTKPGPLDGIHDGVLFVATGNDQVWRVLQCRSHIPH

SEQ ID NO: 115818 - protein, 54 aa, Oryza sativa
  Clone ID: PAT_MRT4530_19379C.1.pep
MDNQLAIDDKVVFLLEYEPVEIRDGARSLLPASVGIGWGELVFIPIDVPFSNSK

SEQ ID NO: 115819 - protein, 105 aa, Oryza sativa
  unsure (1)..(105): unsure at all Xaa locations
  Clone ID: PAT_MRT4530_1937C.1.pep
MEAQQPNSGAKNTSDXSRSRSGVANXRSIPFSRSHPPRHQPPPANRHRQAPPPTXPASHHRQALPPRSHLPASAAASGHSSVTVHRRNSTPPTPWPSAPPPREHH

SEQ ID NO: 115820 - protein, 212 aa, Oryza sativa
  unsure (1)..(212): unsure at all Xaa locations
  Clone ID: PAT_MRT4530_19380C.1.pep
MDAAQAPQLAARRGRRGAEVGGGGTRRGRVGGERGAASGGGGGVCSDGGDRRRRRRRRIGIFNVXGYVRHRRTPXVKIKSNESQIKKKXGSREEGATGLPATVLTASAXAWLASRCTRPPGRLPRQPARPPAAPRRLATAAPAGRRCSRPAVATARRAAAQRGEGEEREGKWEREGWRSNERGEDREECAXIICELVARXYFLLPVGINNRD

SEQ ID NO: 115821 - protein, 121 aa, Oryza sativa
  Clone ID: PAT_MRT4530_19381C.1.pep
MALMCNYGRVHDGPSILRIIAADWSADGLQAFPPNPGLLSRTLGHDETHQGLLVPDLLTDLVIHISPLGIWRLPSSPTHVGRNLCSAVHTSKSPPTSLRHLSRLCDSGPPAIPMTTSLVLH

SEQ ID NO: 115822 - protein, 124 aa, Oryza sativa
  Clone ID: PAT_MRT4530_19382C.1.pep
MAAAKTKVKADWWFPFPRIPGGQSNGSACSLWASRQTHRRRPRVPGMLVNRRRPGREGPGAADHRSHRPPPARSRREGLGATPPQPSSPLPPSAAIARRCHRHHRRREHTLPPPPSAGGRVEEE

SEQ ID NO: 115823 - protein, 110 aa, Oryza sativa
  Clone ID: PAT_MRT4530_19383C.1.pep
VKKKKKKKKKKKKKKKKKKEKKKRGGKNKKTKIKGPPALIVPSYLTLPASCCPLSLGGLTLACCPSFAPLLIGISLAFPIVMWSHPIPFATGGASSKRPGPFPFSIIWAP

SEQ ID NO: 115824 - protein, 85 aa, Oryza sativa
  Clone ID: PAT_MRT4530_19384C.1.pep
NNVLISFSQPLYHIKHMGSGIACPASTMYVHPEHLNLTSAAAKFTFPQSIGKSQCSPKMGCREVFSKLKYKYGESEGISYINFFN

SEQ ID NO: 115825 - protein, 55 aa, Oryza sativa
  Clone ID: PAT_MRT4530_19385C.1.pep
FSHRTIQPPFLWAQSLAKQVFHDRTESPYSYTLHMTFAKGVRGSIHQNNHTPRAS

SEQ ID NO: 115826 - protein, 776 aa, Oryza sativa
  Clone ID: PAT_MRT4530_19386C.1.pep
MRKCTGVLLILTLAVLLLLLSPSPSTAPPPAATAAGGPAARLLPTLPGLSRLYPPPANSTAHHSWRLLRPLLLRSDALPGTAAGVLEAADAWRNLTLAVAASAAGGKDGRRQGDLDVSCRSSVEGDLGGVGARGVKIPCGLAEGSAVTVVGVPKPGAAWFRVEMVGGGGEVVVSVNVSLGVAEMVVEQSSWTREEGWGLSERCPPVGDADRNSSSLLSLVDGLVRCNQQAGVSGLQGRNNTMANVTANEHENEKRPKGRANFGGSFSIIEGEPFTATLWAGAEGFHMTVNGRHDTSFAYRERLEPWSVAEVKVSGDLELLSVLANGLPVSEEVDMASVELMKAPPLSKKRIFLLIGVFSTGNNFKRRMALRRTWMQYEAVRLGEVAVRFFTGLHKNEQVNMEILKEAQMYGDIQFMPFVDYYTLITLKTIAICMFGTKVVPAKYIMKTDDDAFVRIDEVISSLKKSDPHGLLYGLISFQSSPHRNKDSKWFISPKEWPVEAYPPWAHGPGYIVSRDIAKFIVHGHQERTLQLFKLEDVAMGIWIQQYKNSGQKVNYVNDDRFYSEGCDSDYVLAHYQSPRLMMCLWEKLQKEYQPEERNFLRFNPSNPLKPNRMNRCGEIQTIDFSGSAAPVVNCICVPLKHSFDRASYIVRAPWGDILQVWRSFELDDGEEPRTYELAVFKLDLATEDLVQIKDLRGHALFVSFFVSVNEFPVLTPNCVYLAHDSTKCRRFKHIAKAVRVYNLQDDTFADQYTQSSWKNCPPPALWFQPTWSLNK

SEQ ID NO: 115827 - protein, 748 aa, Oryza sativa
  Clone ID: PAT_MRT4530_19387C.1.pep
MVAPRKALQVVALERPNLEQSKPIDEELMKRLKVNLITWKNTQCLFDRHMTLFVYFLWRKKKPFHITRAVPLDAIPGFLYDDEDDDDDDDDEGDNNVELEEIRPSSTECESSIHPAEELNLLLPKSLPLPRISAAVERNGKARDKEVKEGSNLKELPQGYLGKMVVYKSGKIKMKLGDVMFDVNPGEECRMAQHVAAINTKEKHCCLLGEIESRHVVVTPDVDSLLLNDNRAYNALHQGIRFLGMKMVGIDSIFETITVDLKMVKIDSIYRWNDYRAARIIAHAAIPARENAYGRAERIRIGDRAQIEQNPSSIPLASPARSIMVEDQEKSSSSPPVPPPPEEEEMEEGEIHPGGGGGGGYYDSGSETEDDDDRYVFQSRRDDEEEEEGVNPASKRRRLEDILAETRGALPLPSPTPSSSGSEGTISDDHGDGIAGAAAAADAPVARVAFPCHVCSKEFGSRKAVHGHMRVHQADKDKEKEPSLHLALGWTSTGKRGANGNARAVTVAFAPMEQAVGDDDGDARAIVLAPAAQPQPQPMVVAEAANPPNQVADDNHRLPVPAAVPYVGAAAAPARRRARPKRNAGQGGPYRCSYPGCKGEYRTHQGLGGHVAGHINREKQAAAAAQGGSGARPEGNHPCKTCGKEFSTGVALGGHMRKHYDPKKKKKHAGLVLTLSVAPPTPAPAPSIAGAALPPAEVKADVDEHEAEQVPMAPVSPPAEARGNIVRIFGVDIEKPADEEEQEGGSDV

SEQ ID NO: 115828 - protein, 73 aa, Oryza sativa
  Clone ID: PAT_MRT4530_19388C.1.pep
QCLDHMDYIYVSSISMFSSIYLFEKICFLRFMELSQIRQRNVPTFVFIVSTTMTMICIFYLVQKKKKKKKKKK

SEQ ID NO: 115829 - protein, 135 aa, Oryza sativa
  unsure (1)..(135): unsure at all Xaa locations
  Clone ID: PAT_MRT4530_19389C.1.pep
MLILCSIEVPRVTLTRAARGRNPSHPRRHFPSPSSLLAAAGNHVASREGGCGEHVPAAELTLDVRGGAARFXWDAAAGVAGGADPATPEASLALPGGSGEGELAVAVAVPAELGTWRGAASALFFGEGVSRRRRR

SEQ ID NO: 115830 - protein, 58 aa, Oryza sativa
  Clone ID: PAT_MRT4530_1938C.1.pep
GHEMAPCMESASPTELTLALFAKSGSPCPTLHARRACDRSHLIDYSNRGGIDRFLRLA

SEQ ID NO: 115831 - protein, 94 aa, Oryza sativa
  Clone ID: PAT_MRT4530_19390C.1.pep
MVQCRFRQNAGDGEEDTGGSSSSSRRRSRRGGGEAIMAIKRKMLQCSSAKEQHGGKRFKRSYLAGGEQGDAAAAAIFYLACLAACTDAFSPSCL

SEQ ID NO: 115832 - protein, 236 aa, Oryza sativa
  Clone ID: PAT_MRT4530_19391C.1.pep
MAIELPKFDICVASIPYGISSPLTAKLLIGSHRFRARFARRLMGTPGHGERNLLATNARLVADVRLLMDVSRPEFSSLVEIRPKQTRPKEFAAGVELHEWLAFTRACTGQHKLQRQHQPPPKKKKSKKKRKTLGVLFKLAQGHAGGGSEDGGVVVVGNNEDDRDGDVGVASGFSREEVVAFKERIAGALRSAALAGKTASQLPNDELLRLLRLFIHWGIRFGRGVENIKFLTQIGK

SEQ ID NO: 115833 - protein, 173 aa, Oryza sativa
  Clone ID: PAT_MRT4530_19392C.1.pep
ATEATAAAGTMGYLAPEYLLTGRATEATDVFSFGALVLEVACGRRPIGATEGRCNNLVEWVWSLHGAGQVLDAVDARLRGEYDEAEMRRAMLVGLACSSPEPALRPGMRAVVQMLGGEADPPFVPAARPSMSFSANHQLLLSLQDSVSDYNALGLNDLSDDSSSDSLSSSSLT

SEQ ID NO: 115834 - protein, 112 aa, Oryza sativa
  Clone ID: PAT_MRT4530_19393C.1.pep
IDQTEQLTNSPGFSLEGSENGTPLESDRTMEGETCDIDIETARHNLEITNSLPSEQSTEQGELHGTRTELQSNFRLESNPLKAQFPSCDVFSKKGMTDFFRSKKVYPKSVLN

SEQ ID NO: 115835 - protein, 92 aa, Oryza sativa
  unsure (1)..(92): unsure at all Xaa locations
  Clone ID: PAT_MRT4530_19394C.1.pep
KKKKKKKKKKKKKRGEKKKKKKKARSSSESQMRFTDRRCHRXVLDSPLDACRLVLDPXFTGRARFQPMFXRPGALGLRVPCCQQLQDVSPGC

SEQ ID NO: 115836 - protein, 113 aa, Oryza sativa
  Clone ID: PAT_MRT4530_19395C.1.pep
SLPPPAVSSYLLSPEPPTGRSHPSPLHLAPTSRPTPPLSPREPALRRAATHPCRWSPTPRRAPAACCSRRSHRRAAPFVPSASPHRAAPRPLLRFPIPSPEPPSHRQLEPPPP

SEQ ID NO: 115837 - protein, 124 aa, Oryza sativa
  Clone ID: PAT_MRT4530_19396C.1.pep
MVLTVRFARTKTGHRIPVRPTTLLRSLSVKVSIGVGVCSCAPPQVQRPCLLQRACAEEDRGEGVEVVKLTQLLGLQGLDSLIIPDSESTAMAMFANYPTRNRTTGLDPEDGAPLSFTDVLNKFV

SEQ ID NO: 115838 - protein, 68 aa, Oryza sativa
  Clone ID: PAT_MRT4530_19397C.1.pep
GYYGEDTNGLLNTLHLMFLDTENNLSRILDTGAGISHPAVVLDTSTGYTPVLALIDGTYGHLLWLINT

SEQ ID NO: 115839 - protein, 137 aa, Oryza sativa
  unsure (1)..(137): unsure at all Xaa locations
  Clone ID: PAT_MRT4530_19398C.1.pep
VPPVGLIPNLRPRRPXPPADPRFPSSQLAWTRXPLHLAPTSRPTPPLSPREPALRRAATHPCRWSPTPLPVAAHSGHVLPSPSRRAPAACCSRRSHRRAAPFVPSASPHRAAPRPLLRFPIPSPEPPSHRQLEPPPP

SEQ ID NO: 115840 - protein, 146 aa, Oryza sativa
  unsure (1)..(146): unsure at all Xaa locations
  Clone ID: PAT_MRT4530_19399C.1.pep
MRGVGGPLLTIGDLLSDLAVDGAPTSPAGRCPXPSSPSSAGQQAEEADPSELNRLFGEHYDNLMKALQENDPSWPSLMLKLCTALKTADKLVSCASIDAEQLLQKVELLERLLVRGDRAVTAIVEELQRSRPSEDSHSSKSKPSGK

SEQ ID NO: 115841 - protein, 98 aa, Oryza sativa
  unsure (1)..(98): unsure at all Xaa locations
  Clone ID: PAT_MRT4530_1939C.1.pep
VEEEKFRKLVAGEEVAAPEVKTKPATRKVDSIALFDRXLDATPTWRANCRNMNSAIIKGGSARDLKVDGCGDKGFRQVQALSMRGDKPKQHLDYIKKS

SEQ ID NO: 115842 - protein, 104 aa, Oryza sativa
  unsure (1)..(104): unsure at all Xaa locations
  Clone ID: PAT_MRT4530_193C.1.pep
MVATSAAVYRRVLKAVQKHVGXGDSKKHFREFVASEFRRPTGTDADARARLRLAGDYAYLLASVHHHKDLLFSYNIAVDRSEEMKKILNKSAASVGLQLPDVYQ

SEQ ID NO: 115843 - protein, 84 aa, Oryza sativa
  Clone ID: PAT_MRT4530_19400C.1.pep
NKENKHNATESSQLLTPHTGENTSTKPTAAKRVKGRKRATEKEIHSSLAQLDEDNQEPSETNQREGDEGKENDLDSAFRKVMAS

SEQ ID NO: 115844 - protein, 126 aa, Oryza sativa
  Clone ID: PAT_MRT4530_19401C.1.pep
MRRDAAAVPTAAVASPPISVEAVVIDVEGDPAVPAGAACRICHLVPEGGVGPGSEVIRIGCGCKDELGAAHRHCAEAWFRIKGDRCQKHYWAGSEKIHGRMAWSKTGKHTNYNAEGKYLLENAAFL

SEQ ID NO: 115845 - protein, 456 aa, Oryza sativa
  Clone ID: PAT_MRT4530_19402C.1.pep
MEIDNGHTFQAEEGDRLSNLPDDILLDILARLNIKFLHAPAFSSITTVHMDQAMSALTKAATSLLSVPQRDTSIRNLCLKLYMMGSHSSNIGSVLSQAIEAGIVKELDLAVLHEKRHIDCNDDDMLHQARAVKVFAGAFPRVICCITRLSLYNVHLDGDIHRILFDCCTQLDYLNLEHCDDGSRDVWKINAPNSKLRHLELAVCFFGRLDLVCLPKLEYIYWEIWFTPYAPLSFGSVPSLRELRLACPAQSDFQGLKLSKVLQGVPNLHTLTIDFQGEKLWVQPEQKQLCPAFNNLKTLSILCVHVEFDLLWALNLLEAAPSVELLCIDTWEHVCLVDQVDEEGRKLVHGETTHPSWEISEFTGTRNWQLKELQFTGFRPLKQQLVFLKAIMEQARNLQTVILKEEEPCEDCEALGTPLSCIKDHDFPKSKDEQDNVVEQLREKISSDSQIIFQCL

SEQ ID NO: 115846 - protein, 41 aa, Oryza sativa
  Clone ID: PAT_MRT4530_19403C.1.pep
NNIHPPRRERERAVSKQLIWVNWTYEARTKELKFPWALKFT

SEQ ID NO: 115847 - protein, 682 aa, Oryza sativa
  Clone ID: PAT_MRT4530_19404C.1.pep
MTGGGQSGGGRRELRSAMETMAWAAPGSMGKVRTLRRNQLRLSGATASEEEEEAGLPPWSAAADSRRKKRATLHMDISTVANISASNGKHNASAAHTTAPTAVAMPRLTMLHRLAPTHMHGRLEILLLRGHLRRAAATALLLLSGGSFVCFVSQSFLFLMFDGRVDAAERRRRRLLVPHGLAPVLQPVRRWLVEGERMGEKDRREPLCKLLVEQTNELDGKGNSGYGAQGQRRGGGGAAPVDPRGLTPEEMMMLPTGPRERSAEELDRSRGFRSYGGGFGAGGGDRRGGFDDDRRGPGRSSDLDMPSRADEADNWGTNKRFTPALGDSGRRDRFGGPSPAGRSDDIDDWSRDKKPMPSRYPSLGSGGGGGGGFRESPGFRDSPGPSDSDRWSRGGSFAPMPHNGERERPRLNLDPPKRDPLATATPPAEVARNRPSPFGAARPREEVLAEKGLDWRKMETEIEQKTSRPTSSQSSRPNSAHSSRPGSPGSQVSAVGSEGAPRSRPKVNPFGNAKPREVVLQEKGKDWRKIDLELEHRAVNRPETNEERILKEEINLLKEKLKESEANKTDGPDQASPEDPEDLSEKITQMEKQLELLTIELDDKVRFGQRPGSGAGRVSAVPPAIAEEPQIVVSIVDRPRSRGGMEPFPKPAEERWGFQGSRERGSFGGSRSSDRPMTRQRW

SEQ ID NO: 115848 - protein, 874 aa, Oryza sativa
  Clone ID: PAT_MRT4530_19405C.1.pep
MQQQQRSREMARAGEPAAAHRHRAERAAAGEPATRTHRTERAGEPAAATTTTTTRRPPPTTSERKESLESLLDATDAARGGRRGGGGVKAAVASRQGLEFKNLSYSVVKKQKKEGVKVKKEVYLLNDISGEAPRGQVTAILGPSGAGKSTFLDALAGRIAKGSLEGSVRIDGRAVTTSYMKQISSYVMQDDQLFPMLTVLETLTFAAEVRLPPSLSRAEKLKRVWELIDQLGLQTTAHTYIGDEGTRGVSGGERRRVSIGIDIIHKPSLLFLDEPTSGLDSTSAHSVVEKVKDIARGGSIVLMTIHQPSFRIQMLLDRLVILARGRLIYLGSPSTLQTHLAGFGRPVPDGENSIEYLLDVIKEYDESTSGLEPLVAYQRDGTKPDGAAKTPVPRTPRTPHQKSVQFRQIQLKSNQFSLNSGAANGNTFSNFESSYNVDGGGDDDDEDFDNSLERKLQTPMHAGGPASGYQPRLASQFYKDFSVWVYHGVTGSTPHRRPTWTPARTPVSSFQRGRAVTMTPTPQNNPQRRPPPPPSPHVPVFKPEEPTYHEYELDLEPPLDAPEEDYNGGHRPKFANPWPREVAVLSWRTVLNVVRTPELFLSREVVLAAMAVILSTMFRRLGAGDVPTVNRLLNFYIFAVCLVFFSSNDAVPTFIQERFIFIRERSHNAYRASSYVVASLVVYLPFFAVQGLTFAVITKLMLRMESSLLHFWVILFASLITTNAYVMLVSALVPSYITGYAVVIATTALFFLTCGFFLKRTLIPVGWRWLHYASAIKYPFEALLVSEFKGGRCYAGDRADLSPGPLGGFKPSSLRRELNASDAACPLMGQDVLSTLDITIDSIWVDVAILLAWGVLYRLLFYVVLRFYSKNERK

SEQ ID NO: 115849 - protein, 131 aa, Oryza sativa
  Clone ID: PAT_MRT4530_19406C.1.pep
MEFLCFLNLVHGRYRKLGGFIKNPKRDKLYVKGRWPCYKQPNLSNLCGYYVCEMLRVCGRYRTEFTYLPSIPYNASWFDQKTLINLCVDLCRFIHRDICNHLEEFHDPHSELATDPKFKNLREWEREHAVD

SEQ ID NO: 115850 - protein, 273 aa, Oryza sativa
  Clone ID: PAT_MRT4530_19407C.1.pep
MARPTESSASIASGGLAAPAPPTNPRNAIPAANPAANPISGAAHSAPANAPPPATECPVPPPPPLPRWSEVDEERILEILCDHLRRHDDLPQGVDLLMAVYGLLTRTDYSLAELEGLVTVLRRRFEENDAVLCSGSGGPAPGHQLRLYTLSLEVWGAAPTAVAPPKPAAAATPTTAPAKNAPGTSYPARQAGRPRQAAAPPAKKVRYEEMRVQYPRLAAKVDEMARKALEGVSDMTAWSLELRLQNQQLAGGTPEARTDDRAKELTGLISTLI

SEQ ID NO: 115851 - protein, 72 aa, Oryza sativa
  Clone ID: PAT_MRT4530_19408C.1.pep
TMFINVHGTCIIHLLLPTDQHKIIFFKNPYLFLTHKNFPSNIFKFFEQTFPFFFKKKKNPFFYFFKKMFFPL

SEQ ID NO: 115852 - protein, 1293 aa, Oryza sativa
  Clone ID: PAT_MRT4530_19409C.1.pep
MPRAADAVVRHGLLPLLCSRLLAIEYLDVAEQCLQAFEKISQRQPTPCLQAGMITAVLTYIDFFSASIQRVAVSAAANACKKVPKDCSQFVMDSVPVLCNLLQSEDKMVVEKVASCLINIVDSFSSSVELLDMFCHQGVIEKVLPLINTGGLTSLSPSTCSNLIGLLAKLACNSLVAVKSLFELNVGNTISRILVTSDLSHGMPYLPLENQSNQVNEALKLANQLIPSAARDVEDTQMVLAKEKIIVDEPRFLCQFSMEILPVLIKDHHVLFSSLKLIEILMQKLPDAYLGSFIKEGVVYAVEALLMQEDCSKSTNLSDEAQQSENQPIIRNKPTCFCYAFDYPRSDAAETRTCMIGKGNLFTFARHVKTTYFTTEAVNSEMGLTEILQKLKTCCAVLNDSADKSLNRDNIQNEEHLTDILSEVMMELHGGETMTTFEFLESGLIKSLSNYLSNGKYLQLERIPNDYNTEHFLAVLKRFQSFTQISFSRMEQGWGDMLLTLLVRKLQNALTSLDNFPVIMSHNFKPRNNISDIPTRHSTITPCIRVRFKKDEDQTNLSSYDNVVNLEISSLLHTIEEFLWPKICTGTSNQKPESSANGTASENKYPEDDLQERYSSPESSPPPEGVIIGNQSPSVEPGSNKGPSSSGAGQQETNTSDHAAQPKLLFSLKGKELDQSVTLYQSILQDQINAGSDIILDNQFWRIVHDVTYRTATNPEIDDPLKYSSCATTPAHPDKAGYICQTLPFFTSLLLGKLPCKLDRSSPSYDILFMLKVLEGLNRYSFHLVSDERNRAFVHGSITDLDDLKVDVSVVPQQEFVSAKLTDKLEQQMHDPLVLRSRCLPLWCTELMSACPFLFSFEARWKYFQLTAFGSLTPQHGNMMDTSGSGVMTERVPSFSRKKFKVDRDNILVSAAKVMQSHARSNAMLEVEYEEEVGTGLGPTMEFYTLISHEFQKSGLGMWRGELSGEAGLDNVHGGSVFVVAPNGLFPKPWSTHVDCSSFSEVNKQFHLLGQVVAKAVKDNRILDIPFSKAFYRLILGQELNIYDIHSFDPELAMTLMEFKALAARRKYLESSSSGDCKSTSDLSYRGCRIEDLAIEFALPGYPEYVLSLENSLDNVSADNLEQYVSFVVDATIRSGIARQLEAFKSGFNEVFPLSMLQVFSEDELERLLCGEQDTWDFAKLVDHIKFDHGYTSSSPPVINLLEVIQEFEGHQRRAFLQFITGSPRLPPGGLAALNPKLTVVRKQHNSNEADDDLPSVMTCANYLKLPPYSSKDKMREKLLYAITEGQGSFHLS

SEQ ID NO: 115853 - protein, 368 aa, Oryza sativa
  Clone ID: PAT_MRT4530_1940C.1.pep
AAGIRHEVHICHIRCSGSCFCYYYCEELLLSASSSHHRRRLRRLLLLPSWPLWGPPGAALPVRVSAGGCRPHGWSRRVVVPRGSTLVVSSPLACLSRVVPLGYAPASSVAPAGVAVIITAGIAIVKLIKGQIPMPKLFPDVPDLASIWELFTAVPVLVTAYVCHYNVHPIHNELKDPSQIKPIVHTSLVLCSTVYITTSFFGYLLFGESTLSDVLANFDSNLGIPYSQMLNDAVRVSYAVHLMLVFPMIFHALRLNLDGLLFSSSSPLSSDNRRFSVMTAVLLLVIFLSANFIPSIWDAFQFTGATAAVCIAFIFPAAITLRDPHSIAKKWDKILSIFMIVLAIVSNVVAVYSDAYSMFHRKSSPSIA

SEQ ID NO: 115854 - protein, 142 aa, Oryza sativa
  Clone ID: PAT_MRT4530_19410C.1.pep
GANHGWNPNIDYSLWSGNQTFYVGDLISFRYQKGTHNVFEVNQTGYDNCTMAGVAGNWTSGKDFIPLNDSRRYYFICGNGFCQAGMKVAITVHPLKHNATGDGAKNHGGDGAAQEAAAAAMPGAAVWMAVLAVAAAAVAILP

SEQ ID NO: 115855 - protein, 98 aa, Oryza sativa
  Clone ID: PAT_MRT4530_19411C.1.pep
MAHAAIDGCILGKQVEPEWPANLSLTCPYDPVNQFPVIAVELMGKSGELNRGEKSQRLKGRGAAGWGGFRHWEVMMALEEDGGAMTLVEEGWRRGASG

SEQ ID NO: 115856 - protein, 77 aa, Oryza sativa
  Clone ID: PAT_MRT4530_19412C.1.pep
MAPTAIAVTPWMAGGEVMVEMEEKQRACAAEMQRVLEGSNVEGEESRDAAGDGEGVSVARGAEEFEAKMRAPREEAE

SEQ ID NO: 115857 - protein, 199 aa, Oryza sativa
  Clone ID: PAT_MRT4530_19413C.1.pep
MLSDTKKRRKKIEQRLIEIDSKADERDLFEQEWIERSEGFLLLERDLGQLKVEVRLRFWGTYREEWNLGCRITASRMENASVVNADVEWRDEYGIDTEDWMSLSMRATQRKWRVCIESIPRYKYLKLKYETADGVRIKLFMLELEACLYAEPQMGLGNEGEDHELYEDPDVVREAFERQARLQHIASIIDLFICQLIYI

SEQ ID NO: 115858 - protein, 44 aa, Oryza sativa
  unsure (1)..(44): unsure at all Xaa locations
  Clone ID: PAT_MRT4530_19414C.1.pep
VXQVHKVHGQFLIXCSKHGHNRYHQFPWQGMLLNKNTCILFFSI

SEQ ID NO: 115859 - protein, 110 aa, Oryza sativa
  Clone ID: PAT_MRT4530_19415C.1.pep
TATCIICMAEEEIAMLAFLLATAYSGVVGLCGQGQAGGGQGLVERSRRDYDVREHARRHRRAPHRPPRPKPLRAGQVGRSCHPPIQMVLRAPRGQPVQFSEEANAETLSR

SEQ ID NO: 115860 - protein, 136 aa, Oryza sativa
  Clone ID: PAT_MRT4530_19416C.1.pep
NCNLPSIMFIYRRHIPSPEKALSGIYSLRRSYTRPSCYNCWALFQQCVTTSNPARASTVSIKTLDILSLPRRCRLGRNHERSLDMLNRRCYRDITKNEVPIMQLNLHHDMESCAATSFRKSSIFSPSMTLPCSLLP

SEQ ID NO: 115861 - protein, 89 aa, Oryza sativa
  Clone ID: PAT_MRT4530_19417C.1.pep
MTMTPSDHHHLTAGSRSSLAVAADRLNLEKRTPKADKKNTEKRGSQGRGANKEGIFAPLRIMTGRGCPGKGAKIRAVPWLPGSIWVMRI

SEQ ID NO: 115862 - protein, 72 aa, Oryza sativa
  Clone ID: PAT_MRT4530_19418C.1.pep
SLFHDIISRYVLPVASKFTCLILFDCLQDSSAYVIPYHICLLFRQRSSYPVGSFSTRCVIIIRFGMKCHLCV

SEQ ID NO: 115863 - protein, 172 aa, Oryza sativa
  Clone ID: PAT_MRT4530_19419C.1.pep
MASPSALIAMLLVMVVGCAAVASAMELSFIVGDAQGWNTGVDYTAWAKGKTFEANDTLVFRYARKQHTVTEVTKSDYDACTVSGKPISDFEGGALVTFIALSPGEHYFICKIGNHCASGMKLAVTVSNSSDTPRPQPWIGPYSTPASASAHLHAGGAVVAAAVGILLNLALF

SEQ ID NO: 115864 - protein, 1336 aa, Oryza sativa
  Clone ID: PAT_MRT4530_1941C.1.pep
MANDRDLPRVRRGTVLGPTQGCTTTLLPVEGTRLSLLAGAPSGRAVASSSIAVASPSPACPPFPAETPGAAFPPSPFPFLRAGRLQPPLSPCLSAGRRRHHLPRLRDATLIPGITSSSPEFRRNTVARAGLTFLLVDVSSGNPFRHARASAGAAVPSLGTVTGVEHAVLVSVQPLPAALVASSLVPVVVVVVLSSFPVSLVVAFVPPSSRSRPSSAFVQCAAAAPVVVFVLGSVSSSLVPAASRLRPRIAAEVVPSPSVSAAPVRRCRSHASSRGGKDLSSRCPVLVLSVSPRTRCAVVDPVTMVEVLEQEVVVRTPTPSGSDDASGSRDPRHRRQNSPTPLRRSPRRQEDPNRSGGSALSPPPGGGRPRRAGVRRHLTYGDGGSPQGALQAVGALLWHPLVNPEPETPVQRWLYDVANLVTAAQRTKESPSVSLDIEAIDSSNVVKALGQPKARRRPVWGTRRSDQHRAQQGQAPCCPHGEGAYSSGVSRLSARDARSPRPFPVGPGARPSCINPSEFLQIYTTIIMAAGGDDRVMANYFPMALKGVRHNRMLEKIASKEPKTTTELFELADKAVGQEEEQEAGPLRRRGLRPCCGRLADYRTVKNLVERYRKTDGERRQSRREGKAPATSASDRREEAKKKAPADDDDDSDNLEFQVPHGTVATLDGGACAHASRRSFKAMRRKVLAAVPTREAARQARWSENFYNGLTPMSRDHLDAAAGGAFFSKMVQGAIELIEKMVSNMGWSEERLQTRQRGMHTVKEMELLAAKLDLLMKRLDDHEKRPQGTVKPLDSHVTCEVCGGTGHSGNDCPETLTANESGRILGQPDSSIENVKAITTRGVIQKIHISIPLLDAMQVPTYAHNLKDILNNKRPLPTTEVVKLTEHCSNLILHKLPEKKKDPGCPTITCSIRAQQFDQALCDLGASISVMPKLTSLTSSTSRRKSLSFNQGRNNAPSSESKLPRKGNNNAQELLLEDASKITCTGQEVRAVGSEEAVSRTEIKEGVEEEAKDARSITSGDGWKIRELNRKEGSGSPSSRHDESSTRSSADVSMEDADAPRQLLSDDDLDLVSDRERQAYYMLSDWEYAHMREYSPELLKKISGTYRETRNMTRNEQESSSSSTPMQMYEAGWAPIGDAPGWTQAPRHSIGVSTWSSTSEDRWHAPHDIHWGNNQPSRSSGVPPAPSEWHSSSSRWDLGEITRRMDTLDMQTGEIRRAAPGLWSQSPLSVVAVGFARSRSTSAAPFQPPKTAGAPSLTLTRAEPPLEFVAGLRSSSSVVVFHTGCQTEKRREVRGVAGDSMPLVIFIEEWYTSGQSKTIRIAVPAVMGGLSNVFRD

SEQ ID NO: 115865 - protein, 95 aa, Oryza sativa
  Clone ID: PAT_MRT4530_19420C.1.pep
MASPSALIAMLLVMVVGCAAVASAMELSFIVGDAQGWNTGVDYTAWAKGKTFEANDTLVFRYARMQHTVTEVTKSDYDACTVSGKPISDFEGARL

SEQ ID NO: 115866 - protein, 44 aa, Oryza sativa
  Clone ID: PAT_MRT4530_19421C.1.pep
EDRRGNKDYINWHTCIPKGEFWTCTRVKQISQASCFSSTRNWVW

SEQ ID NO: 115867 - protein, 946 aa, Oryza sativa
  unsure (1)..(946): unsure at all Xaa locations
  Clone ID: PAT_MRT4530_19422C.1.pep
MARRAASRAVGALRSDGSIQGRGGRAGGSGAEDARHVFDELLRRGRGASIYGLNRALADVARHSPAAAVSRYNRMARAGADEVTPDLCTYGILIGCCCRAGRLDLGFAALGNVIKKGFRVEAITFTPLLKGLCADKRTSDAMDIVLRRMTELGCIPNVFSYNNLLNGLCDENRSQEALELLHMMADDRGGGSPPDVVSYTTVINGFFKEGDSDKAYSTYHEMLDRGILPDVVTYSSIIAALCKGQAMDKPWSHCKEGRVIESEKLFDLMVRIGVKPDIITYSTLIDGYCLAVGLKPNTVTYSTLINGYCKISRMEDALVLFKEMESSGVSPDIITYNIILQGLFQTRRTAAAKELYVRITESGTQIELSTYNIILHGLCKNKLTDDALQMFQNLCLMDLKLEARTFNIMIDALLKVGRNDEAKDLFVAFSSNGLVPNYWTYRLMAENIIGQGLLEELDQLFLSMEDNGCTVDSGMLNFIVRELLQRGVVVVVSGESATTPPPTLKILTCGITVNPFSKTCGITVNPFSKPIENIVVAKVQTGACGQVKEVGKNASEERLIVVSSQEIPDDPVSPTIEALILLHSKASTLAENHQLTTRLVVPSNKVGCILGEGGKVITEMRRRTGAEIRVYSKADKPKYLSFDEELVQHISLILVDRHAGRAHLLSHQLLTAIYVLVLNRSIVVAEVKNNHGTAACWALAAISYNRTNFSDLLVSHWFIIKASVFSFTLGLQNLRTGPAHDPYTVYPVEYFSKREYPSGSSKVAPSASYERYAATTRLPNGELPSSISPGADYMSCRSYLDQVPTDRYSNRVTLQLGLSRAGNSNVQQLGITRAGNSNAYDYTEAAEQIHGREDYRRLSGLTGYPGGSSNCGFQIVNWSLSLVLVXSISGARVKLHEAHPGSSESIVEIQGIPDQVKAAQSLLQGFIGASSNSRQAPQSSRMAHYF

SEQ ID NO: 115868 - protein, 239 aa, Oryza sativa
  Clone ID: PAT_MRT4530_19423C.1.pep
MARRAASRALRSEGSIQGRGGRAGGGGGGAEDARHVFDELLRRGRGASIYGLNRSLADVARGSPAAAVSRYNRMARAGADEVTPDLCTYGILIGCCCRAGRLDLGFAALGNVIKKGFRVEAITFTPLLKGLCADKRTSDAMDIEIPDDPVSPTIEALILLHSKVSTLAENHQLTTRLVVPSNKVGCILGEGGKAAEQIHGREDYRRLSGLTGDAVGSPIAGSGGGEGTAPVRRLPSHRK

SEQ ID NO: 115869 - protein, 580 aa, Oryza sativa
  Clone ID: PAT_MRT4530_19424C.1.pep
MDHDRSRRHKSNTSRKRPHFNSDDGKRKRLNSRHDDGTISSEPIETIYRILCPVKKIGSVLGRGGDIVKALRDTTKAKIRVADSIPGADERVIIIFNYSSQTEEAAQNISTDGFEDMKPHCFAQDALLKIHDKIAADEDLHAGIVHEKSENVDDVIARILVPGNQVGCLLGKGGSIIQQLRNDTGAGIRVLPSENLPQCALKSDELVQISGSSSLVRKALYEISTRLHQHPRKDNPPLEEIIDASTQRKHQAPPQLPHANPMLPHLHVDHSPQIPLLDPYRNRPLQYHSAEAEEFSIKILCASEHIGQVIGKSGGNVRQVEQQTGACVQVKEVGKNASEERLIVVSSQEIPDDPVSPTIEALILLHSKVSTLAENHHLTTRLVVPSNKVGCIIGEGGKVITEMRRRTGAEIRVYSKADKPKYLSFDEELVQVAGLPAIARGALTEIASRLRTRTLRDGSSSNNPTPFAPFDGPPVDILPNREFMLYGRSANSPPYGGPPNDPPYGRPAIDPPYGRPAIDPPYGRPAIDPPYRRPANDTSYGGLNNDGPRDPYTAYPVEYFSKREYPSGNSKVTPSASYDM

SEQ ID NO: 115870 - protein, 1493 aa, Oryza sativa
  unsure (1)..(1493): unsure at all Xaa locations
  Clone ID: PAT_MRT4530_19425C.1.pep
MARRGRRYCRAEGTEERGTGAPVAGRWRRRRPNVFPSAALESPELRRHHADYRPWAAHMEAKPVYFASRRASGRPELQQQLVRPTPIWADWADLSLPERRPIWAVHPRRPANRTVGVLLYCQVGDPPPPAAAAAAAGMARRVTTLTRARTRARGGGVPSAQGGTTQDLGRAGGSGTEGARHVLDELPLRGWGASIYSFNRTLTDVARDSPAAAVSLFNRMARAGADEVTPDLCTYSILIGCCCRAGRLDLGFAALGNVIKKGFRVEAITFAPLLKGLCADKRTSDAMDIVLRRMTELSCMPDVFSCTILLKGLCDENRSQEALELLHMMADDRGGGSPPDVVSYTTVINGFFKEGDSDKAYSTYHEMLDRRISPNVVTYSSIIAALCKAQAMDKAMEVLNTMVKNGVMPDCMTYNSILHGYCSSGQPKEAIGTLKKMRSDGVEPNVVTYRSLMNYLCKNGRCTEARKIFDSMTKRGLEPDIATYRTLLQGYATKGALVEMHALLDLMVRNGIHPNHYVFSILICAYAKQGKVDQAMLVFSKMRQQGLNPDTVTYGTVIGILCKSGRVEDAMRYFEQMIDERLSPGNIVYNSLIHSLCIFDKWDKAKELILEMLDRGICLDTIFFNSIIDSHCKEGRVIESEKLFDLMVRIGVKPDIITYSTLIDGYCLAGKMDEATKLLASMVSVGMKPDCVTYNTLINGYCKISRMEDALVLFREMESSGVSPDIITYNIILQGLFQTRRTAAAKELYVGITESGTQLELSTYNIILHGLCKNNLTDEALRMFQNLCLTDLQLETRTFNIMIGALLKVGRNDEAKDLFAALSANGLVPDVRTYSLMAENLIEQGLLEELDDLFLSMEENGCTANSRMLNSIVRKLLQRGDITRAGTYLFMIDEKHFSLEASTASFLLXLPQSSGSKYQEYHSCIRGGIFSLCVNSEVQENHLLDSESGVHFLLKLLNPPVNLVDSKAPSIGSKLLGISKVQMLNGSNKDSDCISEEILSKVEEILLSCQVIKSLDKDDKKTTRPELCPKWLALLTMENACLSAVSVEETSDTVSRVGGNFKETLREMGGLDSIFDVMVDFHSTLENLIKDTSTSALDRNEGTSLQSAALLLKCLKILENAIFLSDDNKTHLLNMSRKLNPKRSLLSFVGVIINTIELLSALSILQNSSVVSSSTYPKSSKVSQQSYSVVMAGGDRGRGVECHPHQGVSAALLRPGPQALAASWRRRETVVRSDFAAGGVATMGDSPQALSDRLCGSATKVWRGGAEWTAEAFARNGAAGPSQSRLPVTRNRAQHYIAKIWATLTISMFYKLDVEGMENLPPNSSPAVYVANHQSFLDIYTLLTLGRCFKFISKTSIFMFPIIGWAMYLLGVIPLRRMDSRSQLDCLKRCVDLVKKGASVFFFPEGTRSKDGKLGAFKRGAFSVATKTGAPVIPITLLGTGKLMPSGMEGILNSGSVKLIIHHPIEGNDAEKLCSEARKVIADTLILNGYGVH

SEQ ID NO: 115871 - protein, 483 aa, Oryza sativa
  unsure (1)..(483): unsure at all Xaa locations
  Clone ID: PAT_MRT4530_19426C.1.pep
MAIPGSLFYRSPALQVIYVLCVLAVLVPDAGGRRHHQIQLQPECPTFTCGAHLRNASYPFRRRGDPPECGVASYELTCTDDKAIIQVDNGTYLVRGINYTDATFSVVDANMLDSSNSCPLPRWNRTPYRRYGVVEDSSRNIVQELMPSYSTITAAFVTCSREVTNNGMYSPVACLSNSSSFVYVLTGWFANYIKSLEPSCGYLAMTPVASAWLHPNASYADVVKLMRGGFAIQFPDTINLYSSFKECMAELLQDIRDGDQPKSSERNQYRIELVSLIEYGILQCATQGSRPTRAVMAIQLFIRRTPIAVWTLKCIAGHFREKIGQGGYGSVYKGVLLPGDVHVAVKVLGNYNCNGEEFISEVSTIGRIHHVNVVRLVGFCAEEVRRALVYEHMPNGSLDKFIFSHDMRFSWDKLNEIALGIARGINYLHQGCEMQILHFDIKPHNILLDSNFVPKVADFGLVKLYPCXRDNSFVPVSAARGTI

SEQ ID NO: 115872 - protein, 81 aa, Oryza sativa
  Clone ID: PAT_MRT4530_19427C.1.pep
WAPFINGSAFTTGRPSRKTGEQQRLFLFHPSWTPDIYLYLPPEGGGTPVPCNKGRASSRPPKKTEVGVRPYLIHIWARHSP

SEQ ID NO: 115873 - protein, 53 aa, Oryza sativa
  Clone ID: PAT_MRT4530_19428C.1.pep
ATSFRRTACPSSVVAQPHHTTCITQIGNSRPPSRLPALIKHVHPHISLATPPA

SEQ ID NO: 115874 - protein, 503 aa, Oryza sativa
  unsure (1)..(503): unsure at all Xaa locations
  Clone ID: PAT_MRT4530_19429C.1.pep
AGRRHHQIQLQPECATFTCGAHLTNPFYPFRLPRDPPECGVASYELTCTDDKAIIQVDNGTYLVRGINYTDATFSVVDANMLDSSNSCPLPRWNRTPYRRYGVVEDSSRNIVQELMPSYSTITAAFVTCSREVTNNGMYSPVACLSNSSSFVYVLTGWFANYIKSLEPSCGYLAMTPVASAWLHPNASYADVVKLMRGGFAIQFPDTINLYSSFKECMAELLQDIRDGDQPKSSERNQYRIELVSLIEYGILQCATQGSRPTRAVMAIQLFIRRTPIAVWTLKCIAVSCRFILPPLVVLTFLVHKYWKRRMIIDAVEKFLRMQLMIGPTRYAYTEQGIFREKIGQGGYGSVYKGVLLPGDVHVAVKVLGNYNCNGEEFISEVSTIGRIHHVNVVRLVGFCAEEVRRALVYEHMPNGSLDKFIFSHDMRFSWDKLNEIALGIARGINYLHQGCEMQILHFDIKPHNILLDSNFVPKVADFGLVKLYPCXRDNSFVPVSAARGTI

SEQ ID NO: 115875 - protein, 116 aa, Oryza sativa
  Clone ID: PAT_MRT4530_1942C.1.pep
KPNFANTSPGGAPIFLLGNLTFFGPKAKNYTPPGGGFPPLMEIGPKPNPCGFLTAPLKRGSPPGIRGPPGPYPPLGGFFKNFYQKRGSEKKKKPQNPHFCHGKLWGKKKKKKFFFP

SEQ ID NO: 115876 - protein, 95 aa, Oryza sativa
  unsure (1)..(95): unsure at all Xaa locations
  Clone ID: PAT_MRT4530_19430C.1.pep
EGAAEGVQVHARLVGDELSGVPLSSRSPPQPKGRQPXPGSPAPAGAGAAAAESAPSGEGPRRPPPSRGALGVGGGEREREGDAVALGQKDASRXG

SEQ ID NO: 115877 - protein, 58 aa, Oryza sativa
  Clone ID: PAT_MRT4530_19431C.1.pep
SHMSHFIYEKLLFKFLPLYFGVFIHLTIANLSVHRAVMNNYHCNALLLLITGIVCGQS

SEQ ID NO: 115878 - protein, 253 aa, Oryza sativa
  Clone ID: PAT_MRT4530_19432C.1.pep
MGQQQPQDAVAANGNGGGKRPHAVVIPYPLQGHVIPAVHLALRLAARGFAVTFVNTESVHRQITSSGGGHGVGGGDDIFAGAGGGAMIRYELVSDGFPLGFDRSRNHDQYMEGVLHVLPAHVDELLRRVVGDGDAAAATCLVADTFFVWPATLARKLGVPYVSFWTEPAIIFSLYYHMDLLTKNGHFNCKAAPSSSSLPSPILPHASILDADSIPRILSLTGDSMEVDEVMGSSESEKSARRDAVTVARLMLS

SEQ ID NO: 115879 - protein, 88 aa, Oryza sativa
  unsure (1)..(88): unsure at all Xaa locations
  Clone ID: PAT_MRT4530_19433C.1.pep
KSGNTKICREATFQLIISSSSKQTLVEKPFLVGPPDFTIVPVVLKTGTKNIFSPGLKALRNFLIXLPTGTKDLFIVSVGNTNREKRSI

SEQ ID NO: 115880 - protein, 95 aa, Oryza sativa
  Clone ID: PAT_MRT4530_19434C.1.pep
EWTNCHLESIPTVFPCWRNISMRFLCEHLGRDHAIAEVKHVYHPTQASREGPENLQVLLLLLLPILNPSHLSTLHRLLRRRRARNRRLRRRRRRR

SEQ ID NO: 115881 - protein, 186 aa, Oryza sativa
  Clone ID: PAT_MRT4530_19436C.1.pep
MDLLRCRLWREGAPATVAGRGGSGGTRLLLRVAAELGYCCCAWRRWEAAVAATERGGDGTRLLLLCMVAVGGGFCCGTWWQRDVGGCCLTDCGGLCHCVDPDANAILVELLSDDGAYRNHLNLEIWTTEWPELVGLTIEQAKAKIKADRPDLQVEVLPVGTIILGVVVPNRVILWVDTVAEIPKIG

SEQ ID NO: 115882 - protein, 333 aa, Oryza sativa
  Clone ID: PAT_MRT4530_19437C.1.pep
MRAGAWLPTTGDMKTTNDGDALGGGGGGSSGGSRITRAGAAARRGESGDVAEGSASILWTHAHRSRGGRMTPAVIAWMVRRGAATSRQPSADGSGDRADGRSSRARVKIERRGRILGGVWSRATHVGEEMQARPWPDSAQANMRELGDAATMLEVDEEDPERLTMTSADDEGVEARTAMKTTRGNIVTHRGNTVKQVHRREKKQDRVSRVRPGGADSRRQERAQVVETKGGGVGGRGGPWRADGVRVSTVKTARQREPGDAGCGPRRGEETEDEPANRLSGSGGGGGWRRLGIRRSAWTERLGIRPSGPRRRNSGDGAGAETDAVASKITRST

SEQ ID NO: 115883 - protein, 343 aa, Oryza sativa
  Clone ID: PAT_MRT4530_19438C.1.pep
MRAGAWLPTTGDMKTTNDGDALGGEGGGSSGGSRITRAGAAARRGESGDVAEGSASILWTHAHRSRGGRMTPAVIAWMVRRGAATSRQPSADGSGDRADGRSSRARVKIERRGRILGGVGRKRREREREWSRATHVGEEMQARPWPDSAQANMRELGDAATMLEVDEEDPERLTMTSADDEGVEARTAMKTTRGNIVTHRGDTVKQVHRREKKQDRVSRVRPGGADSRRQERAQVVETKGGGVGGRGGPWRADGVRVSTVKTARQREPGDAGCGPRRGEETEDEPANRLSGSGGGGGWRRLGIRRSAWTERLGIRPSGPRRRNSGDGAGAETDAVASKITRST

SEQ ID NO: 115884 - protein, 117 aa, Oryza sativa
  Clone ID: PAT_MRT4530_19439C.1.pep
GEKRGPNIKSSAGMGTLSQSTGATKASSPMPVKETRFRPFFFPLAFAKVLSTKGVKPKKRGKKTIPFLQHGKFCTITPPRAKPTWVWQPSLKQGGGLSAIQLSNATPPQGKKGCLQP

SEQ ID NO: 115885 - protein, 1593 aa, Oryza sativa
  Clone ID: PAT_MRT4530_1943C.1.pep
MARRRGAAAVGGALTSGELEAMAVESSGQGAWLAAVAVLESIKISLMIGIWKNSKRAITRMPRFKPEYLFGVEGFVQELRTMSFVIGFGTAPFYAQISHDRHEEKCRVKVTLNSNSEDIPSVMFEAGGRNYIHACQEVARIAIGELRDRYSDQLADTEYRYHPRQPQGSDRGSYLETEGIENDATTRHLVEMLWAMDETRAETVLAAQDREDRNRGKIYKLEDKVDRLEKELATLKGEAPPQKARIRLTARKRALFVPCYQLAPKVRVVEKEVAPTLADPSVIIISDDEKEESKRNHSKIEWVATQDDEDEPNEPSIDLRCSEELECHNQQNQGNNHAPPQNKLAEFLRVRPPIFSSTTNPVEAGDWLHTIEKKLDLLQCTDQEKVSFASHQLHGPASEWWDHFRLNRTTAEPITWLEFTAAFRKTHIPSGVVSLKKKEFRSLTQGSRSVTEYLHEFNRLARYAPEDVRNDEERQEKFLEGLNDELSYPLMTGDYHDFQKLVDKAIRQEDKYNRMEQKKRRIAQFKTQQGNNQKPRLTLGPQTMPHGGSSSVVRPQRQFFNNNAGNNNRNQAPRPVAAPTQQQPAKREQGSKPVVCFNCGDPGHYADKCPKPRRVKVVPAQSNSTVPASKARVNHVAAAEAQDAPDVILGTFLVNLVPAAVLFDSGATHSFLSMSFAGNHGMEVEDLRRPLMVSTPSNQALSLQRSPSVRIEIKGVLFLANLILLESKDLDVILGMDWLARHKGVIDCANRKVTLTSHDGRVVIVHALSSESLRSRLNQITLEEIPIVREYPDVFPDDLPGMPPKRDIEFGIDLVPGTTPIHKRPYRMAANELAEVKRQVDDLLQKGNIRPSSSPWGAPVIFGGKERSYPEDLKGATVFSKIDLRSGYHQLRIKEEDIPKTAFTTRYGLFECTVMSFGLTNAPAFFMNLMNKVFMEYLDKFVVVFIDDILIYSRTKEEHEEHLRLALEKLREHQLYAKFSKCEFWLSEVKFLGHKQPKTVSEICSFLGLAGYYRRFIENFSKIAKPMTRLLQKDVKYKWSEECEQSFQELKNRLISAPILILPDPKKGFQDGKVVAYASRQLRPHEKNYPTHDLELAAVVHALKIWRHYLFGTRTEVYTDHKSLKYIFTQPDLNMRQRRWLELIKDYDMGICVPDNKDLKDAILKEAHDTLYSIHPGSTKMYQDLKERFWWASMKREIAEYVAVCDVCQRVKAEHQKPAGLLQPLKIPEWKWEEIGMDFITGLPRTSSGHDSIWVIVDRLTKVAHFIPVKTTYSGSRLAELYMARIVCLHGVPKKIVSDRGSQFTSNFWKKLQEEMGSKLNFSTAYHPQTDGQTERVNQILEDMLRACALDFGGSWDKNLPYAEFSYNNSYQASLQMAPYEALYGRKCRTPLLWDRTGERQVFGTDILREAEEKVKIIQERLRVAQSHYKSYADNRRRDLSFEEGDYVYLRVTPLRGVHRFHTKGKLAPRFVGPYMIVSRRGEVAYQLELPQSLAGVHNVFHVSQLKKCLRVPTEEANLEQIEVQEDLTYVEKPIRILETNERRTRNRVIRFCKVQWSNHSEEESTWEREDELKSAHPHLFASSSESRGRDSV

SEQ ID NO: 115886 - protein, 1477 aa, Oryza sativa
  Clone ID: PAT_MRT4530_19440C.1.pep
MGVHGLWELLAPVGRRVSVETLAGKRLAVDASIWMVQFMRAMRDDKGDMIRDAHLLGFLRRICKLLFLRARPVFVFDGATPALKRRTLAARRRHRDAAQAKVRKTAEKLLLSHLKARKLEELAAQIKSDRAKHDNKGKQVESSKMGEIEKINGEQKKNNDGENSGGIVAPIDQEKLDELLAASLAAEEEANLTGKGKQYTVSVPLQEAADISEDDDEDDGEMIFPMTTGDIDPAVLASLPPSMQLDLLVQMRERVMAENRQKYQKIKKEPAKFSELQIQSYLKTVAFRREIDEVQRGAAGRGVGGVQTSKIASEANREFIFSSSFTGDKQTLAQRGGKEHIVDSIKSKREINPAVFKSNPTSSSSSIKPNNSEPLGSFGPDVETYRDERGRIRVSRVKAMGIRMTRDIQRNLDFIKEHEQVRNRGHDSVVEGLANNEEPPDFPEHLFEGNGLRSSLHLSEDYDETASDNHHTSSLVGSDKISEGDYHGSKETIEISFADDQTEVKDNDDQIFLHLASGASSNLFTTEQTDGSDCITKEGVLESETPPMQVDEKDHQASLMDNFCTDDEIEWEEGGCDVPGGPSSNENDQSKVPKGDLEEDALVQEAIRRSLEDFKKQEHENVTPEDLQASFEDKPLQSYDDVPKPAGAAGKTADKIGKEINCEENDIVHGSLVVDGRENENQTQPENSDGHADMKRAYLLDPLPPCNMTASTSAAKSPEGSEVQHHNSMLHSIRTPEWPKNDSDKVMTQYSLNSDNSKCKIDDSCTGETSRSLQNDLLMDELVPDTAVQKENMIQRTTDLSTSEINYTKLNDNVGIYSVSASNLEKELSLLRQEQEYLGNERRKLESHAESVSSEMFAECQELLQMFGLPYIIAPMEAEAQCAYMEMTNLVDGVVTDDSDVFLFGARNVYKNIFDDRKYVETYLMKLKQWEVHVLAGPSTANIVIHFQDIESELGLTREQLIRMAMLLGSDYTEGIRGIGIVNAIEVAHAFPEEDGLQKFREWVESPDPTLLGKLGMESGSSSKKKKSGRNHSDGKGNSLEPEYAKGSDDSQSSNETQRIKEIFMSKHRNVSKNWHIPSTFPSEAVINAYISPQVDDSTEPFSWGRPDSGLLRKRSNVEFLQVMLGKTQLRMEAFYSFNERFAKIRSKRIKKAIKGITGKSFLETDELDHDSPSTSNTSKKKERTSSGRGRAKGQRTKDVGPGNTGNQDYDIADSLVDAGEHTTEKSTSSKKRTANSSGGSRGKGRRSMNAAHVIIGNGEDSDVSNLASDEDSHIRHTNDYESEGLTLRRSNRKRKQVTYAEDGQEADDNDVSIHQIDENQGQGSLEEDMCHMAGLDTQSNLLHQDTSELNIDQTHTDPSDMNEDPSGFELPEDCHTDTAPKDYLFAGGGFCMEEGDEQDTGVDQSGAEMEHETRDACEGIDEVSESQSGKSMSYSATGEGTENANTEARGASSSQGRNASRGSGAVPKLTKRRRKS

SEQ ID NO: 115887 - protein, 122 aa, Oryza sativa
  Clone ID: PAT_MRT4530_19441C.1.pep
MKMTCHVKRRGHHHGDLRQQGAGAAERDGEVVTDGGLLQHRQPHVRIPSEAAATVRRRGRWATQSSVGGEDGDAAMVVSPHKVVARRAAAHSSVLEGAGRMLKGCDLHHVRNAVLCRTGFLD

SEQ ID NO: 115888 - protein, 96 aa, Oryza sativa
  unsure (1)..(96): unsure at all Xaa locations
  Clone ID: PAT_MRT4530_19442C.1.pep
QASTSRTHPLLLLFSIRCGKAXIQLLRARXXSTMAAXXRWWLVAFFLVVCGGSRRGFGGAAAGARXFGFRQFAXIRRRRXEGRESLFYYFAEARSG

SEQ ID NO: 115889 - protein, 181 aa, Oryza sativa
  Clone ID: PAT_MRT4530_19443C.1.pep
YPGMQKRLLQELVDNGFDENTQITADLTNKLTFLDKYIKETQRRHNPSYQPARTSAVDMILPGGYKLPKDSIVIPALHHIHNNTKIWDNPALFDPDRWDTDRVKNRPKDSYIPFATGPRMCVGFNFALQEVKVFLPKLVYRYKFNLAQDGPVEYDPMFQLIRPNNLYVRAERRIKWPSKSD

SEQ ID NO: 115890 - protein, 83 aa, Oryza sativa
  Clone ID: PAT_MRT4530_19444C.1.pep
LATPSSPVPSRQLAASGSAFQCLGRCLPSAAGRLVAPCCHGMSSPRAKQSEEEEDGAEPLIARPHVLFRPSIADRWAPLGRLH

SEQ ID NO: 115891 - protein, 62 aa, Oryza sativa
  unsure (1)..(62): unsure at all Xaa locations
  Clone ID: PAT_MRT4530_19445C.1.pep
PLEPYGAGRCASPINTLALATVHLWLVQMLHRFKXAPVADGVLMLERLDMSLQMHKPLVCKA

SEQ ID NO: 115892 - protein, 87 aa, Oryza sativa
  Clone ID: PAT_MRT4530_19446C.1.pep
MAASAVAGPGWRKGKELTCGASGSRSPGIGGGARDSKPVHLRGRDGDGATAPTGLRAAAAWSVGPTSPSPAVARSHAVDGAQAAAAA

SEQ ID NO: 115893 - protein, 41 aa, Oryza sativa
  Clone ID: PAT_MRT4530_19447C.1.pep
YVQRHTNPTTWTHRNQRRIARQDLVSPGLQRRPQPVAPIRG

SEQ ID NO: 115894 - protein, 500 aa, Oryza sativa
  Clone ID: PAT_MRT4530_19448C.1.pep
MALPLLRLLLLLVLSSVPLSCQLAHSTAADTQNWGQTSVVHLRNAHTRKLLGLLDDISGRTGSLHALLLEESPKQAPPHHHNRHGGHHRAAHTPAPSPAPSPSPFTAPPKSASPAAITIPISPSTPQPKAESNPAVEDAPAQPRHSWRNYGLVTAGSAVFLVMTIASVIYCRAKKVGTVRPWATGLSGQLQRAFVTGVPSLKRSELEAACEDFSNIIGSTSSCMLYKGTLSSGVEIAVLTSSTESGKEWSKECESQYRKKITNLSKVSHKNFMNLLGYCEEENLFTRAMVFEYAPNGTLFEYLHVREAENLDWMARVRISMGIAYCLEHMHQLNPPVVPRNFNSTTIYLTDDFAAKVSDLDFWNDSKGSFNSATSDETVMVEIDSMVHQYGIILLEILTGRVPYSESDGPLEHWASGYFEGKMTLAELIDPSLGSFPEDAARALCDVARWCIEPEPSKRPLMSQVAGRMKEITSLGPEGATPKVSPLWWAELEIMSGQAT

SEQ ID NO: 115895 - protein, 221 aa, Oryza sativa
  Clone ID: PAT_MRT4530_19449C.1.pep
MAILYAVVARGTVVLAEHSAAATNAGAVARQVLERLPGGGADSHVSYTQDRYVFHAKRTDGITALCMADEAAGRRIPFAFLEDIHGRFVKTYGRAALTSLAYGMNDEFSRVLSQQMDYYSNDPNADRINRMRGEISQVRTVMIDNIDKVLERGDRLDMLVDKTANMQGNTIRFKRQARRFRNTTWWRNVKLTIALIFLLTVIIYVVLVFMCHGFTLPTCIR

SEQ ID NO: 115896 - protein, 200 aa, Oryza sativa
  unsure (1)..(200): unsure at all Xaa locations
  Clone ID: PAT_MRT4530_1944C.1.pep
MTSRLPGRSSAHLVSREGAPKGAFAGAPDGSGAPPGAPDGRRRRPXRRRSATRERGXKGETNGTVFGSPRDGEGGETADGAEEDGGAARDDEGDGAPAVGGRSGAADGVGDNTAKRTEGSPSKEEVRSGGGGEPKVDGDGGERGARRXHDSDGESERXAAETEERSSGNEYIATGGGERGRGGNARGDGGMRRNPRRRRR

SEQ ID NO: 115897 - protein, 112 aa, Oryza sativa
  Clone ID: PAT_MRT4530_19450C.1.pep
PTRPSTRPPTRPVELAPRRRRLAHGVRLRLRRWRRRLLLDSDGRPLHPRGGCQRLHCALLCSSLLVEIGVEGTHSLHARTTSLKHRKRYPPWLASPNHLFFIRTRGVGWLAP

SEQ ID NO: 115898 - protein, 94 aa, Oryza sativa
  Clone ID: PAT_MRT4530_19451C.1.pep
IEDDDEVQVVACDGGLQLPQSHSHRRRSRNYVAELLLDELKVRNGGGSGQEGSDEGHSETDGLLDVCYCEMRRLRLLYTDVYTKVSEARKCKKT

SEQ ID NO: 115899 - protein, 105 aa, Oryza sativa
  unsure (1)..(105): unsure at all Xaa locations
  Clone ID: PAT_MRT4530_19452C.1.pep
GAHIGVHLDMTYWCGGDCQYDRGESIANDQGNRTTPSYDGCTHSERLTGDAPKNQEGMNSINTXFKAERLIVTRGNNASVHRHTKLWTLNVIAGPGDKPMIGAQY

SEQ ID NO: 115900 - protein, 88 aa, Oryza sativa
  Clone ID: PAT_MRT4530_19453C.1.pep
MWDPHHQAHPFYAPNIIRFIDDLTAVVPSSCGGRGPNTSGIIRCQNRGNQAKEDCTHLRCHTCCKSHGFDCTTHFKSTWVPPTMHRER

SEQ ID NO: 115901 - protein, 95 aa, Oryza sativa
  Clone ID: PAT_MRT4530_19454C.1.pep
ADSGKLGGSTDGSPYYRSSSEDDRNADELFGQVPEIQWSVPELPSPPTASGLHWQRHPAATHGGGGGGPDTTAFVPDICSPDSCFPATTSKRRRQ

SEQ ID NO: 115902 - protein, 318 aa, Oryza sativa
  Clone ID: PAT_MRT4530_19455C.1.pep
MAMAKQQRVYQVWKGNNIILCGGRFIFGPDAKATLLSFSLIAIPVAVFCYFVARHLIHMFPAYNAGYAILAVTIVLSIYRNYRYFFCFVSSAAILCIYIFSMCALHIKLLMNRDHHSVIKAIKESPASVAIMAYCFICFWFVGGLTGFHSYLIATNKTTYENLKYKYNNQPNVFDRGCMNNCSEFFCTKRAPSRINLRAIVQEDHGVAPPRISRSNVAEEETPHRPRAKVEDDLEMGLDILKTSQRRSDELGDEELGVESNGVKYRRADCSPGLDNEIPITRTKIESSSEVRDLEILPTGNAALPSSPEKKQHPDVLC

SEQ ID NO: 115903 - protein, 209 aa, Oryza sativa
  Clone ID: PAT_MRT4530_19456C.1.pep
MAGLRKGIRDGHAQHRLLHHRREMSTSSQDAYDVPDYNFARVESKLPFYDGKYDSIAYIDWELAVDNEFDKNDFSDAQMIKAASNKFTSSALFWWSYVSNIPGTWDEYKTLMRKRFEDQHIQQKEENGILEKKEDKAPAMSEESSQEHHMEKPRTVFREEGEDDVTMATTYTTIAHIMDEQDDIKIKFSRNKVDLYRQDQQPTERCIDR

SEQ ID NO: 115904 - protein, 457 aa, Oryza sativa
  Clone ID: PAT_MRT4530_19457C.1.pep
MASVDGATRRGGGDGSIRRRRVLVFPLPFQGHINPMLQLAGALHGRRGGGGGELSVTVLHTRFNAIDPSRYPELAFAEVPDGIPPDVAANGNIVDIIVALNVAMDGEDRRELGLPTLVLRTGSAACLGCYLAYPALLQKGYLPPKESQLYEPVEELPPLRVRDLYYTSNANQELVRKVLGWIAETARNSNGVVINTFDELEPAELERIRRELDGDGVAIVLAVGPLHKLSPMNAGGSLHLCPDRSCIEWLDTQATGSVLYVSFGSLASLDSNEFLEVAWGLESSGQPFLWVVRPDLVKGLDKPSLPDGFERAVEGRGKVIKWAPQQEVLAHHAVGGFWTHNGWNSTLESVSEGVPMICKPQFADQMLNTRYLEAVWAVGFELVGKLERGEIKKAIKRLMVEKEGAEIRERAKELKKKMDQCLESSGSSQIAINRSLVGPMHDIHVMWPVAELESFHV

SEQ ID NO: 115905 - protein, 496 aa, Oryza sativa
  Clone ID: PAT_MRT4530_19458C.1.pep
MASVDGATRRGGGDGSIRRRRVLVFPLPFQGHINPMLQLAGALHGRRGGGGGELSVTVLHTRFNAIDPSRYPELAFAEVPDGIPPDVAANGNIVDIIVALNVAMDGGESSPSFRDVLASVVAADDEGRKPRASCLIIDGNLMAAQKTAAELGLPTLVLRTGSAACLGCYLAYPALLQKGYLPPKESQLYEPVEELPPLRVRDLYYTSNANQELVRKVLGWIAETARNSNGVVINTFDELEPAELERIRRELDGDGVAIVLAVGPLHKLSPMNAGGSLHLCPDRSCIEWLDTQATGSVLYVSFGSLASLDSNEFLEVAWGLESSGQPFLWVVRPDLVKGLDKPSLPDGFERAVEGRGKVIKWAPQQEVLAHHAVGGFWTHNGWNSTLESVSEGVPMICKPQFADQMLNTRYLEAVWAVGFELVGKLERGEIKKAIKRLMVEKEGAEIRERAKELKKKMDQCLESSGSSQIAINRSLVGPMHDIHVMWPVAELESFHV

SEQ ID NO: 115906 - protein, 892 aa, Oryza sativa
  Clone ID: PAT_MRT4530_19459C.1.pep
MYDAVACVVAVVVVVVFAMLWVKLARSGDGGGGGSGGVRLPPGPWRLPVIGSLHHVVGDRLLHRSMARIARRLGDAPLVYLQLGEVPVVVASSPGAAREVTRTHDLAFADRALNPTARRLRPGGAGVALAPYGALWRQLRKICVVELLSARRVRSFRRVREEEAGRLVGALAAAAASPGEEAAVNFTERIAEAVSDAALRAMIGDRFERRDEFLQELTEQMKLLGGFSLDDLFPSSWLASAIGGRARRAEANSRKLYELMDCAIRQHQQQRAEAAVVDGGAGVEDDKNQDLIDVLLNIQKQGELETPLTMEQIKAVILDLFSGGSETSATTLQWAMSELIKNPMVMQKTQAELRDKLRRKPTVTEDDLSGLKYVKLIIKETLRLHPVVPLLVARECRESCKVMGYDVPKGTTVFVNAWAIGRDPKYWDDAEEFRPERFEHSTVDFKGIDLEFIPFGAGRRICPGMAFAEAIMELLLAALLYHFDWELPNGMAASELDMTEEMGITVRRKNDLHLRPHPPCNVALALHSPRRDLIAMDHVLACVGILVAFTPLFLLAVLPLKLTNGGDGVKLPPGPWRLPVIGSMHHLMGESLVHRAMADLARRLDAPLMYLKLGEVPVVLASSPCAAREIMRAHDVAFASRPLSPTVRRMRPPPPRRRQLRKICVVELLSARRVRTFRRVREEEVARLVGALDLFSGGSETSATVIQWAMSELMKNPRVMRKVQAELRDKLAGKPRVTEDDLSDLKDPNYWDDAEVFRLERFANSTIDFKGMDMEFIPFGAGRRMCSGLAFAEAIIDLLFSTLLFHFDWELPCGMTASELDMIEEMALTVRRKNDLHLRPILQKRKTDIIQQIYMSKADQNQGQPGIRPERVLENMNYRQLPRLSANQPLAD

SEQ ID NO: 115907 - protein, 45 aa, Oryza sativa
  Clone ID: PAT_MRT4530_1945C.1.pep
FPLGKILLGWLNLVVMKVVNRPPLTDVEFPRLEPTTNDDGEEVTH

SEQ ID NO: 115908 - protein, 56 aa, Oryza sativa
  Clone ID: PAT_MRT4530_19460C.1.pep
PWTVLLAASLAPWCNALGVWSDSSTPPVKIVTAASASDYRHSGAVGGGGGRKRSRG

SEQ ID NO: 115909 - protein, 65 aa, Oryza sativa
  unsure (1)..(65): unsure at all Xaa locations
  Clone ID: PAT_MRT4530_19461C.1.pep
EQSSIMIKLIKPHGVQRGLIGHILHSKGKKGFYLRGMKFMNVERSFAQXHYADLSDTPLLPGVGG

SEQ ID NO: 115910 - protein, 64 aa, Oryza sativa
  Clone ID: PAT_MRT4530_19462C.1.pep
MATGLAIDKQASTTTTVDRTPSSSELRSTSSSDNRCCQHQPQLTSTRSRCRKTQNKTNSRNMTP

SEQ ID NO: 115911 - protein, 75 aa, Oryza sativa
  unsure (1)..(75): unsure at all Xaa locations
  Clone ID: PAT_MRT4530_19463C.1.pep
LTRQLSLRGRQDLRTRYTRESLHHYEHEGERGDQLVDRXTRTLNASDHGDRTEQLVAALTSDKIKGQRQLFNRSM

SEQ ID NO: 115912 - protein, 157 aa, Oryza sativa
  unsure (1)..(157): unsure at all Xaa locations
  Clone ID: PAT_MRT4530_19464C.1.pep
MTRRATCAGWSATSRAIVGFGCGGGVAAAVLAGXGHKVVVIEKGNYFTXQDYTSFEGPSMNQLYEFGGXFVTTMNGGGLLLAGSSTVDGGSAVNWSACLNKTPEFVLREWAXQTTHGFPLFASSDYAAAMDKVFERLGVTSGCTEEGLQNKVLRKGV

SEQ ID NO: 115913 - protein, 44 aa, Oryza sativa
  Clone ID: PAT_MRT4530_19465C.1.pep
MACKGRQGVVMDALKGIMDRGAQRYAEDEDGDAIVAVVGEDGIE

SEQ ID NO: 115914 - protein, 48 aa, Oryza sativa
  Clone ID: PAT_MRT4530_19466C.1.pep
LIILWGCMWQVIVGSCRLSQAPWLRTCVGTYPLLDYHYLLDGRACDNF

SEQ ID NO: 115915 - protein, 83 aa, Oryza sativa
  Clone ID: PAT_MRT4530_19467C.1.pep
GLGGARPGLDLHQVRTYTKGDLDTPFALCWDDSAPSGVQLITEGNAGLVKSDSNISNPPGVNAHIPPLDVMPVAVVSLLPQCA

SEQ ID NO: 115916 - protein, 202 aa, Oryza sativa
  unsure (1)..(202): unsure at all Xaa locations
  Clone ID: PAT_MRT4530_19468C.1.pep
KKXSLKLQKRLAASVLKCGRGKVWLDPNEVNEISMANSRQNIRKLVKDGFIIRKPTKIHSRSRARRMKEAKRKGRHSGYGKRKGTREARLPTKILWMRRMRVLRRLLRKYRESKKIDKHMYHDMYMKVKGNVFKNKRVLMESIHKSKAEKAREKTLSDQFEAKRAKNKASRERKIARREERLAQGPGEKVSAASSAXAAXAS

SEQ ID NO: 115917 - protein, 1478 aa, Oryza sativa
  unsure (1)..(1478): unsure at all Xaa locations
  Clone ID: PAT_MRT4530_19469C.1.pep
DYVGDSEDDADQRRLRFNRXGMARRRPRREVRNNDDSFGKIKFTIPTFDGKYDHDAYLSGELAVDQKFACHDVPVDKRVRAAGSEFTDFASVWWSKYHRTHINALPLTWDGLKXIMHARFVPSYYARDMLNKLQQLKQGDTSVEEYYQALQMGMLCYGLVEDEEAAMARFLVGLDREIYDILSYKEYNNMTQLFHYACKAEREVQGXRAQTRAIIPAGRTPWTARCGAAPAGHASASTSTSAPSNSNKARPTPSAASRHAAEAAAKPAKSASSVVSTGRTRDVXCHRCKGFGHMQRDCPSKRVLVVKDDGEYSFASDFDEDTLGLLATNNKGSEEEEHVGADVADQYERLIVQRVLSAQMGKVEQNQWHNLFQTKCVVNKRSCCTIIDGGSCRNLVSTEMVTKLALQTKPHPHPYYIQLFNNSGRIKVTQLVRLNFAIGSYYDFVDCDVVPMHACSLLLGRPWQYDKDTLHHDRTNQYSFMHNGKKIVLHPMTPEVVFENDVARANKEKNHNKKGSKSNHSKDTVIKLNGPCLHATKSDIVNLDTSDTVCYALICKDALFSFENMPVSFPPAITNLLQEYEDVIPKDIPLGLPXVRGIEHQIDLIPGASLPNRAPYRTNPEETKEIQRQVQDLLDKGYVRESLSPCAVPVIXGSWRMCVDCRAINNITIRYCHPRLDDMLDELSGSTVFSKVDLRSGYHQIGIKLGDEWKTTFKTKFGLYEWLVMPFGLTNAPSTFMRLMNEVLLPFIEKFVVVYFDDILTYSKSLEDHLDHLRVVFKALRDARLFDNLEKCNFCTDRASFLGYVVTPQEIEVDQAKVQAIQSWSTPKTVSQVRSFLGLVGFYRHFVRDFSTIAAPLNELTKKGVPFTWGTSQENAXHMLKDKLTHASLLQLPDFNKTFELEYDASGIGLGGVLVQEGKHVAYFSEKLSGPVLNYSTYDKELYALVRTLKTWQHYLWPKEFVIHSDHESLKHIHSQGKLNRRHAKWVEFIESFPYVIKHKKGKENVIADTLSRRYTLLTQLDNKFFGLEMIKDQYVHDDDFKDVLLHCKDGKTWNKFFLNDGFVFRAKKLCIPASSVRLLLLXEAHGSDLMGHFGAKKTVDILAGHFFWPKMRRDVDRFVARCATCQKAKSRFNPHGLYIPLPVPTIPWXDISMDFVLGLPRTNRGCDSIFVVVDRFSKMSHFIPCNKTDDASHIADLFFREIVRLHGVPNTIVSDRDTKFLSYFWRTLWAKLGTKLLFTTTCHPQTDGQTEVVNRTLSTMLRAVSKKNIKMWEECLPHIEFAYNCSLHSTTKMCPFQFVYGLLPRAPIDLIALPSPEKLNFDAKQRAKLMLKLHETTKENIERMNAKYKFAGDKGRRELNFEPGDLVWLHLRKERFPDLQKSKLMPRADGPFKVLAKINENAYKLDLPADYGVSPTFNVADLKPYLGEEDELESRMTQMQEREYDEDINTNDXTSTPPQVQLHGPITHAHARQLNYQ

SEQ ID NO: 115918 - protein, 203 aa, Oryza sativa
  Clone ID: PAT_MRT4530_1946C.1.pep
MLENCFRYYKGCQDYQKFGAIQRAPASAMNPIIKPWPFRGWGMDMIGQINPLSVPPYKLVYGHEAVLPWEVRIGSRRTDLQDTWTADEYYNLMADEREDLVQSRLRALAKVTKDKERIARHYNKKVVPKSFSGWELVWKLILPIGTRDSKFGKWSPNREGPFQIHKVVSKGAYMLQGLDGEVYGRALNGKYLKKYYPSVWVHS

SEQ ID NO: 115919 - protein, 407 aa, Oryza sativa
  Clone ID: PAT_MRT4530_19470C.1.pep
MDDHDYVGDSEDDADQRRLRFNRRGRPHRRLRREVRNNDDSFGKTKFTIPAFDAEREVQGRHAQTWANIPTGRTLWVAWSGAAPAGRASSSTSTSAPSNSNKVRPTPSAAPSRAAEAAAKPAKSASSVASTGRTRDVQCHRCKGFGHMQHDRPSKRVLVVKDDSEYSSASDFDEDTLALLAANNKGSEDEEHIGADVADQYESLIVQRVLSVQMGKAEQNQRHNLFQTKSNQYSFVHNGKKIVLHPMTPEAVFENDVARAKKEKNVEHAKCENQIVAKELVHHNKKGSKSNHSKDSVIKLNGPCLLATKSDIVNLDTSDIVCYALICKDALFSFENMPVSFPPAVTNLLQEYEDVFPKDVPPGLPPEYLDHLRVVFNALRDARLFGNLENCTFCTDRISFLGYVVTP

SEQ ID NO: 115920 - protein, 814 aa, Oryza sativa
  Clone ID: PAT_MRT4530_19471C.1.pep
ADRCRVLRERWRFTPYGGWRVLSTFLTAITKVVTPFIGKFVVVYFDDILIYSKSMGEHFNHLRAVFNALRDARLFGNLEKCTFCTDRVSFLGYVVTPQGIEVDQAKVEAIQSWPTPKTVSQVRSFLGLAGFYRRFVQDFSTIAAPLNALTKKGVPFTWGTSQGNAFHMLKDKLTHAPLLQLPDFNKTFELECDASGIGLGGVLLQEGKPVAYFSEKLSGPVLNYSTYDKELYALVRTLETWQHFLWPKEFVIHSDHESLKHIRSQGKLNRRHAKWVEFIESFPYVIKHKKGKENIIADALSRRYTLLTQLDYKIFGLETIKDQYAHDADFNDVLLHCKDGRTWNKFVTNNGFVFRANKLCIPASSVRLLLLQEAHGGGLMGHFGAKKTHDILVSYFFWPQMRRDVGRFVARCATCQKAKSRLHPHGLYMSLPVPTGPWEDISMDFVLGLPRTKRGRDSIFVVVDRFSKMAHFIPCHKTDDASHIADLFFREIVRLHGVPNTIVSDRDTKFLSHFWITLLAKLGTKLLFSTTCHPQTDGQTEVVNRTLSTMLRAVLKKNIKMWEECLPHIEFAYNRSLHFTTKMCPFQIVYGLLPRAPIDLMPLPSSEKLNFDAKQRAKLMLKLHETTKENIERMNAKYKFAGDKGRRELNFEPGDLVWLHLRKERFPDLRKSKLMPRADGPFKVLAKINENAYKIDLPADFEVSPTFNVADLKPYLGEEDELDSRTTQMQEGEDDEDINTIDTSTSPHVQHDGPITRARARQLNYQDECPRGRVDAHHKFAATIGDDRATNPNGFASDVLDAVSIYTRGLQDMP

SEQ ID NO: 115921 - protein, 382 aa, Oryza sativa
  Clone ID: PAT_MRT4530_19472C.1.pep
MAHLQLTPLAAGGGRGGADEMEEVALLGPESYDEEAAAAPGPEEEEGMRRVQEEDIIEAIEDAGFEAELLPDSTVSQPKLQNTLSGQFRIGGMTCAACVNSVEGILKKLPGVKRAVVALATSLGEVEYDPSVISKDEIVQAIEDAGFEAALLQSSEQDKVLLGLMGLHTEVDVDILHDILKKMEGLRQFNVNLVLSEAEIVFDPEVVGLRSIVDTIEMESSGRLKAHVQNPYIRAASNDAQEASKMLHLLCSSLFLSHTDSPLVPLQQIPVFFIRMVCPRIHFTRSLLLMHLGPFYIGDLLKWILVSIVQFGVGKRFYVAAYRALRHGSTNMDVLVVLGTTASYVYSVCALLYGAFTGFHPPKYFETSAMIITFVLFGKYLE

SEQ ID NO: 115922 - protein, 79 aa, Oryza sativa
  unsure (1)..(79): unsure at all Xaa locations
  Clone ID: PAT_MRT4530_19473C.1.pep
DEDTTSSDITMTTLCINQPKHQLQMDLAADLEGILGPIVLXWKAYGVYFQMVLVPRQNSYRAARNLQNKPRISFSPNLI

SEQ ID NO: 115923 - protein, 122 aa, Oryza sativa
  Clone ID: PAT_MRT4530_19474C.1.pep
MAGWMAGWMDDTDVALDVPVPNEEEERNMKHYAALLTGRTSYFLKGEEMKSMYTTYNPQNVEHQLETTLAGTLSVYQNATGKICGVWRRVPRDYKRILRDDRLHVVLLWGNKQQAELALAGK

SEQ ID NO: 115924 - protein, 1012 aa, Oryza sativa
  unsure (1)..(1012): unsure at all Xaa locations
  Clone ID: PAT_MRT4530_19475C.1.pep
MAHLQLTPLAAGGGRGGADEMEEVALLGPESYDEEAAAAPGPEEEEGMRRVQVRVTGMTCSACTAAVEAAVSARRGVGGVAVSLLQSRARVVFDPALAKEEDIIEAIEDAGFEAELLPDSTVSQPKLQNTLSGQFRIGGMTCAACVNSVEGILKKLPGVKRAVVALATSLGEVEYDPSVISKDEIVQAIEDAGFEAALLQSSEQDKVLLGLMGLHTEVDVDILHDILKKMEGLRQFNVNLVLSEAEIVFDPEVVGLRSIVDTIEMESSGRLKAHVQNPYIRAASNDAQEASKMLHLLCSSLFLSHTDSPLVPLQQIPVFFIRMVCPRIHFTRSLLLMHLGPFYIGDLLKWILVSIVQFGVGKRFYVAAYRALRHGSTNMDVLVVLGTTASYVYSVCALLYGAFTGFHPPKYFETSAMIITFVLFGKYLEVLAKGRTSDAIKKLVELVPATALLLLKDKEGKYAAEKEIDASLIQPGDVLKVLPGSKVPADGTVVWGTSHVDESMVTGESAPISKEVSSIVIGGTMNLHGILHIQATKVGSGTVLSQIISLVETAQMSKAPIQKFADYVAGIFVPIVVTLSLVTFIAWFLCGSLGAYPNSWVDETSNCFVFSLMFSISVVVIACPCALGLATPTAVMVATGVGANHGVLVKGGDALERAQNVKYVIFDKTGTLTQGKATVTSTKVFSGIDLGDFLTLVASAEASSEHPLAKAILDYAFHFHFFGKLPSSKDDIKKRKQQILSQWLLEVAEFSALPGKGVQCLINGKKILVGNRTLITENGINIPEEAESFLVDLELNAKTGVLVAYDSELIGSIGMTDPLKREAVVVVEGLKKMGIYPVMVTGDNWRTAQAVAKEVGIEDVRAEVMPAGKADVVRSLQKDGSVVAMVGDGINDSPALAAADVGMAIGAGTDIAIEAADYVLVRNNLEDVITAIDLSRKTFSRIRWNYFFAMAYNIIAIPVAAGALFPFTGLQMPPWLAGACMAFSSVSVDFVDRXLRRYRKPRLTTLLQITVE

SEQ ID NO: 115925 - protein, 128 aa, Oryza sativa
  unsure (1)..(128): unsure at all Xaa locations
  Clone ID: PAT_MRT4530_19476C.1.pep
TDVALDVPVPNEEEERNMKHYAALLTGRTSYFLKGEEMKSMYTTYNPQNVVATARFLFHKKNLYYSFYTSSRIXEHQLEPTLAGTLSVYQNATGKICGVWRRVPRDYKGIQRDDRLHVVLLWGNKQQA

SEQ ID NO: 115926 - protein, 128 aa, Oryza sativa
  unsure (1)..(128): unsure at all Xaa locations
  Clone ID: PAT_MRT4530_19477C.1.pep
MAGWMAGWMDDTDVALDVPVPNEEEERNMKHYAALLTGRTSYFLKGEEMKSMYTTYNPQNVVATARFLSINWRPPAGTLSVYQNATGKICGVWRRVPRDYKRIQRDDRLHVVLLXGNKQQAELALAGK

SEQ ID NO: 115927 - protein, 123 aa, Oryza sativa
  unsure (1)..(123): unsure at all Xaa locations
  Clone ID: PAT_MRT4530_19478C.1.pep
SWSIAHNRKHVHSNSFTLARSVQLYPQDAIHRHVTVLPQACHHASDCNKSLRITPXNQVHHIAGFTRTFKTKVGNPLLCYNESGSRIDRCPVHPNFITPTLTWVHRKGKSYTRSSAIAHAFLW

SEQ ID NO: 115928 - protein, 170 aa, Oryza sativa
  Clone ID: PAT_MRT4530_19479C.1.pep
MAGWMAGWMDDTDVALDVPVPNEEEERNMKHYAALLTGRTSYFLKGEEMKSMYTTYNPQNVVATARFLFHKKNLYYSFYTSSRIGRPRAIQFVDDAGVILEEHQLETTLAGTLSVYQNATGKICGVWRRVPRDYKRILRDDRLHVVLLWGNKQQAELALAGKVAKYTALQ

SEQ ID NO: 115929 - protein, 171 aa, Oryza sativa
  Clone ID: PAT_MRT4530_1947C.1.pep
MGKYSTEPSNPTKSAKAMGRDLRVHFKNTRETAFALRKLPLVKAKRYLEDVIAHKQAIPFRRYCGGVGRTAQVKSRQSNGQGRWPAKSARFILDLLKNAESNADVKGLDVDNLFVSHIQVNQAQKQRRRTYRAHGRINPYMSSPCHVELILSEKEEAVKKEPETTIAPRRQ

SEQ ID NO: 115930 - protein, 65 aa, Oryza sativa
  unsure (1)..(65): unsure at all Xaa locations
  Clone ID: PAT_MRT4530_19480C.1.pep
MSIVISLTLLTIINDAITGNNLISSWFRMVHSXFGDRSVQPGLVVQDGWACAAWVCCSVLISIDD

SEQ ID NO: 115931 - protein, 352 aa, Oryza sativa
  Clone ID: PAT_MRT4530_19481C.1.pep
MDSRMLLMLMQLLGSPTSLAVLLLSFFQGSVGVGAITFTFTNRCTDTVWPGVLSGSGTPPLETTGFALSPGGSRSLYAPSGWSGRFWARSGCEFDDSGKGSCATGDCGSGQVECRGAGASPPATLAEFTLNGADGKDFYDVSLVDGYNLPMLVQASAPDCPDTGCLVDLNERCPSELRADDGRACRSACEAFGRPEYCCNGAYGNPDTCHPSQYSQLFKSACPKSYSYAYDDATSTFTCNHTDYTITFCPRSTPSSTLRFWAKIGDFDVEHELGKVKWEFKERITETEPRAARRCGVAGELEGQQWRGDGCNCGIMAGILSFPICLGNCSGDPACPAGASRIIQLVASEKDS

SEQ ID NO: 115932 - protein, 48 aa, Oryza sativa
  unsure (1)..(48): unsure at all Xaa locations
  Clone ID: PAT_MRT4530_19482C.1.pep
NSXHLERSQLTDSRIQESPDSLSRVKWTSVNMSNVRWDQKLFYLDQKK

SEQ ID NO: 115933 - protein, 273 aa, Oryza sativa
  Clone ID: PAT_MRT4530_19483C.1.pep
TLRPEMKLRRIPTRTTRRVMKTTALKGEPSKADEGGEVDQLRIDNVSTACAEGRELEKSYESVMTWSSAARGAEGGRSGRSAGVRGLEQLARKEHSEALSATEVGNKRAIGQPSRSRTTTGTSNKTPSGTQSTVIELSDRGVQTPATVATGLGEKWANGLGRGGKRYGNGGGSDCGGRDHGASAAVTGLGEEMPDSFECGRESDGGVDGGNNTQGSVGISYNHARNTIVALPIRVSKGIEHKERVCIINDQDSIKDNNLGEIDSRGFLYLLIN

SEQ ID NO: 115934 - protein, 445 aa, Oryza sativa
  Clone ID: PAT_MRT4530_19484C.1.pep
MYKAKRTAAQKVRRCLGKYELGRAIGQGTFAKVRFAKNMETGDHVAIKILDKAKVQKHRLVEQIRREICTMKLIQHPNVVHLHEVMGSKTRIFIVLEYVMGGELHDIIATSGRLKEDEARKYFQQLINAVDYCHSRGVYHRDLKLENLLLDTAGNIKVSDFGLSAISEQVKADGLLHTTCGTPNYVAPEVIEDKGYDGALADLWSCGVILFVLLAGYLPFEDENIVSLYNKISGAQFTCPSWFSAEAKRLIARILDPNPATRITTSQVLQDQWFKKGYESPVFDDKYYPYFHDVYDAFGDSEEKHVKEAMEEQPTLMNAFELISLNKGLNLDNFFESDKKYKRETRFTSQCPPKEIINRIEEAANLLGFNIQKRNYRMRMENIKEGRKGHLNIATEVFQVAPSLHVVELKKAKGDTLEFQKFYQTLSTQLKDVVWELEDAAEDMS

SEQ ID NO: 115935 - protein, 140 aa, Oryza sativa
  Clone ID: PAT_MRT4530_19485C.1.pep
VESTEDHVQRQVEYWRRGFWVSLKGKNKQHPDGGAPPDSELQVGGGGHRSELQGGSDVPDFEEQVGAGVPNGEQQLNNGLFTDLDDQQMDDVEEPIDVEEMAILGDDDDTVAGDEGIDEFAEIREGMLRLLLPAYFTIRH

SEQ ID NO: 115936 - protein, 73 aa, Oryza sativa
  Clone ID: PAT_MRT4530_19486C.1.pep
YHMLASINKHWSRRPQALPLFCAAKMILYIYAAARIAPYLFLLHFLFCYSSNRCWQASNASVRLGLRECSFAE

SEQ ID NO: 115937 - protein, 238 aa, Oryza sativa
  Clone ID: PAT_MRT4530_19487C.1.pep
MASPAPPPTARLRPSQAASSASSSSFPTSICGLGSLGDASRVSSVSFRRRPPASPLVRCSQDPGKIEVFNTEGTEQSQGGSTGSINHGKYSTRSFSSKDANITTYNHYLHCFCVSLLERLKRYGAAGVLSYGLLNTVYYVTTFLLVWFIFSPAPGKMGYAAAVERFLKLMAMVWAGSQVTKIFRAGGALALAPFVDRGLRWFTVRFNFKSEGKAFATIVGFCFALAALLFFGLTILWA

SEQ ID NO: 115938 - protein, 45 aa, Oryza sativa
  Clone ID: PAT_MRT4530_19488C.1.pep
AGGGPSDAELDGGPHISLTKGADVVHSSASWVSPDWPRPVGATCQ

SEQ ID NO: 115939 - protein, 52 aa, Oryza sativa
  Clone ID: PAT_MRT4530_19489C.1.pep
SCCCMAVYSHQCSCHPLHCSHPPKNLHCIHSPAVLCCTTLHLGTHQQHHPVL

SEQ ID NO: 115940 - protein, 78 aa, Oryza sativa
  unsure (1)..(78): unsure at all Xaa locations
  Clone ID: PAT_MRT4530_1948C.1.pep
CRPGFEFFSPPVGXLDAPDPIPSHPMGCVGSKQFHGANLHKSARPPSSTSNHSDSLRHLATYDSTKGQEEEEPEEAAD

SEQ ID NO: 115941 - protein, 87 aa, Oryza sativa
  Clone ID: PAT_MRT4530_19490C.1.pep
MASTCFRAAAPMASSACRSAASRSIPSATRCETPRISRLPVELGSTAGSTLLPLHSTVAAARLTSRLITGSRSCWALSEGTLCSTYP

SEQ ID NO: 115942 - protein, 48 aa, Oryza sativa
  Clone ID: PAT_MRT4530_19491C.1.pep
MGSDVVDKEQVLYHPCPALEVLLHTLPLAVASSSLSKSSSMARAGGRH

SEQ ID NO: 115943 - protein, 130 aa, Oryza sativa
  Clone ID: PAT_MRT4530_19492C.1.pep
MRVGQVAFAGASIGVMASGAGFANYTAFCYLIASMGLQSLWSLGLACLDVYALTVKRDLNNALLVTALLSFAASCSAGGVMVLFKRDVLFCRRYPQLPCGRFELAVALAFLSWALSATSAIIMFCLLAAF

SEQ ID NO: 115944 - protein, 155 aa, Oryza sativa
  Clone ID: PAT_MRT4530_19493C.1.pep
MWEVAWWRPGTWGGLAMRVGQVAFAGASIGVMASGAGFANYTAFCYLIASMGLQSLWSLGLACLDVYALTVKRDLNNALLVSLFVIGDWVTALLSFAASCSAGGVMVLFKRDVLFCRRYPQLPCGRFELAVALAFLSWALSATSAIIMFCLLAAF

SEQ ID NO: 115945 - protein, 74 aa, Oryza sativa
  unsure (1)..(74): unsure at all Xaa locations
  Clone ID: PAT_MRT4530_19494C.1.pep
VGAAEXXGXXVVVPXXXGPXGPLHXXRRXCSXXPXMDGAAAFAPQXAIPSXRPXYXAXAXARSQCAAXAXASDA

SEQ ID NO: 115946 - protein, 215 aa, Oryza sativa
  unsure (1)..(215): unsure at all Xaa locations
  Clone ID: PAT_MRT4530_19495C.1.pep
GGRAAGRSAGGRSGAGKERRRPTTTIAARNAIVGALVYPECRRLLDFLALRLWPFYPGTLVFLGAGEPFYLLSDPFRLPLRSLSAIFSPVGTLADKLLVGLARLRAASTXPDEVIILSLETTTAMHLEKLGFSPSIVEQFLRPFLAGILFDPALDTSSRLFKLVFKRLSHGGGSERSERNGSSSVSGSGVEQQWRGSGSSSGGDGAGAEAAGRES

SEQ ID NO: 115947 - protein, 49 aa, Oryza sativa
  Clone ID: PAT_MRT4530_19496C.1.pep
MAVMSWREIEEKSSHLVGEEDELSWVALMLVAECEGEIMQEWANDSWLH

SEQ ID NO: 115948 - protein, 47 aa, Oryza sativa
  unsure (1)..(47): unsure at all Xaa locations
  Clone ID: PAT_MRT4530_19497C.1.pep
LAILVEAVKNDVMLVYSXARXXLHLLPTPSGSLWLKRWLLGQKKKKK

SEQ ID NO: 115949 - protein, 126 aa, Oryza sativa
  Clone ID: PAT_MRT4530_19498C.1.pep
SRAPDARRRARPPPVRSHACPPSLHALPAAPLLCSPRPSSRSTAAALLPHSLAVAPVLPARRCARSVPDATPASARLLRAARLPCYFAARRRPPLTEEEKREEREEKRRRGKEERVADMWAPRIFL

SEQ ID NO: 115950 - protein, 93 aa, Oryza sativa
  Clone ID: PAT_MRT4530_19499C.1.pep
MDSVVPRQPSATSQRPDLATALHASSAAPPSLMCVVTGGGGGAGSWDGAKADHLGAVPHAGILAAVAGQGRLPDSWSIRRLGDDETQETAAVL

SEQ ID NO: 115951 - protein, 1404 aa, Oryza sativa
  unsure (1)..(1404): unsure at all Xaa locations
  Clone ID: PAT_MRT4530_1949C.1.pep
MAAAGDHRGAGAPPPADRADVAAFGRAEWPPRGARPSAAHTLGANEGYTSCGPVVEMSWHRASVLLLGAQSCLPVPEVPAVGGVGSMADNLNRRGLDLTGFVLELRGMCIVLGYPHGVDYQGKKLPEQDGDDAEPRAAWEVTAVILTGSAERTSLAVTHSPYRYHPRRGGARDYATFRDASSEDDATIMHLADGGGLKIAQGEVCRPKRRRVCRSLKITARKSTSRPELVRRSLAWTCFVETPRAESRPRFLRRREPLALARVCVLFVCSSAGVVWGMVIPLSLFAGSVRDFQMVTTRRSAATGEGSHPEGSNHNNHGSPPPPPPPPPPPPPNTNPILTQILAQQANMMAAFLHHIQNPPQHNAPPPPPQHSKLTEFLRIRPPTFSSSNNPVDVLDWLHAVGKKLDTVLCNDEEKATQPEGQPITWARFTAAFWRTHVPARVMALKKRKFWELKQGNRSMMEYLHEFNNLARYAPEDVREDEEKQEKFLAGMDPELSVRLQQQQPRSAPRPQFMVSVPQPQQQQNQQGARAPRPPAPAVQPGQGRRDAQSQQRLCFNSFEPGHFADKCPKPRCQQGQAPPRLNNGGKDVTRSRVNHVTAEDVLTTPDIIVGTFLIHSIPATILFDSGASHSFIYVPFVGRNQLGVERIRNPLLITTPGGVMTAKYYSPTVPIEIQGIPFPSDLILLDTKNLDVILGMNWLAQFQGVVDCARRTVTLYRGPDQPVVFFAPPTSAGSSVLHQLGLPEIPIVSELGDVFPEELPGMPPKREIEFRIDLALGTTPLYKRPYRMAKDKTKRMCVDYRALNEVTIKNKYPLPRIDDLFDQLKGAIVFSKIDLRSGYHQLRIHEEDIPKTAFTTRYGLYEFTVMSFGLTNAPAFFMNLMNKVFMEYLDKFVVVFIDDILVYSQSEEDHQQHLRLVLRKLREHQLYAKLSKCEFWLSEVKFLGHVISAKGVAVDPETVTAVTDWKQPKTVTQVRSFLGLAGYYRRFIENFSKIARPMTQLLKKEEKFVWSPQCEKAFQTLKEKLVSSPVLILPDTRKDFLRRWLELIKDYDVGIHYHPGKANVVADALSRKSRCNTLGVRGIPPELNQQLEALNLSIVSHGFLATLEAKPILLDQIREAQKNDPDMHGILKNMKQGKAAGFTEDEHGTLWNGNRVCVPNDKELXTVDTSGSSRKSLFHPPWQHEDVLRLEREILFMALCDVCQRVKAEHQRPAGLLQPLQVPEWKWDEIGMDFITGLPKTQGGYDSIWVVVDRLTKVARFILVKTTYGGNKLAELYFTRIVSLHGVPKKIVSDRGSQFTSHFWKKLQEELGTRLNFSTAYHPQTDVQTEHLNQILEDMLRACVLDFGKTWDKSLPYAEFSYNNSYQASIQMAPYEXRCMAANAGHHYCGTKLGKAKCSGLIS

SEQ ID NO: 115952 - protein, 64 aa, Oryza sativa
  Clone ID: PAT_MRT4530_194C.1.pep
GYFTLNKGCLAYLFLPNFPGFKNHSFDLLFYSFRLHHLENPQNGLQNFSTGPGAGASPAGLFKG

SEQ ID NO: 115953 - protein, 66 aa, Oryza sativa
  Clone ID: PAT_MRT4530_19500C.1.pep
LQLPYTASPNQRKELNDEFSGMHITVSSRTEKPRKPSRFSLPAPLIHPDAKPQRGIQRKEGWRIVP

SEQ ID NO: 115954 - protein, 356 aa, Oryza sativa
  Clone ID: PAT_MRT4530_19501C.1.pep
MASLTAALATPAAAALLLLVLLAAPASAANFTCAVASGTTCKSAILYTSPNATTYGNLVARFNTTTLPDLLGANGLPDGTLSSAPVAANSTVKIPFRCRCNGDVGQSDRLPIYVVQPQDGLDAIARNVFNAFVTYQEIAAANNIPDPNKINVSQTLWIPLPCSCDKEEGSNVMHLAYSVGKGENTSAIAAKYGVTESTLLTRNKIDDPTKLQMGQILDVPLPVCRSSISDTSADHNLMLLPDGTYGFTAGNCIRCSCSSTTYQLNCTAVQNKGCPSVPLCNGTLKLGETNGTGCGSTTCAYSGYSNSSSLIIQTSLATNQTTACQRGGSGRSQFARSMWSMSVISFHMVLIIICFL

SEQ ID NO: 115955 - protein, 43 aa, Oryza sativa
  Clone ID: PAT_MRT4530_19502C.1.pep
VLHPRFIARHERPHQVCSHSTMMASNIWHPSYSSQLYYRPPDC

SEQ ID NO: 115956 - protein, 61 aa, Oryza sativa
  Clone ID: PAT_MRT4530_19503C.1.pep
ARQRHTHRVLYAIVYPLHSYCSYLSYAHWGDPCITEQRKVTLFLTTTKTLPKNMKPLTMLH

SEQ ID NO: 115957 - protein, 64 aa, Oryza sativa
  Clone ID: PAT_MRT4530_19504C.1.pep
MGAGIGINPQVTRRGPGAICIHGSDERSDTIDIDKEASSEQATTADGNLQYAGGEPAIDGASGH

SEQ ID NO: 115958 - protein, 119 aa, Oryza sativa
  Clone ID: PAT_MRT4530_19505C.1.pep
HASFSFSFHRNWLANLKLTYVTLAMKRTVITPLRHRLMPPLSSHHTNRHGVTCDEHTTVTVVTCSQPRRCHLRASLEIQKNNDLTTKFRAARSRNGDKFCRFSDSNSARLIFPEIPAEQ

SEQ ID NO: 115959 - protein, 103 aa, Oryza sativa
  unsure (1)..(103): unsure at all Xaa locations
  Clone ID: PAT_MRT4530_19506C.1.pep
KKKSHERKKMRNNIYTHKEDRKKKEKYKNKKVKKKNKKLDRKEKKKKNIKEKKEVDKGKRAEEKEIKSKKXKKNKKKRGEKMKQRREQEMANKDAKDRWRPSI

SEQ ID NO: 115960 - protein, 91 aa, Oryza sativa
  Clone ID: PAT_MRT4530_19507C.1.pep
MTWMQSNAQVGLRDLHFLDKTSGRQEGGIEAGSGCRSREQRPEWGGTAALTKEQQLTSDRLWRTTAVATTGDDRRQRRRPAMAVPKTDKDG

SEQ ID NO: 115961 - protein, 396 aa, Oryza sativa
  unsure (1)..(396): unsure at all Xaa locations
  Clone ID: PAT_MRT4530_19508C.1.pep
MATSGDLEAFMTRHFESRHRFTICQREGSQTNTRVRRGRGARARLAXDADAAGPRAASRLAVDRARERGEGERGAVVCLTRSWPSWRRRGXATRTGERKTTTRPRTDGGWRRRAAGRYTGMRARANTPGGGNAPREASDERRYGARAATAVSTQXAAARLGAAPDSYGGGAVTMADGAGRDRSSLGPGKRKERVCPESTSRVLARAGSSDTRDNERRAKTGVGSNGMGDGWRGCNGGSRGQAERGKGETEGGKGSSRYANLGRERDGSGRRCLRXLDGCGRRASGRRAGSWGRAQRRRRSAAGRGAGRHRHGQQAADDGGDRAGARARRNGAPXACRGWTGESESKRTRKREREREKELXRRRLTRTRLRRTSRARGEQTRLLQRDLNLERFGFGI

SEQ ID NO: 115962 - protein, 146 aa, Oryza sativa
  Clone ID: PAT_MRT4530_19509C.1.pep
MPLYDCMLLVKPLVTREAMAELVGRVARRAYQRNGVVTDVKSFGTICLGYGIKKLDGRHFKGQLMQMTMMVPPSFTQELHYLNKEDRLLRWLVVKHRDAVYGVEFINEDDGRREMTDFRYRTKDEASDVDEYDDDDDDYEYEIDEE

SEQ ID NO: 115963 - protein, 375 aa, Oryza sativa
  Clone ID: PAT_MRT4530_1950C.1.pep
MSWHRAGVLLLGAQFCLPVRGFRPISETDNTSTRRVSSFKVLSLVLVYSFLACFPLSPQSLSQMFNREKGKNVSGYASSNSSFQLNPPLASRELTRAHPWSIPSMLLSSQLPLVGSQDQNQYVFDRAFATQVNELPMPEEDVPFCHDCREQGHYALNCPWVYAKEAPSFGLAGQTSLNQPPRTKSSLQPSVQSREPNGENPLNPGKCFPPSLSYHVGSRTKQAKGKKSKNQKRKAPMRTEEEVCKMTITSTEWPPAGITIPRRQRGNTFRGARQLTQHLLSHGGRVSDSEGLSKELSSMEEVVSLPDLLQAEGRAINLRRAIPSRRPLSASTSNQKEASPMNDSNMQSYHIITEPIKDDVVTRTMPAISLQNQNE

SEQ ID NO: 115964 - protein, 154 aa, Oryza sativa
  Clone ID: PAT_MRT4530_19510C.1.pep
DVDAVQRAGGAPRPPLPRQDVRPAGRRDRSWQRLPEQGAAAGVGWNGGVDDHQQEQQHSLQIINNSRSSNEDRQQQQAMHQQQGRDQIGSSREINRRSSSSPATGCGGRRLWRRPATIGDSGDVRRWRCPKQIKTARAGIDPFFCPLFFLLVVI

SEQ ID NO: 115965 - protein, 206 aa, Oryza sativa
  Clone ID: PAT_MRT4530_19511C.1.pep
MPLYDCMLLVKPLVTREAMAELVGRVARRAYQRNGVVTDVKSFGTICLGYGIKKLDGRHFKEYQDYSGWVAQKNRCAAVNGLFALNNITLDSFEDPIYLNLVIGTLKTHFVTRHLNVSAIEGQLMQMTMMVPPSFTQELHYLNKEDRLLRWLVVKHRDAVYGVEFINEDDGRREMTDFRYRTKDEASDVDEYDDDDDDYEYEIDEE

SEQ ID NO: 115966 - protein, 55 aa, Oryza sativa
  Clone ID: PAT_MRT4530_19512C.1.pep
MARADDNGKRRQGVPDERQALAARVAVVTPHAINLHGELSTAICTLLRQAILNMS

SEQ ID NO: 115967 - protein, 46 aa, Oryza sativa
  Clone ID: PAT_MRT4530_19513C.1.pep
NHSYGTIMPTRKINNFNSKFVPCQLVGANLQIGRVRLSKNILQPRA

SEQ ID NO: 115968 - protein, 825 aa, Oryza sativa
  Clone ID: PAT_MRT4530_19514C.1.pep
MEIAVGALSGMVDALPAKLGDLLQQEYTLLSGARGDVGFLQSELGTMNAALLRCESLESSDVQTRAWVAQVRDLAYDIEDWIDLFAHRVDGGAAASPGAAAATSSSSSSGGFLSWVRCCVNKVTTLPARHVIATELQELKNRVIELSEQRKRYRFDPPARHAGGRSGVAAVDPRLVALYADTSSLVGLDAPVKKVSEMVVDDGTTGLKVVSISGMPGAGKTTLATAVLRRLKEENKFHCSAFVSVGQKPDIVGKTLKGILSQIGNGYAGGEDIGRLIGMLRDELKDKRYLIVIDDLWGRTEWSTLKCCFRDDNLGSRIMVTTRNDELAKECSSNSDESVYKTGLLSDADSKDLFSNKAFGKGKDCPNHLKDLYDIIVERCGGLPLAISSVAGALAHRFSKDEWERYESNLLPSSHSDELNLKQILNLSYNDLPSHLKSCMLYLSIFPNKYEIDVERLVRRWIAEGFIADARHASKEETARSYLTDLISRNLIQALHLRHNGTPSCYTLHPVIHDFIVVKSMEENFVTVLDAKKEALSTNNGTVRRLSLQNSVKQDLAGARNDMIKHARSVTVFGHANGVPRLNDMSVLRVLDLEGCNGPLCLDGLCKLILLRYLNLRGTDVSELPAQIGELRCLETLDVRSTKVKELPASIVSLEKLMHLLAGNAKLPGEISKMNGLLTLSCANVWKNTGSVLPELADLANLRELELFCDASEISGDNKTRVSFSSDGFKRLKQLSIQGSLPSVAFVNSSLRKVEVLELKYEKGISDGSNGVSGIEHLPSLKHVLIEFSQKDAGATATIASVRNAAEMVHPNHPDVSVKVDGKAI

SEQ ID NO: 115969 - protein, 406 aa, Oryza sativa
  Clone ID: PAT_MRT4530_19515C.1.pep
MVPPPPPSPSPSSSSDKLVAGAAQSAPLVPLQEPDVSSLGESFDTTSSQDLITASHNIIDDGSSSTCPSRIDKPVADATLSTSLQDVALSLLDEIFDDNPRTAPDNTTTDGYLQSASSSVGSSILVRSFVNCYQLFYIRIDPRGSCWTYPDVGGPFQRVDEADDAIKCFLDELQHGARCTQSGEFSRVDRMIHDCKHYLYGPPKRDPSSPSSKTTYDEKQYLVQAILDQYNDDNKLFGNHAYELEDLVSRQLFCENSKQKGADDSSGKLFFAEVTHVQRRMAWKVSCFCKIDTEVNGGHCYGCRNKGTPPMKHPQNTNAYAGGHLDVERYRLVLTSSSEDEESEDESEEELGLFEVDDVESEEEEEEEEEEEEEEEEEEETNMWLRRDTFDKFLDTMLNELQAEGD

SEQ ID NO: 115970 - protein, 39 aa, Oryza sativa
  Clone ID: PAT_MRT4530_19516C.1.pep
IASGRSRSRTPRARLRVRGRVGTGSEGVMYLRRSDGPHQ

SEQ ID NO: 115971 - protein, 200 aa, Oryza sativa
  unsure (1)..(200): unsure at all Xaa locations
  Clone ID: PAT_MRT4530_19517C.1.pep
PGAPQSFGQAFGKTRGGRSSCLTGFTILIFAMFAXLIAHSLCANTAVTSTPNFRFHFFYFSMQPSTRGVTRTDDMXSITSMSMSLLKALLQEICCIRLQRMMRSNTHVVPSYQMIHSMHRCVYACLWERCPLKMALHVPCMRDMCPSHLTDSRACVCCSSNFVYVGFAHREVTTLMCCLLFLQLSVWLRPEARLTFVCIH

SEQ ID NO: 115972 - protein, 92 aa, Oryza sativa
  Clone ID: PAT_MRT4530_19518C.1.pep
TVIEYLHEFNRLARYAPEDVRTHAERQEKFLSGLDDELTNQLISKDYEDFDKIVDKTIRQEEQFSSASLARKTKKFGEMPELCFNCNKSGHM

SEQ ID NO: 115973 - protein, 36 aa, Oryza sativa
  Clone ID: PAT_MRT4530_19519C.1.pep
FVAVYALILMIRSIDSLSGIRYMRDIGYGLLSMMIK

SEQ ID NO: 115974 - protein, 130 aa, Oryza sativa
  unsure (1)..(130): unsure at all Xaa locations
  Clone ID: PAT_MRT4530_1951C.1.pep
APPSPLSRAADQWDPPVGAAQPLVDVSPGRLYCAXNSLNSLIACLHCLPCMSLDSGSSDAPVYFEIVAEVPPAAEQGKSCLSLDHVDPILQMFXCKGGRDGVWMGPXRPMRLPDSPRHERGLPVARWGRG

SEQ ID NO: 115975 - protein, 440 aa, Oryza sativa
  Clone ID: PAT_MRT4530_19520C.1.pep
MYYYIVASWNNSTRCQQIKRGVSFDICNGGETPILADVPKARVAVQFNEFRSGGDAPLDAEDPAGQRGQRHGDGPNEQGGTADAVLGTEAENANHDDGNARHRHKPAAPVEDGEDEPREDVPVEQHRCLGVREEAHEESGGESHPEGPMTANGGSGGSTSTGSTTSTCFLTLTSFFVLCICGDGSAAMREERGDLRYGFITNQLQRNRSGGSEIRADLRMRGVDRSIDPEVKGLWGYIDDLELVVDYTIKLALNSIIKTSQSRIAFLLESASGEIKDNAMSLLTVSIDTKACSVHAFATKCANHRYGTPRRARRRASRAHDDYRMQNAMLAGPNAGGCSPVQELLHEEVCDALERRAVHGRAGLQRCRLRAVAAHTTASAQATRSCAGCIPSAPPLLRHRHHQPPDPHLPEAALSPPRRCLYSLQGLNLLLAADKNILEG

SEQ ID NO: 115976 - protein, 138 aa, Oryza sativa
  Clone ID: PAT_MRT4530_19521C.1.pep
LVVDNRIAFLLESASGEIKDNAMSLHRYGTPRRARRRASRAHDDYRMQNAMLAGPNAGGCSPVQELLHEEVCDALERRAVHGRAGLPEAALSPPRRCLYSLQGLNLLLAGLHRPDDVDGGLRWWPRLLIRRAEVVHLH

SEQ ID NO: 115977 - protein, 195 aa, Oryza sativa
  Clone ID: PAT_MRT4530_19522C.1.pep
MYYYIVASWNNSTRCQQIKRGVSFDICNGGETPILADVPKARVAVQFNEFRSGGDAPLDAEDPAGQRGQRHGDGPNEQGGTADAVLGTEAENANHDDGNARHRHKPAAPVEDGEDEPREDVPVEQHRCLGVREEAHEESGGESHPEGPMTANGGSGGSTSTGSTTSTCFLTLTSFFVLCICGDGSAAMREERGDV

SEQ ID NO: 115978 - protein, 130 aa, Oryza sativa
  Clone ID: PAT_MRT4530_19523C.1.pep
SSGTQAARRTDIYTLRRRAFVDETSSWGRSGRGAGRRWPPAWPRRRGTTPSPPCLKPCCWLPLSPPYSARRRWRRSWGTTARRQPRRGRPGGGPHAAAGPTRSGRARPRPSSAATAVAAAAAAAAAATTT

SEQ ID NO: 115979 - protein, 114 aa, Oryza sativa
  Clone ID: PAT_MRT4530_19524C.1.pep
MEEQRRKKENSGPESICLRAFLLNPNHTPNFGVTEWLAPSSNGTAPERLAPSFCHCGAREPTWQEEGASHASAAASIPVSLYGVATVSFLFYSTSASPRHVGRGTAPERLAPST

SEQ ID NO: 115980 - protein, 789 aa, Oryza sativa
  Clone ID: PAT_MRT4530_19525C.1.pep
LLPCHVLLGLLLLSLHTPASSAAATDTVSPGHSLAGSDRLVSNNSKFALGFFKPGNESSTGSKSSHNTLNWYLGIWYNKIPKLTPVWVANGDNPVTDPNNSELTISGDGGLVILDRSNRSIVWSTRINITTNDTVAMLLNSGNLVLQNFLNSSDALWQSFDYPTHTFLPGAKLGWSKISGLNSRLVSRKNSIDLAPGKYSVELDPSGANQYIFTLLNSSTPYLTSGVWNGQYFPSIPEMAGPFIVNFTFVDNDQEKYFTYSLLDETVVFHHFLDVSGRTKTFVWLEGSQDWVMTYAQPKVQCDVFAVCGPFTICNDNELGFCKCMKGFSIKSPKDWELDDRTDGCMRNTPLDCASNKTASSLTDKFHSMPCVRLPQNGYSIEAATNADKCALVCLSNCSCTAYSYGNGGCLVWHAELFDVKQQQCDGITDTNGGTLYIRLASREEQSQKKNRRGLIIAIALGLSFAALFMLAIALVIWWNKSKRYNCTSNNVEGESGIVAFRYIDLQHATKNFSEKLGEGGFGSVFKGFLHDSRTIAVKKLAGAHQGEKQFRAEVSSIGLIQHINLIKLIGFCCDNDSKLLVYEHMPNRSLDVHLFPTDIKILNWDTRHQIAIGVARGLSYLHDSCRDCIIHCDVKPQNILLSESFTPKIADFGMAKFLGRDFSRVLTTMRGTIGYGMVLLEIVSGRRNSNGGCITGGDKDVYFPVKVAHKLLEGDVESLIDPNLHGDANLTEVERVCKVACWCIQDNEFDRPTMGEVVQILEGIFELDTPPMPRLLQAIAGSSCSIAE

SEQ ID NO: 115981 - protein, 60 aa, Oryza sativa
  Clone ID: PAT_MRT4530_19526C.1.pep
MANEAYACNVLLFFREQGCSLIGIFCTSAHPPHCQIKFDFRSYEEHTEIQDGGNMKDYST

SEQ ID NO: 115982 - protein, 117 aa, Oryza sativa
  unsure (1)..(117): unsure at all Xaa locations
  Clone ID: PAT_MRT4530_19527C.1.pep
GPASCICLLGFSLAPDLSHSPPTPPLPQDRRRAASWXAAGESGSGRQRRRRRRRRRPGGGKLHQHGQIDGALNVEWRAGELGRLHMQGYHLKCKLQVERAMVTDACHLTIACGGLIC

SEQ ID NO: 115983 - protein, 84 aa, Oryza sativa
  Clone ID: PAT_MRT4530_19528C.1.pep
MSFMISLTPLIIIKDALIGNNLVSSWFGMVYSWFGDRTVQPGWLFSMVGPMQQGMLYSVGLILFNYYLTILLNSEIFIKCCLCK

SEQ ID NO: 115984 - protein, 106 aa, Oryza sativa
  Clone ID: PAT_MRT4530_19529C.1.pep
MMRLGSLKIDPIRLLLTCVIADAFSVPAPRRARLPPAANACDAMWEPEPDAACTGYGPPGHTSCSCAIYRSASLEDGGPRWSPYHHAPPQSLCDAEIPELRFEAIS

SEQ ID NO: 115985 - protein, 63 aa, Oryza sativa
  unsure (1)..(63): unsure at all Xaa locations
  Clone ID: PAT_MRT4530_1952C.1.pep
XRHGKXXSKXWIXXRGPPPPPSFLFFSDXDKFSSSXLSEAEGSFQLVEMKTQXRXLRSPFIXX

SEQ ID NO: 115986 - protein, 59 aa, Oryza sativa
  Clone ID: PAT_MRT4530_19530C.1.pep
RRIITSRDLSQSVVGGVRCPAILQEIEAFLPHITVTGWSSLQTCGHVCTLVIQRQGSDP

SEQ ID NO: 115987 - protein, 113 aa, Oryza sativa
  unsure (1)..(113): unsure at all Xaa locations
  Clone ID: PAT_MRT4530_19531C.1.pep
RTRRPAPIDLLAADASSPPASLPSPSPPTSSNDLSPPXRRSTSSPTPHPPHLSSLPAPRPTPSRRGSPPCTAPSQPTPLLPLSLRAVRTASLSRSRVGSPPSSPTMTSLARWR

SEQ ID NO: 115988 - protein, 119 aa, Oryza sativa
  Clone ID: PAT_MRT4530_19532C.1.pep
MGTGEVEDAVDGGRGGRKATAVGDPHGLHRHGGDLHRVLRPRNQLLCCRCRFAPFVRFSQVSSGGGAFIDALQVGALALFLLAVRRARDRFPVQVAGGFSSLFSDNDFTCTVEINTSAV

SEQ ID NO: 115989 - protein, 104 aa, Oryza sativa
  unsure (1)..(104): unsure at all Xaa locations
  Clone ID: PAT_MRT4530_19533C.1.pep
MIVYTMTLCHDDDIRVVFVNLSMVFRLLDIIILGYMLRKLGGPLMVITXYGYSSVCVYSPKLLSWGGYYSVFSPGWMVMTDCCKKLGNQGWLLETPGGIGKRVL

SEQ ID NO: 115990 - protein, 90 aa, Oryza sativa
  Clone ID: PAT_MRT4530_19534C.1.pep
MAAPGVARDGETEVGRARRFAWRVFGVAVRASREESARADHFCQNLVHLGSETTWTFSCGNKSLNFALSLFDIPYVQIPETFGPKLYKTV

SEQ ID NO: 115991 - protein, 98 aa, Oryza sativa
  Clone ID: PAT_MRT4530_19535C.1.pep
MALASLAAAASLLPAAAARSRVSLARCRGMASSSSPSAAAGASAAARVGVVQMTSVGDLDANYATCSRLAKASAPLQLVAVYISSTAASLLALLCCCC

SEQ ID NO: 115992 - protein, 72 aa, Oryza sativa
  Clone ID: PAT_MRT4530_19536C.1.pep
NVVPRCTAPRIRAASIAIVKTTITLRSLFWMWSGLVHCCSSTLFRALFQLCECFVSQVSPAPPWDICLLVVN

SEQ ID NO: 115993 - protein, 52 aa, Oryza sativa
  Clone ID: PAT_MRT4530_19537C.1.pep
KLAIYICVYCAALLSIARTQLPVNGTEFNSDASVSSGIKHHVIVASCGNQVP

SEQ ID NO: 115994 - protein, 106 aa, Oryza sativa
  Clone ID: PAT_MRT4530_19538C.1.pep
WAPAAGGCLAEVSAVAVPSPPLDPVGGETASSPPLDSATGEPVERQRALMASGCLAKVVAVAAPSPPLDPAGGEPARRRRAPAWRRQRWHTSTAAAAVPSPCNDDG

SEQ ID NO: 115995 - protein, 834 aa, Oryza sativa
  Clone ID: PAT_MRT4530_19539C.1.pep
MPDSSADPQPPLQPSAAAANSDPDMPPRKAPAGGGGKLKRPLTLKLRAAAEQRLAHLRARLRLHPLPPPPPRALAPEGSPEEAALRALGLLGFARLGPAFSSSASEPLRPDLVAHLVAYYDPPQRRSFVRGVRVAVTRKHFADALCLPCKPSPAAAPPPPEDADPAAVAAAAMELLQAYVLPPFQGDDMCILPPEVAAAEQAVRDGSAHRVDWAGLIWGLVEKEMQDLPKRDDGLCYYGAYLQRLIWAQKPELFERTEEGERGGEVVLEVSDMDEEDGEDDTDVKSKSMEELESGDADADAKNSNLEKSEAGGADLRSNCLEELVSGDADVRGTMPEDDEEEADGDEENDATGLSLGIGSANDYDSTDGEEDANVENLGEGDSGNEEAEESEEDAFGHYDDGFSGKMGSLHGMTSTNLLQAMSSIPATYNVSENAPDLSSGEFLAMGADAHKNGLDLGTGSSYFFENNGKRHIGEIEEYNDPMPGHEQFDQRNPNKRMRNSNNSSIPPGSSVFNAHFAEPFQSLMSKASMFYEQKERELQDVLVEKQYLANMLQEKEQIIQSLNSARFEQENKWQAELRRFEHDLNVMAQLVTGYRRALKQNRASFDEYRKKFPCDKPRYCDVAGGGGLVLSVKELEKKRLEEVQQKLAIANEMIENFQHEWFSKLDDWARSIHFIWCRTEELIREINLLREKRKATVTNPATEEAKVTTPATEVAEVTTAATGVEVTTPATEKVEVTTPATEKVEVTTPATEEAKITTAATEEVEVTTPATEEVEVTTPSTKEVEVTIAATEEAEVTTPATEEAEVSTPATEEVEGTTPATEKVEGTTPATEE

SEQ ID NO: 115996 - protein, 415 aa, Oryza sativa
  unsure (1)..(415): unsure at all Xaa locations
  Clone ID: PAT_MRT4530_1953C.1.pep
SRRPPSHSRRSSPLWHVRATPSSAARRRPRRRLLAAAALLRRREHTPPPPRARCRARPPVRASPPAAGLPWPARKSLFCIPPSLPSPTGGTGGPTRQLLLLPLAGRLQPPWPPEPPHVAAKSGDLPHPSSHPTTWTRPPPRPPPFPPLTPQETAPXLTSPRAPLRRPTSPRNPPLPGPLLAPLSYKINPRGLLFLFPRFPESPTPSTELSTPIPFAAARRRSPAARHRRSRRCRAAPPPPIASQRLAAPRHPLHLPPPPPEPPSHREAEPLPPHTAFSRPLPIPPCSPVVAGLISPCLPVSSVVISVGGPSDHRPPVPPHGTPPNRRRRCLPEERRRLFPPPATSRSASSARTLGEPLLXSPSLSRGGPAVDRLGGPGPRVFPRFACQRVVPVVSEVRGREEKSSEDQSEEARQE

SEQ ID NO: 115997 - protein, 159 aa, Oryza sativa
  Clone ID: PAT_MRT4530_19540C.1.pep
LKCSPFSVSRLLDSMTMAVVAATAKLVLLLAVLLQFSGVLTAARTLPGEEWLLPEGGGVVRAVVEMLVGSKSGGGGARFSGPPCQFSHVLVYFGLKSEPLRVRDAPALFPKAQPRQAIADSCHELVDANFTLLQHFSVLSPLLDVLGAHRVTAIDDYFD

SEQ ID NO: 115998 - protein, 78 aa, Oryza sativa
  Clone ID: PAT_MRT4530_19541C.1.pep
FWGELNTPYVGQYYYNTQCGRQQQVASRLRRPVRLPRWANSPVDTVSMVPERQSSRGSEKNASIGIHHCKIVSFVRSG

SEQ ID NO: 115999 - protein, 49 aa, Oryza sativa
  Clone ID: PAT_MRT4530_19542C.1.pep
ITLLPTITLTTQYIYYRASLYKKHNGCNFTHKQRLLTQQHQSFPPLKST

SEQ ID NO: 116000 - protein, 109 aa, Oryza sativa
  Clone ID: PAT_MRT4530_19543C.1.pep
MTTPHQSPSPPRSSSHKDSSGSTARWLEQRRMHSPAHCIDDNGSPSPVSNPGHASIVGPPHSLPCLLATPRRTPPHRAPTDAVVVPPSAGALPGAALAPLDQRRRSHAT

SEQ ID NO: 116001 - protein, 123 aa, Oryza sativa
  Clone ID: PAT_MRT4530_19544C.1.pep
MAVCATFDLGVGVVYGYMDDHASYTSTASASSPPRQRRRRWLRQLCAVATRDGRRGGGGVATATGGAVVGRDSDCDGSDATAAATGGLVRQKELGGSDARQWGSHIRCCSVGDGDNDLLPLFC

SEQ ID NO: 116002 - protein, 407 aa, Oryza sativa
  unsure (1)..(407): unsure at all Xaa locations
  Clone ID: PAT_MRT4530_19545C.1.pep
YVKKGVFLILEKPVLDFKSLGKIGEVPDWGWPDRRIIAGLTADDRWSDRVDXGRSDRHCVAGLTDPGQRAGGHVTIGSKAKLIVNSDICAQESEENXRIPLMEYLKILVLGLXSKIRRQAFKYTLLNGELYRRNIDEVLFLKLLWDQIYPSTSKGHRSVLVAMDYFTKWAEALKNMIHMKVIDFILKHIVHRFGIPXTLTTDRAESSNKTLLKLVKEKIEELQKKWHEVFSEVFWAHRISKYGATKVTPFELVYGQKAVLPFEVNLGSLRYIKXDDLLVKDYKTLMRSNFEDVIDKHLKTLKDIETLQGQHFSASNQWEILEEILPECLAICLGGSMAGNRIITLRQTCSMLLDSRCSXKRKGGICLHPNLAPIGEIXGKIAKVWKVMGFLHXDRSDRRYVGSLTAA

SEQ ID NO: 116003 - protein, 237 aa, Oryza sativa
  Clone ID: PAT_MRT4530_19546C.1.pep
MARPRAPLLRRMLLLCAVAASCSYYLLVLHAQASVPPRYDGFAYGDAATAAWKDTILVEAFLDPLCPDSRDAWAPLRLAVDRYAPRVSLIVHPFPLPYHTNSFLACRALYIANKLNSSSTYPLLELFFKSQGKFYNAATSSLSSTVISGEMSKLAARVVGNSVSEFQSGFSDIRTDLAARVSFKYGCTRGVAGAPFFFVNGFLQPGGGSPIDYSTWVSILDPLAGQHGDRLEMFTSM

SEQ ID NO: 116004 - protein, 72 aa, Oryza sativa
  Clone ID: PAT_MRT4530_19547C.1.pep
MAARPRCMEFVSQITNWGCQRTARRWGEPINVSLDEIIHGKGMNTKHAMKMSIDKDDEEAKMTMAAAAVAVG

SEQ ID NO: 116005 - protein, 109 aa, Oryza sativa
  Clone ID: PAT_MRT4530_19548C.1.pep
KKKKKKKKKKKKKKKKKKKKKGGRDKGDKGAHARARPDKRERHKKTGAGRGETQRRGGKPRGDPTEKPRATPTSSARGKKRKEAHSERPPTQEHTERRKGRAPGRGTKS

SEQ ID NO: 116006 - protein, 64 aa, Oryza sativa
  Clone ID: PAT_MRT4530_19549C.1.pep
RCSDSPAWGWIVVYLTAYLMAAMVAITGAHTCESVMRFTDTQCQRDVPDWPLDAFLPVLDRILT

SEQ ID NO: 116007 - protein, 400 aa, Oryza sativa
  unsure (1)..(400): unsure at all Xaa locations
  Clone ID: PAT_MRT4530_1954C.1.pep
GHDRRFRLGVRRPTGPHCRWXKIIYASMAPLVLAAAGLAVVMAHSSAGVALLPTCGERTDHRELRHCGCAPHRLSGDRNDDTVLPSTAGPLRSLRLSAKAMTWRAESDVAAAFRVSDDLKDDLVDGGAGIWIRVCDWVATAAADGAWDLQRLAAWLKEKMKRNDDNDEVSTWLEESWMHRYAVISTMCKRPRCWSCPFLAWTASSRAGTACTDWHPGQRQEESRSGASATDAGEHAHAQRNDYQHDDDHYHDDHHGGRRDRGPPAPPTTAXGDTEAGDGGCRGVRRREQHPPDGAVRRGAEGEVSGRHACRRPWRGRRHQRDVPPGAAGLLALDSGLLRVIAGDRLRRTRVRSGPLLPLPLRPPPATATVAVNPVSAPPRRSEFSKHTRTRDVSGRNRQS

SEQ ID NO: 116008 - protein, 274 aa, Oryza sativa
  unsure (1)..(274): unsure at all Xaa locations
  Clone ID: PAT_MRT4530_19550C.1.pep
RPVVSDTVHSRGAAAGGADADGARGRGTAGAAMDGAVAGGTVTGGAGTVGKGMDGVGMGGAGAGGIGIGGAGMRDTRRXGAGPRSINPGGTSAGGAVTGGVGTGVASVGGVATGGACAGGVGTRGVNPGGTSAGGASAGGVGIGGVGAGGAGTGGAGARGTRGXGAGTHSARSAGVGASGVGTGGAGAGGVGTXVASADGIGAGGESTRGTQRXGASPRGTTRGGASVGGAGRRGAGPRVVVGAAGLLGWQMSLSGKKLTTFACPLNLVSIGHS

SEQ ID NO: 116009 - protein, 365 aa, Oryza sativa
  Clone ID: PAT_MRT4530_19551C.1.pep
MFTWPVPPRGWTVSPTTGRYRFGYGFGGESSSSTVLRTPAAPTTTRGPAPLLPAPPTLAPPSPPAPMPSALATHVPTPPAPAPPVPTPLAPTPADVPPAAPHPRVPRAPAPPVPAPPAPTPPIPTPPALAPPADVPPGFMPPPLVPTPPAHAPPVATPPTLATPVPTPPVTAPPADVPPSAMPRAAAAPLVLRGPAPHLRVSRMPAPPIPMPPAPAPPIPTPSMPFPTVPAPPVTVPPATAPSMAAAAPRAPAAPLALHAPAPHIRAPSMAAPPPAAPRGRTMPPTTGRYSFSYGGLSLSYTTPRGPIAPLSLRSPAPHLRARRVPTAPPAAARPRAPTPPAAAAAPAAPPAPPSGLPSWPLLVR

SEQ ID NO: 116010 - protein, 528 aa, Oryza sativa
  Clone ID: PAT_MRT4530_19552C.1.pep
MFAWPVPPRGWTVSPTTGRYRFGYGFGGESSSSTALRTPAAPTTTRGPTLLFLPAPPVPAPLVHAPPTLAPPLVVPRGGWTIPPTTSNDCFGDGHASSSTAAPLTAAGHSTPPEPVPSVPVPLGLTMSPTTAHYSFSYGGASSSSATPRAPIAPLALRAPAPHLCVPRVLSPPAPTPPVLATHVPTPPAPAPPVPTPLAPAPPADVPPGFTVSPTITRYSFGYDGASSSSATPRVRTTSLALRAPAPHLRVPRAPAPPVPAPLAPTPPIPTPPALAPPVDVPPGFTVSPTTTRYSFGYGGASSSSAMPHAATAPLALRTPAPHLRVSRKPRSLVLTPPAPAPPVATPPTPATPVPTPPMTAPPADVPLGFIVSLTTTHYNFGYGGASLSSAMPRATTAPLALRGPAPHLRVPRMLAPPIPMPPAPAPPVPTPSMPSPTVPAPPVTAAPATAPSVAAPAAVSHGLTLSPTTTRYSFGYSGVSSPSAVPCTSSVPLALHVLAPHLCALHVSVPRPCAPSASAPPAAAPCG

SEQ ID NO: 116011 - protein, 119 aa, Oryza sativa
  unsure (1)..(119): unsure at all Xaa locations
  Clone ID: PAT_MRT4530_19553C.1.pep
TGGGEWGVLLQQQVLSPCSEFVRQQHSIVATPFWQPATXQLINNQVMQQXCCGRXGGGXQQSXYHAIISVQAIVQQLHLQHXCVVYLDQTYTXSXALLALNXPXIFGXYXNYYIAPRSI

SEQ ID NO: 116012 - protein, 883 aa, Oryza sativa
  Clone ID: PAT_MRT4530_19554C.1.pep
MEDANENLAQQGDANGNPAHRGLPPRHLIIPYSVAAAMANRPIRLASQARLLSGGGGAVAQQPPTQHAIAAQRRLPSRNRWSRIIPSLLPDGKSYHIIDTSFTSEEVFVPAPPPPLLVSTVRRPAAPSAQPIATMFTWPVPPRGWTVSPTTGRYRFGYGFGGESSSSTVLRTPAAPTTTRGPAPLLPAPPTLAPPLVVPRGWWIVSPTIGNDRFGDGGTSSSTAAPLTPTGHSTPLEPVLSVPMPLASATVEQAHHLLCHVRPLLLLHCTLAPHLCVPRVLSPPAPMPSALATHVPTPPAPAPPVPTPLAPTPADVPPGFTMSPTITRYSFGYDGASSSSAMPRMRTTLALCVPAPHPRVPRAPAPPVPAPPAPTPPIPTPPALAPPADVPPGFTVSPATTRYSFGYGGASSSSAMPHATTAPLALRAPAPHLCVSRMPPPLVPTPPAHAPPVATPPTLATPVPTPPVTAPPADVPPGFTVSPTTTHYSFGYGGASLSSAMPRAAAAPLVLRGPAPHLRVSRMPAPPIPMPPAPAPPIPTPSMPFPTVPAPPVTVPPATAPSMAAPAAASHGLTVSPTMTRYSFGYGGASSPSAVPCTSSVTLALRALTPHLRALRVSVPRPRAPSASAPPAAAPREWTVSLTTGRYSFGDSGASSSSAAPRAPAAPLALHAPAPHIRAPSMAAPPPAAPRGRTMPPTTGRYSFSYGGLSLSYTTPRGPIAPLSLRSPAPHLRARRVPTAPPAAARPRAPTPPAAAAAPAAPPAPPSGLPSWPLLVRPPTGPARARLAPATPTEAFEEYLVQRRAIEATVDDTPWEMIGRSRKTGGPMFAVAGGGRDRAELEAKEARERRKNRMDKRKAAAAARAQQPPPPLAPRCSGELKWW

SEQ ID NO: 116013 - protein, 199 aa, Oryza sativa
  unsure (1)..(199): unsure at all Xaa locations
  Clone ID: PAT_MRT4530_19555C.1.pep
MRANFSGFNSVVLSVVSDVPVDSGPVFEDTHRGRVCVRVFIGIYKAELTNLRAFGYDKWSKWIVRPTQCKPARDTRSRSSPPDWRKTSGILLHTVESAITIGKGTLESITSMLPHHKEIDQNNGRCQTSFNFTPSAPKXTYHKRSXRPDPGRGRAAQVRAARGWPEKTNPGDGDRKSVDGRNLARRTGYRLDQPPPETR

SEQ ID NO: 116014 - protein, 332 aa, Oryza sativa
  Clone ID: PAT_MRT4530_19556C.1.pep
MEGKEDDRRRGGGGGSSTPGMNLKNLVSREYFGHKKKVHSVAWNCLGMKLASGSIDHTARVWSIDPHGHSKVKDIELKGHTDCVDQLCWDPKHPDTVATAAADKSIRLWDARSGKCQVVELSGENINITYKHGGTQIAVGNKEDELTIVDVRKLKALHKFKFNYEINEIAWNKTGDLFFITTGLGNVEVFGDPSLDDTLHVVGKLNAHTAGCYCIGMDPLDRYFAVGSADSLVSLWDVKELLCIKTFTKLEWPVRTVSFNHTGEFLAYASEDPFIDIANVQTGRSIHQIPCKAAMNSVEWNPKYNLLAYAGDDKNKYQADEGVFRIFGFEST

SEQ ID NO: 116015 - protein, 215 aa, Oryza sativa
  unsure (1)..(215): unsure at all Xaa locations
  Clone ID: PAT_MRT4530_19557C.1.pep
DIIDAYHVLQEVHHGVCRAHQSGPKMYHSIRPAGYYWLGIMADCLKVVKSCHDYQIHGDFKHXLPRVHAWPLKAWGIDVIGLIEPPFSGGXSLILAIIVHLSKWAEAVSLREVKTDSVISFLEWHIIYRFRVPYRITSYNGKAFMSHKMQRLIANYKSRWNYSTGYYPQANGMIEAFNXTLGKILKKVVSQHRRDWQDRLFKALWAYGWWCGRFS

SEQ ID NO: 116016 - protein, 59 aa, Oryza sativa
  unsure (1)..(59): unsure at all Xaa locations
  Clone ID: PAT_MRT4530_19558C.1.pep
QPSDMSGVFREVIENKLMVXPDAKPVKQKLRRFTPDRKEAIQEELNKLFKVGFIREILH

SEQ ID NO: 116017 - protein, 343 aa, Oryza sativa
  Clone ID: PAT_MRT4530_19559C.1.pep
MAAMAAASLLCARAAAAAPTLRLRGGGRGARLVFSCSASSSSPSGEGGFSGKVGFLGLGIMGAPMASNLINAGCDVTVWNRTRSKCDPLLSLGAKYEPSPADVASSCDVTFAMLADPESAVEVACGANGAAQGMAPGKGYVDVSTVDAATSKLIGKHITSTGASFLERSDFSSCTVGPMLTRYLFSRLQFQAQKSQQKMACSSFLGQSRFFLGDVGKGADMKLVVNMVMGSMMVSFSEGLLLSEKVGLDPNTLVEVISQGAISAPMFSLKGPSMVKAAYPTAFPLKHQQKDLRLALALAESVSQSIPTVAAANELYKVAKSLGLADQDFSAVIEALKAKEQSK

SEQ ID NO: 116018 - protein, 53 aa, Oryza sativa
  Clone ID: PAT_MRT4530_1955C.1.pep
PVGPACRRRFPRADVSPGKGGRDGAGRALRRPLSLPDSPRHERGLPVARWGRG

SEQ ID NO: 116019 - protein, 132 aa, Oryza sativa
  Clone ID: PAT_MRT4530_19560C.1.pep
QEFGTRVNSTSVNIFPGYNHLAAGSIVSTPADMTKLLRLVLNKGTVDGVQLFKSPATIAEMITGKNKAVDELLAQNGAGLPLLGFGYLPDGNSLSAGYGFDIIGHVLWGHAYVDQGGDTFVHHTVTGLLLQT

SEQ ID NO: 116020 - protein, 101 aa, Oryza sativa
  Clone ID: PAT_MRT4530_19561C.1.pep
MLLPTPRTPSRTKNNNNNKKKKKKKLGQDEADRAWMGNWKVQWRGARAEGGHLSSEDAQAQRQQLGGEAMLVREGGGGHGELNKWRKCAARREVAEQHRSP

SEQ ID NO: 116021 - protein, 181 aa, Oryza sativa
  Clone ID: PAT_MRT4530_19562C.1.pep
MASNKIAPLLALTLLILFFGCAVTNCTGKPVAPTPPSHDDHGRCPIDALKLRVCANLLNGLIGVKIGRGPDDCCPLLAGIADLDAAVCLCTALKANVLGLINLNLPVDLSIILNKCGKNYPSAAIGIACLRNLCLPRPAPGEGGNKVFGKRFARLLPIRSRRLVFLFARVMHAFVNARNRE

SEQ ID NO: 116022 - protein, 700 aa, Oryza sativa
  Clone ID: PAT_MRT4530_19563C.1.pep
MAAGKQKKRIIRSTNSDQNRTWKKSKVESSNCHISLKSQIALKWDDYQKRVVPQKEQVGILWSDLAPFIDSRQKHDSGLADVTYIPPETFSLENLRSVLSYKVWDTCLTEADRKFLIQFLPTEIDAEENLGLGMCCSSSHANSLSKCYVNVISFLKYSTWSSSLCYGDTHPDALLNKEKQIRADEKAYRVNLNNYHSKDNNLAKHKQGDTRPKVTSSEMPLKVAQSSDVSKFMSYIEISRTQHNLVKSMKQSGDGIKTKHLTRVIGNLDKFHVKPYGTLIDDEQRRLREHWLNISCNDIPAAFEVLKNNRVTTEKLRNLLGLELGEKNVSIMRKIKADQLAGITKELGQHGACENDGSTDLQDALVEQLSEDMLQGGNDHCPSRQDCDDDETKHIETSADHHDSQGRENSDLQAQDYKGTSCADRSISFCASNVEEQNEDFVNTKFSNDGPDVQAEDFKEISYTDTTIIDHSPERRQIKTTCYTTAPIDTRESQNTQAQSLEGITYTGPSMHAHEQNQGLKGTRYKIMIDKGHSANDISLVNSYPEMNDVTMDSKEVENTTVIPSNSSTLLSNTSGGQIPVEEHLNGQAAKGVKDLWELPEPDDSYYLPLENSSVYNGSGGLQIGHRHLPAGQQGSVVCVENGILRQQQSQHTIAAAYPMDNPESFVQPSSKQQSGVVISTIANDMGMHQYFLVLKGPRR

SEQ ID NO: 116023 - protein, 71 aa, Oryza sativa
  unsure (1)..(71): unsure at all Xaa locations
  Clone ID: PAT_MRT4530_19564C.1.pep
RRRARQTFSSWRCLSSPLHSHLTTXFXSFFLANFXPDEQQQRRVRPIDGHRLATLPASQAKSTSTGCRVAD

SEQ ID NO: 116024 - protein, 210 aa, Oryza sativa
  Clone ID: PAT_MRT4530_19565C.1.pep
HFGNPSLSWSSSLCYGDTHPDALLNKEKQIRADEKAYRVNLNNYHSNMVESLKKWKKRWLSSDDPEIMFRDNNLAKHKQGDTRPKVTSSEMPLKVAQSSDVSKFMSYIEISRTQHNLVKSMKQSGDGIKTKHLTRVIGNLDKFHVKPYGTLIDDEQRRLREHWLNISCNDIPAAFEVLKNNRVTTEKLRNLLGLELGEKNVSIMRKVRCD

SEQ ID NO: 116025 - protein, 224 aa, Oryza sativa
  Clone ID: PAT_MRT4530_19566C.1.pep
MEEQQAAAAGGGGGGGGASMCANGCGFFGSEATKKLCSKCYRDQLKAAPSSPPAAPDLVANEEEEASTAAAAAADEQLALCSSGCGFFGSKETNNMCSKCYRDHLKATSPLFSSSSSPATASTTDITVPIAPATTAPTPSLKGKEEEATAAASSSAAAAAKPNRCVACRKKVGLLGFECRCGGTFCSTHRHADKHACTFDFKKSDREKIAKENPLIVAPKITKF

SEQ ID NO: 116026 - protein, 82 aa, Oryza sativa
  Clone ID: PAT_MRT4530_19567C.1.pep
LTRIQKTFLDYHFKAEQEAGSATFAFFSFNGTAGVWRTEAINDAGGWKDRTTVEDMDLAVRATLKGWKFIYLGDLRVRRPNP

SEQ ID NO: 116027 - protein, 109 aa, Oryza sativa
  unsure (1)..(109): unsure at all Xaa locations
  Clone ID: PAT_MRT4530_19568C.1.pep
PTRSTTRPPTRPQTRGRALHMAWPNKKVKLSFLIPASTGRNMAEALHATNALLTAARHRVATPVNWKPRERVFIPPGASDXEANARLRDGTETVQLVSNMCYLRFTQVD

SEQ ID NO: 116028 - protein, 175 aa, Oryza sativa
  Clone ID: PAT_MRT4530_19569C.1.pep
KHNSEVETWCCVNNFMLQFLVSKSAQKKFLRTSQSIGSARGSENEMVKRLALHQHYPELPTLLETMDLSHTRSLALSGTVNRIPLDMFVHLVVLDLEGWRSLDDDDLLQICIRFLLLKYLSVKKTRISMLPPQITELRYLETLDISHTRVAKIEAYGLFSLTTLDLRSTQVKNLP

SEQ ID NO: 116029 - protein, 1161 aa, Oryza sativa
  unsure (1)..(1161): unsure at all Xaa locations
  Clone ID: PAT_MRT4530_1956C.1.pep
DCKLEDKVDRLEKELAALKGEAPPQKARVRLTARKRALFVPRYQLAPKQXNGPNNNNNNNNNNNGENPTLAQVLAQQAQLMNMMMHQLQNQQNQGNNHAPPQNXCTDQEKVSFASHQLHGPASEWWDHFRLNRTTAEPITWLEFTAAFRKTHIPSGVVSLKKKEFRALTQGSRSVTEYLHEFNRLARYAPKDVCTDDGRQEKFLEGLNDEFSYPLMTGDYHDFQKLVDKAIRQEDKYNHMEQKKRRIAHFKALQGNSQRPRLAMGPQAVLQGGSSSVVRPQRQFFNNNAGNNNRNQAPRPVATPVQHQPAKREQGSKPGVEDLRRPLMVSTPSKQALTSQRSPSVRIEIQGVPFLANLILLESKDLDVILGMDWLARYKGVIDCANRKVTLTSNDGQVVTVHALPSEPLWSSLNQITLEEIPIVREYPDVFLDDLPAGGVAVDPSNVESVTNWKQPKTVSEIRSFMGLAGYYWRFIENFSKIAKPMTRLLQKNVKYKRSEECEQSFQELKSRLISAPILILPDPKKGFQVYCDASKLGLGCVLMQDGKLRPHEKNYPTLDLELAAVVHALKIWRHYLFGTRTEVYTDHKSLKYIFTQPDLNMRQRRWLELIKDYDMGIHYHPGKANVVADALSRKGYCNATEGRQLPLELCKEFERLNLGIVSRGFVAALEATPTLIDQVREAQVNDPDIQEIKKNIRRGKAISFLEDEQGTVWLGERIYVPENKELKDVILKEAHDTLYSIHPGSTKMYQDLKEKFWWASMKHEIAEYVAVCDVCQRVKAEHQKPTGLLQPLKLPEWKWEEIGMDFITGLPRTSSGHDSILVIVDRLTKVAHFIPVWTTYSGSRLAELYMARIVCLHGVPKKIVSDRGNQFTSKFWKKLQEEMGSKLNFSTAYHPQTDGQTERVNQILEDMLRAYALDFGGSWDKNLPYAEFSYNNSYQASLQMAPYEALYGRKCRTPLFWDQTGERQVFRTDILREVEEKVKIIQKRLRIAQSRHKSYADNRRRDLSFEEGDHVYLRVTPLRGVHRFHTKGKLAPCFAGPYMIVSRRGEVAYQLELPQSLAGVYNVFHVSQLKKCLRVPTEEANLEQIEIQKDLTYVEKPIRILETDEIRTKNRVIRFCKVQWSNHTEEEATWEREDELKSAHPHLFDSSSESRGRDSV

SEQ ID NO: 116030 - protein, 42 aa, Oryza sativa
  Clone ID: PAT_MRT4530_19570C.1.pep
LDYLGAYGDKVLIFGDILRLKQYMVGALVVDISITVMVTVDS

SEQ ID NO: 116031 - protein, 76 aa, Oryza sativa
  Clone ID: PAT_MRT4530_19571C.1.pep
MGNGFDGVAVGINRVDPMVEEMVDDLRSIKLMPNSIKLIHFHSMDIDIDSLPSPFASLSYGDIAQYLEDKGKDDDF

SEQ ID NO: 116032 - protein, 256 aa, Oryza sativa
  Clone ID: PAT_MRT4530_19572C.1.pep
MVARRWVGAGRQLRAPTTARRSPPPFNIVAIKDVCEDGRAVHIVMELFIVGELLDKIQEEGHYNERKAAEIKDDVLALSGFTELIGSPYYVAPEVLHRYVIDQNLRYCTYGPKSDVWSATVVLNVLMSGVPPFWAGHPWICESGVAINQALDPSVITWLKQFCNEQVKKLDLRAEVSEDRSKAYNAADLGEVRESEGFFFLNGFQVALEFLCKEDRYNVIDVKEVVLSVIESTPVLHLIDPKRIKFLAENLAGKES

SEQ ID NO: 116033 - protein, 87 aa, Oryza sativa
  Clone ID: PAT_MRT4530_19573C.1.pep
KAANLPLGFCLSLPNPLQIQSITYFFFKKNGKHESMRPRVTTSSPPPLRLAFSSLLFPRKRRRQRRRQESKTNARQRQGAGGGGELP

SEQ ID NO: 116034 - protein, 143 aa, Oryza sativa
  Clone ID: PAT_MRT4530_19574C.1.pep
MVEAQSGSRPEARPKRTLWQVMLVRPMATSTTGHHRASANRHRHRKLYRSASPLPPLLYCCRPVAAAPPRRPAVPVSATPSLDLSLGMERSEACGGGVATRRSSLSSELADFGSGRRRYRLTLRREEEDRKEEHRWKKVTAVA

SEQ ID NO: 116035 - protein, 76 aa, Oryza sativa
  Clone ID: PAT_MRT4530_19575C.1.pep
MEEAEVPPRLLNDADLDLVGDRELQAIPKADWEPTGDAHGWTQAPRHSTGGSTWQNASESRWQVPHDVHWGNLNAH

SEQ ID NO: 116036 - protein, 94 aa, Oryza sativa
  unsure (1)..(94): unsure at all Xaa locations
  Clone ID: PAT_MRT4530_19576C.1.pep
XGPKXXXXXXXXXXIKVSIQXPXAXPKXHXKXXXGXEXQTTXXXXVPQDKXXEKXXPXXXHXXXXXKPXRYXXXGTMXVTXXXXXXHXXWXXGP

SEQ ID NO: 116037 - protein, 74 aa, Oryza sativa
  Clone ID: PAT_MRT4530_19577C.1.pep
NQSIKPSFFRSYYYWTSAKINPLLRTPNHHIFLHPRGDPIISLSPAAAKAYCCWACPFRAPSLKAHLGRPRRHA

SEQ ID NO: 116038 - protein, 41 aa, Oryza sativa
  Clone ID: PAT_MRT4530_19578C.1.pep
YNTHFFSAPTSDHKSKQKKNNHWGHNIINMDLATKFTTPNI

SEQ ID NO: 116039 - protein, 96 aa, Oryza sativa
  Clone ID: PAT_MRT4530_19579C.1.pep
MVLSSEFIGDGRAGEAGEDDDEDEVVTSTRPRAGARRGSMDRRRRSKRRAWRAVDSGVAVVAVSLARMHGICNGCDDQATKRGLMGNGPWLPGPGH

SEQ ID NO: 116040 - protein, 75 aa, Oryza sativa
  Clone ID: PAT_MRT4530_1957C.1.pep
MASSGGGAHTATGDVKRRRRPKAAAHTGEERKREERGASPGVTLALRYHSVAADAYYQDQRFAHTRLLDFAQQLL

SEQ ID NO: 116041 - protein, 256 aa, Oryza sativa
  Clone ID: PAT_MRT4530_19580C.1.pep
MTVVVVADDAAAAAAAAQQQEELPPGHGQTVCVTGAAGYIASWLVKLLLERGYTVKGTVRNPDDPKNAHLKALDGADERLVLCKADLLDYDSIRAAVDGCHGVNPRAGRSARCCQPTVNASAVHILKYLDGSAKKYANAVQAYVDVRDVAAAHVRVFEAPEASGRHLCAERVLHREDVVHILGKLFPEYPVPTRCSDEVNPRKQPYKMSNKKLQDLGLHFIPVSDSLYETVKSLQEKGHLPVLSKEIPEELNGVPA

SEQ ID NO: 116042 - protein, 864 aa, Oryza sativa
  Clone ID: PAT_MRT4530_19581C.1.pep
MKYLDPKQPTNTRIKDLISRMTLAEKIGQMTQIERGVASADVMKNYFIGSVLSGGGSVPAPQATPAVWVNMVNEFQKGALSTRLGIPMIYGIDAVHGNNNVYNATLFPHNIGLGATRHCVSNIIFLCIRDPDLVRRIGEATALEVRATGIPYTFAPCIAWSMLQLHEYMAICTILDSLRALLTKNASYNLVQLMAFNRDKVAACAKHFVGDGGTHNGINENNTITDEHGLLGIHMPPYYDSIIKGVATVMVSYSSLNGVKMHANHDLGFVISDWLGIDRITSPPDANYTYSVQAGINAGIDMVMVPFNYTQYIDDVTSLVKKGIINMSRIDDAVRRILRVKFIMGLFENPLADLSFADQLGKKEHRDLAREAVRKSLVLLKNGNSPNQQFLPLPKKARSILVAGSHASNLGYQCGGWSIEWIGGSGDITVGTTILEAIKSTVADSTHVVYSENPDESFMKNNDFSFAIVVVGERTYAETTGDDPELTILDPGTDTIRTVCSTAKCAVVIISGRPVVIEPYLPMMEALVAAWLPGTEGQGVADVLFGDYGFTGKLPRTWFKSVDQLPMNVGDLHYDPLFPFGFGLTINSSQPGFSGADRLRDRNGGMIYVVLSLVLSVILMHASGIDFGPPVAVLPRSVVVAGLVDSSRAAQLAPANPVSTGGKLARSDDYHRRFLFARIGALDSMIMGAGIALDDDGHGDCLDRRPCLRYFLLATFLATLLLSLMAYGQWNSMFRDHDLDAFSVRLAGYEGIDLGRPAATVSPEFRVTLGTANGACVDRAAVTVLYSGVALGWARAEPRDCAAGRLERDVEVVARGQGVGLSDRLRARMASEWRRSSIGRAGARRRREDLRRGHLPGARYLPHP

SEQ ID NO: 116043 - protein, 190 aa, Oryza sativa
  Clone ID: PAT_MRT4530_19582C.1.pep
MTVVVVADDAAAAAAAAQQQEELPPGHGQTVCVTGAAGYIASWLVKLLLERGYTVKGTVRNPDDPKNAHLKALDGADERLVLCKADLLDYDSIRAAVDGCHGVFHTASPVTDDPEQMVEPAVRGTEYVIKAAAEAGTVRRVVFTSSAAHVRVFEAPEASGRHLCAERVLHREDVVHILGKLFPEYPVPTR

SEQ ID NO: 116044 - protein, 869 aa, Oryza sativa
  Clone ID: PAT_MRT4530_19583C.1.pep
MVDGIVARVMNLENKQSTSSTMATPPSGGHRVEECYQGVASGANLVQEPTLVEGKPSLHATAITFELGECSERGVGGSLNSSCFGGSRLPKITDFAKFDGDNPKLWKTNSEKYFSMYQVPYETWSSFATLHFIGNAALWLQTYEELHCVENWSELSVAVHSKFGKDRYQQHLEELENHNQMGGVEEYHRLKTEIKATIKLHKPRSIDAAFSLAKTQEELLGELGFLKAFSKQSFREGYKSFNKAPFQGKGILGASPEENKKIEEKPKWEESALPPFSFLLSDEFASQEELIQEFQSIFQEPKKLPPHRDFDHGIPLVPNARPVTTKPYRALNNINVKNKYPMPVVNELLDELSGSKWFTKLDLRSGYHQIRLIENDEYKTAFRTHQGLYEFKVMPFGLTNASATFQQLMNRFFADMIKKFYQGHIIGVDSVATDPAKIKAVQEWSVLKTLKQLRGFLELAGYYRKFIQHYGVLAKTLIHLLKKDVAFKWSGIEQQAFDLIKQRLVQAPILSMLDFSKEFIVETDASREGIETVLMQGGHPLAFMCKALSPRSQAMSIYQKESVVLEVTLVYMQLTKELRIFLLGQAKAEHCKTPRLLQPLPVPLHAWHTISMDFVEGLPKSDGYDTVLAVVDKFTKFAKFIPLTHPFTALLVAKAFIHNIYDVFGMPQVIISNRDRVFTSALWQELFRLADVKLNMSSSYHPQTDGFGYRIEHTSMRYSTNNFLEMTMARRSCQKLSFRFFGPYKALAHVGAVAYHLELPEGSLIHLVVHASLLKKALKPNTPESADLPLNCFDDSTVVQPEAILRRQLIKRGKAVVHYEWCNMDWSSCYSGDMGEPTTAETRSYQTNYLSPLPPLLALFLPLATLKSR

SEQ ID NO: 116045 - protein, 109 aa, Oryza sativa
  Clone ID: PAT_MRT4530_19584C.1.pep
LITTQFMQHQFFPHLRWGGQQFPFQAISRVQAILHQLQFQQGGFVYFYQTQAQAQVFLPLNFPPIFGFFPNYSIAPRSIPPVGGVWVLILKVKWFKFLKKSHASPPPPL

SEQ ID NO: 116046 - protein, 70 aa, Oryza sativa
  unsure (1)..(70): unsure at all Xaa locations
  Clone ID: PAT_MRT4530_19585C.1.pep
WHLSSHQADDADEATTAASPAVLDPTTPCCCCCCCCCCCLLCKAXCCCCCRQPAPPLLQPEEVCSTPLGC

SEQ ID NO: 116047 - protein, 189 aa, Oryza sativa
  Clone ID: PAT_MRT4530_19586C.1.pep
GPPFFKKGTSPFSRFLPHPRGRGATRFGSPPWGPLFPPGFQFPWGFRKRRFNPPGIFNFTPPFYNFPLERGGGEFYFFPHGGVLFGSPRGYRLVPFFWAKAPPPLWVFFLAECFFFGPPIFFFPPHLIWGLEAPTGGTPFLVFKAGLFFPYKKKKKKKKKEKKKKKKKKKKKKKKRKKKKKKKGRPLLE

SEQ ID NO: 116048 - protein, 167 aa, Oryza sativa
  Clone ID: PAT_MRT4530_19587C.1.pep
SSRLTICRTFPDPPSSPAPNSSASASRNATCRRAFRASPTSSASTSWVSPSRTPVPARSSNTSSSRQRTSPCSSCQTWVPWMARSWWTRGPSERPTSGSSVSPCRWVSTSAAESQRRSPSSRMRTSHSIASSEPKNSLTLSKIFLLSISSVSWSLRTCIKIHTSSCS

SEQ ID NO: 116049 - protein, 357 aa, Oryza sativa
  Clone ID: PAT_MRT4530_19588C.1.pep
MQAYMAVAAAPAPPASLTLLPRTTTVIRDRERFDAAVPVAPLVLRHGAGVKHKAVVVMGATGTGKSRLAVDLALRFGGEVINSDKMQIHSGLDVVTNKVTEEECAGVPHHLISVARPDDEFTAADFRREAARAAAGAVERGRLPIIAGGSNSYVEELVEGDGRAFRERYECCFLWVDVDLEVLRGFVARRVDEMCRRGLVREVAAAFDPRRTDYSRGIWRAIGVPELDAYLRSRGDGADEEERARMLAAAVAEIKLNTFRLACRQHRKIERLDRMWRARRVDATEVFRRRGHAADDAWQRLVAAPCIDAVRSFLFEDQERSSIAAGKPPLFAAGKATSGNISVFASAAAAMAAAAAI

SEQ ID NO: 116050 - protein, 37 aa, Oryza sativa
  Clone ID: PAT_MRT4530_19589C.1.pep
MTKRARWVRRRVQGPKPVADHMYHMGVMAEVKLWIDM

SEQ ID NO: 116051 - protein, 59 aa, Oryza sativa
  Clone ID: PAT_MRT4530_1958C.1.pep
RTRALKEATLPLLLTWHLLSQGGGAASSACSSTHRLLPLFPPPISFPFIPTTIALYSTS

SEQ ID NO: 116052 - protein, 65 aa, Oryza sativa
  Clone ID: PAT_MRT4530_19590C.1.pep
GKRKFKECKLIVYWGLNKKQNLLTGAAPLIKIVFNLSTKEFISPQGTFWGAIFFGLYLAVNKAPF

SEQ ID NO: 116053 - protein, 51 aa, Oryza sativa
  Clone ID: PAT_MRT4530_19591C.1.pep
SHHVQKFLCLMSNLKRVTLLNVLQWECYLVRIYITPSEFHCNDKKRIVLKS

SEQ ID NO: 116054 - protein, 69 aa, Oryza sativa
  Clone ID: PAT_MRT4530_19592C.1.pep
MRPKQTPTPQPAPMANEGPSLPSASDLTTGRPHRDEPLLPPNAMASLARALPAQPQALPGAELTGGGEE

SEQ ID NO: 116055 - protein, 475 aa, Oryza sativa
  Clone ID: PAT_MRT4530_19593C.1.pep
MASVDAGGGRARQQSDGGLQAKRTADERGGGADGGRAEAAERRRAERSGTDGMDPRNRRIWILQSQIGLCATGGDGGELSLVDTWYKMPASTSSSTNMSFVLTSTTELASSYDIQSSSEEAAISQYQQCSYEAGIRIYKQLLGDIPEDGLDLSNIRIWIQRADSRMLELFKEELVAMIDQSIQEINSKHGQEQESDMHRLLKLAGVMTMLSPSSDLLPAILRLYVTLEIFPVNQVNGIASELKRCVREIFQGQCSLALNGIYSVPRGGGIHNITSYMMNYIKYMWEHDSLLNVILAQDDGESENPLHDGKWTRLDYFVQSLIGYLDSLLETISKYQSTEFQCIFLLNNAHFILEILEKLDMKSALQQSWITRHHNQVEYQIARYLEHSWEPILSRLVARKNILFPCFHLPPLTEFYTMLNNNCAVQKYWKIEDPKLRQVVRKTISSRVTQCYQAYLGRSVKNQKRAHYTSEDLSY

SEQ ID NO: 116056 - protein, 190 aa, Oryza sativa
  Clone ID: PAT_MRT4530_19594C.1.pep
MAEACDAATTENAAPRGEGRDEARGWVRVVVQRAQRLLLALLVPLPKRRVASDRATRMLRFVPRRHATRVAPRTAHHPIHPSIGPCAVVGGVFSWCSTSGWRGRRRGGGGAHMLEVLDMAPPRHQPAAGKAGGGRGHGHGHGHGGGGGGPAARKQPLHSSMAHPKADTAAATAAVAPPEGGNICRVFGGS

SEQ ID NO: 116057 - protein, 205 aa, Oryza sativa
  unsure (1)..(205): unsure at all Xaa locations
  Clone ID: PAT_MRT4530_19595C.1.pep
MSGFNRMGSDGNFGKGPRELTGAVDLISRYKLLNHHSFFCKKPLPLAISDTNYLHNVVGDTEIRKGEGMELDQLFQDAYLREKTSYIQPFDMETLGQAFQLRETAPIDLPSAEKGTPTISGKSKIKSKDKVKKHKRHKEKDKDKYKDQKKHXHRHKDRSKDKEKEKEKEKEKEKKKDKSAHHDSGADRSKKHHEKKRKQEGLEDL

SEQ ID NO: 116058 - protein, 189 aa, Oryza sativa
  unsure (1)..(189): unsure at all Xaa locations
  Clone ID: PAT_MRT4530_19596C.1.pep
AFLLRVILYSLLGCSLLPHAHAPPMRPAYSGSRTVKFHWHNPSGQGRFLARAVPSPLPPTNAIFEPHPSAKXFAGVHEKPRGGLTTKLPSRLQQPHETNSSAQVHLSSDVSLSLKAFWYLAYSKYLPGQWVLQFQSPQGASKGSPKLGEILNHLSPPGAWAPSQKPNPTKPIPNKLLALKGQKPRAKKI

SEQ ID NO: 116059 - protein, 54 aa, Oryza sativa
  Clone ID: PAT_MRT4530_19597C.1.pep
LFLTKFLLTLTCHAMSPSRFFITSICLNQTVDMIVSTNLVTKRCYMLSIVQPSC

SEQ ID NO: 116060 - protein, 165 aa, Oryza sativa
  Clone ID: PAT_MRT4530_19598C.1.pep
MEQPLPTAAAEAAAAGGDGEAYRIRPLELADISRGFLGLLNQLSPSPPLTEEAFRARFEELAALGADHLVLVAEDAATGRLAAAGAVLVERKFIRRCGRVGHVEDVVVDAAARGRGLGERVVRRLVEHARGRGCYKVIINCTPELTGFYAKCGFVEKNVQMGLYF

SEQ ID NO: 116061 - protein, 141 aa, Oryza sativa
  Clone ID: PAT_MRT4530_19599C.1.pep
MAARVFALFLGTTIILVVSTAPHAHSYPAAAALHHQCIGAPAIGGENPLEYKEYIVLLRPWPDAATAGMDDDDGARRSWCLSFLPGNITAGGKPRLVRSYKHVVNGFAALLTEAEMDAVSKKPGFWRCFQNGIARLCLQAP

SEQ ID NO: 116062 - protein, 799 aa, Oryza sativa
  unsure (1)..(799): unsure at all Xaa locations
  Clone ID: PAT_MRT4530_1959C.1.pep
MAAAVAALPGKLPRQPPPPPPPPSPPNSTFPRYPKSLAAHPALSSSHPSDVSALLAAAARAGDLRLGRALHRRLLRGDLLDRDAVVANSLLTLYSRCGAVASARNVFDGMRGLRDIVSWTAMASCLARNGAERESLLLIGEMLESGLLPNAYTLCAVAHACFPHELYCLVGGVVLGLVHKMGLWGTDIAVGSALIDMLARNGDLASARKVFDGLIEKTVVVWTLLISRYVQGECAEEAVEIFLDFLEDGFEPDRYTMSSMISACTELGSVRLGLQLHSLALRMGFASDACVSCGLVDMYAKSNIEQAMDYANKVFERMRKNDVISWTALISGYVQSGVQENKVMVLFGEMLNESIKPNHITYSSILKACANISDHDSGRQVHAHVIKSNQAAAHTVGNALVSMYAESGCMEEARRVFNQLYERSMISCITEGRDAPLDHRIGRMDMGISSSTFASLISAAASVGMLTKGQQLHAMTLKAGFGSDRFVSNSLVSMYSRCGYLEDACRSFNELKDRNVISWTSMISGLAKHGYAERALSLFHDMILTGVKPNDVTYIAVLSACSHVGLVREGKEYFRSMQRDHGLIPRMEHYACMVDLLARSGLVKEALEFINEMPLKADALVWKTLLGACRSHDNIEVGEIAAKNVIELEPRDPAPYVLLSNLYADAGLWDEVARIRSAMRDNNLNKETGLSWMEVENTTHEFRAGDTSHPRAQDIYGKLDTLVGEIKGMGYVPDTSIVLHDMSDELKEQYLLQHSEKIAVAFGLITTSAPKPIRXLRTSVFVLIVILQSNICPRPPEER

SEQ ID NO: 116063 - protein, 323 aa, Oryza sativa
  unsure (1)..(323): unsure at all Xaa locations
  Clone ID: PAT_MRT4530_195C.1.pep
MASSQEFEANDPQQPSARPKGLYQVRKGSKIFLCGVRPRIGSDVASLPLSILLILRVATVYSYQIDSATDRSENRLQRAAHPIIIITSEQNLFLLFITSAFVPVIXQGIIXAPPGIVEFLGSTTQLMKWSSGRSPRIWFRTTXYDIVNGFTVKVKICENFLKXRPQRASRCSIGAKWVEDFCKYYQWVGLYLGIMMSCYFFMCEMTWNFLCIFVFIFSWVNVYYERGYNGGSIWKALRKEVYSFVLIIYTFIVVWFVGGLTVFHLYLISTNQTTYENFRYHYNKDNPYRKSIAANFVDVFFTKIPPPQNNFRSWVGEGALEAG

SEQ ID NO: 116064 - protein, 97 aa, Oryza sativa
  unsure (1)..(97): unsure at all Xaa locations
  Clone ID: PAT_MRT4530_19600C.1.pep
RTRAPDLIRAIFKLVWSPAAKRXRRRRRCALLGHRGRAFPETSRRNRSATANASALKVSCELLLIFVTEAVQRSAFIAEAEGTTTIEXTHLERGLPQ

SEQ ID NO: 116065 - protein, 87 aa, Oryza sativa
  Clone ID: PAT_MRT4530_19601C.1.pep
MSMAMWGGAVAAAAAAAAAAFEPSLEEEAAIGTMESTAGTMLPPASTVVGRSSEREYGSKQLSESDIEANSSILTRVGVSEIPAFII

SEQ ID NO: 116066 - protein, 135 aa, Oryza sativa
  Clone ID: PAT_MRT4530_19602C.1.pep
VRATGCFAWRVVFPSGVLVWLIEVQSPPPALGFVVGFVLWPGPVQMVGFGPSLACPRVPVPFPFRFRSSIGFVWFGLVQGFVGSGLGSPPFALFWSFHCIVFWVKLPGLVSRCLRFFVWFPFLFLYHRWVVPPPG

SEQ ID NO: 116067 - protein, 81 aa, Oryza sativa
  Clone ID: PAT_MRT4530_19603C.1.pep
FFFFSKEHGILFIMTINTTSTRPHVTQAALHTLRTHRPLSIHPQVCTIIHHQGSSHITLHTNASINTIATAMPFHQQTQPA

SEQ ID NO: 116068 - protein, 89 aa, Oryza sativa
  Clone ID: PAT_MRT4530_19604C.1.pep
VVFCDDTASSAGALGYHKAIANPKLTDTTDKMGRKPYRSVDLRGSSRAREGHFAELWLTPERCPGGSTMAPRRTRPPNRTERAAGTHTL

SEQ ID NO: 116069 - protein, 65 aa, Oryza sativa
  unsure (1)..(65): unsure at all Xaa locations
  Clone ID: PAT_MRT4530_19605C.1.pep
WKVVTLLNSIIQLTLVLSLHAEQGDIYFIYNLSFVRTCDRLWCGNTGFLXNSGHQSQSILDFFLL

SEQ ID NO: 116070 - protein, 72 aa, Oryza sativa
  Clone ID: PAT_MRT4530_19606C.1.pep
QNILEYMVSQPRWLHFTGVWHTIRHSFTTQGHTPTQAMVIQWSHLVPHPQGGTHQAQGGGYPTHITTHRGPA

SEQ ID NO: 116071 - protein, 63 aa, Oryza sativa
  unsure (1)..(63): unsure at all Xaa locations
  Clone ID: PAT_MRT4530_19607C.1.pep
LHNSHXIQMDLEXYXGLKTLRTKVYTTHPIRLHPTQHNVSHRGLFGANKTVKITSRKYCGPQK

SEQ ID NO: 116072 - protein, 123 aa, Oryza sativa
  Clone ID: PAT_MRT4530_19608C.1.pep
ISFRPKPNQTLRFFNGSRAGAFPEVGDWGPSNLGNLKTTTSYPAWPLLWLTGNNNLRPFKDHGKKQPGWGDRIFKRRMQLGMVWKKRKKMGEWKNQNQMGFSTSIQVAMVKWKQWLTYLGIIA

SEQ ID NO: 116073 - protein, 218 aa, Oryza sativa
  unsure (1)..(218): unsure at all Xaa locations
  Clone ID: PAT_MRT4530_19609C.1.pep
HEGPEVSLISRSAFEGSMAGKKCSGASMAALGSAMLTLASAGVVPRQSPSSNPFAPIDPQNWVNPDNMTWDDYVAPPTTNWADPSRKGKDRNFNIAMITVDYPDSPFVVTLPANSDIFGNPQPLAAGLKREDIPEFYHDLLNVPXEINQGHTLHEYCMGDSFGKYGVDLTVFGPYRMPSRSXQYGIDDEEGGFNEGACPKGPPCSVDLRTDALGAWRA

SEQ ID NO: 116074 - protein, 35 aa, Oryza sativa
  Clone ID: PAT_MRT4530_1960C.1.pep
CCIHGLPFVSYKSLMCLKHVINFPSNIRGPNSIFV

SEQ ID NO: 116075 - protein, 583 aa, Oryza sativa
  Clone ID: PAT_MRT4530_19610C.1.pep
MARPGCRRRRRRPGAGGGVDGQARAAAATRRGQRSRRLGAAVATARRGRWHRRPGATWAGDGVGQGTGGGCEGQARAAKARPSAGGGGSPRRRCPSTDREGERRRLGMPIGAISTVGPAISPGIKIAEIAESFVARKYRRLRDYRKDVAQLVGEVGKIAVAVDTVEEQEQFMSDRRIVGQLSELMDAIHEAEDILDAVDYRDSIWARKHKVRQVIHSIVEQAKRIVGIDGALNRLDKSMNDLPRMQQNQRDLVQLSNFRSSQGGGDGGASASRPRSATGLLPDGKLYGYKEEYDRLVSALLYDPPRRPGGNGNGGGQVVAVVGDGGVGKTALAQHALRHVDVQARFDHVIWASVPHKYRNKDLLAEIWMSGPGATATAATHRCADQMSFGALQAEFVRLVSLSSQRYLLVLDDVCNDESDDDDHQRSRKEWEDVLAPFKQGGTREHMISFTLDIRADAVHLLHEDFLHPDHIKAIGSIRIEHYTWSTEPNLNLLASVRSLSLTRCPVTDRSLSMCLHKLQSLERLEISDCPELHDFPDDAMPMMASLKSLEFNGCHPLLMKKLQGRTGAAWERIRSIQRLEIV

SEQ ID NO: 116076 - protein, 40 aa, Oryza sativa
  Clone ID: PAT_MRT4530_19611C.1.pep
MDWAAAEYTVAALVCAAADTVFALVHIYRHLLHYAEPIYQ

SEQ ID NO: 116077 - protein, 211 aa, Oryza sativa
  Clone ID: PAT_MRT4530_19612C.1.pep
MCDLVARTGRHQQRYEDGRRLVAGCIPFRYRTSNDETSDDEPKKIVEVLMINSQSGPGLLFPKGGWENDETVEQAAAREAVEEAGVRGDIVQFLGFYDFKSKTHQDACCPEGMCRAAVFALHVKEELDSWPEQSTRRRTWLTVPEATSQCRYQWMQEALLTGFSDGHDNWSKGAGGDTNYDSPLVAEGIHRSSGFVYLLLTLPRLQLCRMQ

SEQ ID NO: 116078 - protein, 140 aa, Oryza sativa
  Clone ID: PAT_MRT4530_19613C.1.pep
GGWENDETVEQAAAREAVEEAGVRGDIVACQVSETYLHVFFSYITVKLQFLGFYDFKSKTHQDACCPEGMCRAAVFALHVKEELDSWPEQSTRRRTWLTVPEATSQCRYQWMQEALLTGFSDWHDNWSKGGGGDTNYDSL

SEQ ID NO: 116079 - protein, 279 aa, Oryza sativa
  Clone ID: PAT_MRT4530_19614C.1.pep
MQGANMLLDEPVRLTSVLTPVKPKVFPSLTKIVGTLGPNSHSVEVIQECLTAGMAVARFDFSWMDASYHQETLNNLRKAAQNVNKLCPVMLDTLGPEIQVHNSTGGPIELKAGNHVTITPDLSKAPSSEILPIKFGGLAKAVKKGDTLFIGQYLFTGSETTSSWLEVVETSGENVECLVTNTATLAGPMFTLHVSKAHVSLPTLSDYDKEVISTWGLHNSVDIISLSHTRSAEDVRELRSFLQSHGLQGTEPTKWLAYGENSGKFDEICKRCLRVDISR

SEQ ID NO: 116080 - protein, 212 aa, Oryza sativa
  unsure (1)..(212): unsure at all Xaa locations
  Clone ID: PAT_MRT4530_19615C.1.pep
MGQGASCGRPIEEVDFFGAAHSGDLARLAAAGRWRPSLLCRTTLFDRLSALHIAAAHGHLQVVSMALDLCVHPDVVNRHKQTALMLAAMHGRTECVRRLLDAGANIVMFDSSHGRTCLHYAAYYGHADCLRAILSAAQSAPVSQSWGFARFVNVRDDTGATPLHLAARQGWRRCVHVLLEXGAIVSASSSAFGFPGSTPLHLAARGGSLDCV

SEQ ID NO: 116081 - protein, 92 aa, Oryza sativa
  Clone ID: PAT_MRT4530_19616C.1.pep
FHQAIDKSDGAAPWFSKTLTTAACPHCTSIDKPNPNNSLKLLDLQQIPIPKLTKINVGRRITSQGARCTDVNGFFVSFGIDPKDRLAWGSSR

SEQ ID NO: 116082 - protein, 81 aa, Oryza sativa
  Clone ID: PAT_MRT4530_19617C.1.pep
KIECNPTHSLLQLGEVHSNIKTPVGVKRHKFQAKRLALQKKARALAQGHGTTNQREARTTNSTKSTNVDRINWPGSTSQRL

SEQ ID NO: 116083 - protein, 41 aa, Oryza sativa
  Clone ID: PAT_MRT4530_19618C.1.pep
DLTACYLYTYRLTAYLYIHNQMVYDWPLYQCLKIANLLPES

SEQ ID NO: 116084 - protein, 161 aa, Oryza sativa
  Clone ID: PAT_MRT4530_19619C.1.pep
MGDIVIIIGCDTAIDWINDIIIFINILPCLFGYAYSAVVDGLLHHHTRDDRSPFHTLAAGHGAHHVAVAAAASPPPRRRRRHRGRIAPAGARRGAAAAPAGAAVLLLLAPAAVVARGRRRYRRGRALAADQPRAAGGAVQLRDDDGAGGALAAGCLQLQRA

SEQ ID NO: 116085 - protein, 131 aa, Oryza sativa
  Clone ID: PAT_MRT4530_1961C.1.pep
MVPARVAIAHSLVSVYGMLGDMRRLRTRPTTEAEIRRFHLPEYVNLIRNLTPKSYTNDVVLRQKAEDDHGIGLLGDDNDCPAFDRLWKYCRGYAGGSLAAARTLVNGASGSHRRRIVMFLFPFRSHIAPML

SEQ ID NO: 116086 - protein, 96 aa, Oryza sativa
  unsure (1)..(96): unsure at all Xaa locations
  Clone ID: PAT_MRT4530_19620C.1.pep
HHRSSALRFSRRLAAARRGALIHXLLPLPPPAARSRRRIAPGWAPTKTSCSTTRSTTTTAATGSVAXAGAGALEDEEFGGRGSXGXAVRPTRSSPR

SEQ ID NO: 116087 - protein, 103 aa, Oryza sativa
  Clone ID: PAT_MRT4530_19621C.1.pep
MANRLAATAPSPPPPRSFVARLFPVTIGVRAHAAHRECVPGGAAEAAGEPGIGEVASEPYSSPWRATNAVSGVLMEILATRVISAVVMLREFAASASPALINM

SEQ ID NO: 116088 - protein, 58 aa, Oryza sativa
  Clone ID: PAT_MRT4530_19622C.1.pep
MNQEEDVDAHQDPLLCSARRMEIGASSPVQPRLVRRPRDGRFLVLLRRREGGEDTRVN

SEQ ID NO: 116089 - protein, 64 aa, Oryza sativa
  Clone ID: PAT_MRT4530_19623C.1.pep
MGWLILVPSEVVVIYAHSSFVWDVSLGGKDTGDFDVSYYYPAKGGEGNESARLVAFSWELAKHE

SEQ ID NO: 116090 - protein, 55 aa, Oryza sativa
  Clone ID: PAT_MRT4530_19624C.1.pep
RRRQPKSALCRIDRSFRTSAAYISTTPSARTGAGHRSTTIRRQLFLLLKIKVWLH

SEQ ID NO: 116091 - protein, 476 aa, Oryza sativa
  Clone ID: PAT_MRT4530_19625C.1.pep
NGNRGKVGAEASLEQWLTSSLPSLTTGESRFGVTFDWDVDKLGVPGAIIVKNHHSNEFFLKTITLDDVPGRAGAVVFLANSWVYPADKYRYDRVFFANDAYLPSQMPAALKPYRDDELRNLRGDDQQGPYEEHDRVYRYDVYNDLGSPDSGNPRPILGGSPDTPYPRRGRTGRKPTTTRLSLVEQIYVPRDERFGHLKMADFLGYSIKAIAEGIVPAIRTYVDTTPGEFDSFQDILDLYEGGLKLPDVPALEELRKRFPLQLVKDLLPAAGDYILKLPMPQIIKQDKEAWRTDEEFAREVLAGVNPMMITRLTALDSNRLYILDHHDRFMPFLIDVNGLEGNFIYATRTLFFLRGDGTLAPLAIELSEPMIQGDVTAAKSTVYTPASTGVEAWVWQLAKAYVAVNDSGWHQLISHWLNTHAVMEPFVIATNRQLSVTHPVHKLLSPHYRDTMTINALARQTLINAGGIFEMTVFPA

SEQ ID NO: 116092 - protein, 63 aa, Oryza sativa
  Clone ID: PAT_MRT4530_19626C.1.pep
MGNRRSVVDYCALTENYTFTASQQAMASGPHTQRGEPVWIKRGPTPRLMEQARREAADKTYCT

SEQ ID NO: 116093 - protein, 866 aa, Oryza sativa
  Clone ID: PAT_MRT4530_19627C.1.pep
MLGGIIDTITGSSKQSRLKGTVVLMRKNVLDLNDFGATVIDGLGEFLGKGVTCQLISSTAVDPNNGNRGKVGAEASLEQWLTSSLPSLTTGESRFGVTFDWDVDKLGVPGAIIVKNHHSNEFFLKTITLDDVPGRAGAVVFLANSWVYPADKYRYDRVFFANDAYLPSQMPAALKPYRDDELRNLRGDDQQGPYEEHDRVYRYDVYNDLGSPDSGNPRPILGGSPDTPYPRRGRTGRKPTTTDPDSESRLSLVEQIYVPRDERFGHLKMADFLGYSIKAIAEGIVPAIRTYVDTTPGEFDSFQDILDLYEGGLKLPDVPALEELRKRFPLQLVKDLLPAAGDYILKLPMPQIIKQDKEAWRTDEEFAREVLAGVNPMMITRLTEFPPKSSLDPSKFGDHTSMITAAHIGSNLEGLTVQQALDSNRLYILDHHDRFMPFLIDVNGLEGNFIYATRTLFFLRGDGTLAPLAIELSEPMIQGDVTAAKSTVYTPASTGVEAWVWQLAKAYVAVNDSGWHQLISHWLNTHAVMEPFVIATNRQLSVTHPVHKLLSPHYRDTMTINALARQTLINAGGIFEMTVFPGKYALWMSSMVYKNWNFTEQGLPADLIKRGVAVEDATSPYKVRLLIKDYPYAADGLEIWHAIEQWVGEYLAIYYTDDGVLRGDAELQAWWAEVREVGHGDLKGAAWWPRMDAVSELRDACTTIIWIASALHAAVNFGQYPYAGYLPNRPTVSRRRMPEPGTEAYGELGRDPERAFIRTITSQLQTIIGISLIEVLSKHSSDEVYLGQRDTPAWTSDARALEAFRRFSDRLVEIEGKVVGMNGDAGLKNRNGPAEFPYMLLYPNTSDVTGAAAGITAKGIPNSISI

SEQ ID NO: 116094 - protein, 184 aa, Oryza sativa
  Clone ID: PAT_MRT4530_19628C.1.pep
MLSDNYHAFPSRWGLCGHSGFAGTPTRPGAHWRRTYSQQVYSPFLVAFAHEDERSWKSNNIAKASTVEGNYSLPDNVAIITLQSLDDGTTLLRLAHLFQAQEDTQYSVMAKVELRKLFGKRIIKDLTETSLSANQKKSEMKKLNWRVTGESKTDPAPLKGGPVDSHALVVELGPMEIRTFLLKF

SEQ ID NO: 116095 - protein, 40 aa, Oryza sativa
  Clone ID: PAT_MRT4530_19629C.1.pep
ITRKSLNIHFIVEDQRNKMPYRFLQKVFPNKNLNFLKISR

SEQ ID NO: 116096 - protein, 109 aa, Oryza sativa
  Clone ID: PAT_MRT4530_1962C.1.pep
MAGKLYQLMSRMHLARSRSSSSSAATAAAAAADVPRGHFAVYVGERRKRFVIPTAYLKHPSFVLLLKRVEEEFGFDCHRCGGLTIPCATEGDFASFVAEAIASDDHHHH

SEQ ID NO: 116097 - protein, 70 aa, Oryza sativa
  Clone ID: PAT_MRT4530_19630C.1.pep
MAAATKPRAPGARTRRFRRITPAAEAQTTSSGAGCNKNSSPIVIWEGPKGIFSDVADGCLLCHNGRHRGR

SEQ ID NO: 116098 - protein, 165 aa, Oryza sativa
  Clone ID: PAT_MRT4530_19631C.1.pep
MEIAYDLVTHGAHTSIVVRSPIHIMTKELIWYGMTMVQNLGLNVTAVDSLLVMAANFYFETCQNMVFQGISKINTNSVEFHGGRQNSFDAIVFATGYKSTVNAWLKNGESMFKDDGFPKNYFPNHWRGENGLYCAGFARRGLAGIAMDAKNIANDIVAAMDKMSC

SEQ ID NO: 116099 - protein, 74 aa, Oryza sativa
  Clone ID: PAT_MRT4530_19632C.1.pep
SIQGTTGTISLLAPFSSELVIYTKKKVFKNVYHKIAKTNCCTNSWRHIRIKQTYKSKQYIVKGCDHDYSSCTIS

SEQ ID NO: 116100 - protein, 67 aa, Oryza sativa
  Clone ID: PAT_MRT4530_19633C.1.pep
QLLCQKTPSRSRSASILLTTFITCSTLPYTDCLRSLNLGNNLGGTETLQFGLPISSGIGLNIGIVGE

SEQ ID NO: 116101 - protein, 61 aa, Oryza sativa
  Clone ID: PAT_MRT4530_19634C.1.pep
MTTAPTTTTGDATTAPTRQLGSSLAGGARGEAAAAPVLRRQLPDRSGGPLGSVNIFAIHHP

SEQ ID NO: 116102 - protein, 79 aa, Oryza sativa
  Clone ID: PAT_MRT4530_19635C.1.pep
MSSVVNKLTNAAERESSEAETLIAVKQLEAAALELVASCEDCTCYADAIRKVPGAYQPSNQIFSFCVELKAICVVQCGL

SEQ ID NO: 116103 - protein, 159 aa, Oryza sativa
  Clone ID: PAT_MRT4530_19636C.1.pep
MSSVVNKLTNAAERESSEAETLIAEIRKAIGEMKSIAVDYERENKSDKVKQLEAAALELVASCEDCTCYADAIRKVPGAYQPSNQMTDFEKLIEAEVNKVKGNSSTSVENHLLIRQFREAVWNVHHAGQPMPGDEQEDVLMTSTQTSIFNVTCPLTGKP

SEQ ID NO: 116104 - protein, 90 aa, Oryza sativa
  unsure (1)..(90): unsure at all Xaa locations
  Clone ID: PAT_MRT4530_19637C.1.pep
HARARSRXLAPLRXSCLALGGRARARAAQXLRAEHLSAAXAGAQPPXAAQQGATXQHRGSGPSPXLLSSPTNMXRIQCTXPCSPSIXRFV

SEQ ID NO: 116105 - protein, 758 aa, Oryza sativa
  Clone ID: PAT_MRT4530_19638C.1.pep
MDALAGRLAAASVSDHPSSSSAAATDGANADHLLHVMRAVEGAEATIRNQLEENNRLKEELMQKTRQLQRIREDAASQASSSGVAQDRRSFVATKMDASRSPASAASSDNSRTPSALHHNGAFESGEPSMQQTIRQNNALSNGASKRSSGEQPALDSAAVSQFSTPSSHSLSPTRHRKEGEHDPRLNLAGQGLLPASEMASNMSWKHDLTAKIKENEEEIAQLRKHLADYSLKQARILDDKYMLERRIAQMRMAFDQQQQDLIDAASKALSYRQDIIEENIRLAYAVQAAQQERTTFISSLLPLLSEYENLQPSVLDAQSIVSNLKVLFKHLQEQLIITEEKLKESRYQITPWQTELANDATLPVHSPTDPLGKALVTSNKSNLDIVTQTPYPHIQSPMSSPVQVRGDWGVAGNKNRRVIPTDVPPRNVDHGDMGRNSLSSRRDVSSQVSQHDPHSVPLDFEPENQNPPFKHLSRSDVSDASEGAEVQHAREHSAHWGHGDSVNLVSGIEDTNPSYPYLPTVLEEPGSSFSEAAEDDPLPGIEGLRITGEAFPGRELQASGYSTNGTTSCNFEWVRHLEDGSVNFIEGARQPNYLVTADDVDTLLAIEVQPLDDRKRKGEIVRFYANDQRKITCDPETKELIKRTLETGHVSYEVQLPVKFLDMWEPAILAIKREGYSIKCTGQRGVVLTEKFQQATSINIPYGRPTEFLITSADGVEYNLKPAENALPRDTIVLVLRLFRIMAVEKRRGRKKSLFFK

SEQ ID NO: 116106 - protein, 57 aa, Oryza sativa
  Clone ID: PAT_MRT4530_19639C.1.pep
VKMILRRKYYFCCPLEPRENGHCYACRNQGMDDLRHPATGGFEMGSPDTVFPYMYTD

SEQ ID NO: 116107 - protein, 284 aa, Oryza sativa
  Clone ID: PAT_MRT4530_1963C.1.pep
MAAAAAKLPRLTTSAALFPTPRPFGSPRPAKARPMPPPPPITISMDPAAVDPAHLQALMLACAHSCAIRPSPPSAAEDPVDLRKLRVALAHSFLVVSVFCSARFLDDGDGGVDGDGRRRLLGLGLGLGRREDRRLVGFGRAVSDVGLTASVHDVVVHPSLQRRGIGRQIVERMTRVLHNRGIFDISALCTEKERYLVKQDKRIAFKIHEHASSESLVFSCNLQANAFSSSLCVAVTVNIAFCVAVNIDLLGRPESQMDGIMAVWHLTISTRYRQNLTPKKEVST

SEQ ID NO: 116108 - protein, 46 aa, Oryza sativa
  Clone ID: PAT_MRT4530_19640C.1.pep
VFGYKLDEQYVTMVLEPELVILFNGTYFIFKLSMVLLYKFSTTDGC

SEQ ID NO: 116109 - protein, 162 aa, Oryza sativa
  Clone ID: PAT_MRT4530_19641C.1.pep
GVTRLPRKTHRGLRKVACIGAWHPAAVQWSVPRAGQNGYHHRTEMNKKIYRIGKGARQEGGKTINNNASTEFDLTEKNITPLGGFPHYGVVNEDYIMIKGCCVGPKKRVITLRKALLPQTKRWQLENVALKFIDTSSKFGHGRFQTPAEKSKFMGQRKKDKS

SEQ ID NO: 116110 - protein, 100 aa, Oryza sativa
  unsure (1)..(100): unsure at all Xaa locations
  Clone ID: PAT_MRT4530_19642C.1.pep
NISCTAAHAGSNRSLSPCGEFVRQQWQHSGNPLACQSPVFQLRNCQVMQQQCXQQLRMXAQQSHSRPFSQCFRRLCSSVQLQQVCVAVVLSSQAQAQAQA

SEQ ID NO: 116111 - protein, 408 aa, Oryza sativa
  Clone ID: PAT_MRT4530_19643C.1.pep
MAREKRGADRSPALGRMVVVEDFIHCGFLPPPSEFLLLILNFYGLTLLHLNPSSIAFLSIFAHLCEAYIGVVPFLDLFRFFYELHWMETGRVSGCCGFRLHDGMKARYIPFQCHTSRTKWRSKWFYLELEELDPVLVVPEDQPKRQECWTSKPLLTPSLEAFLNVIGGLREQGLTEYDVARDFIARRIQSLQARAHPAFDFEGDLDVTRISSRGTCSRVAVFVFSLIAISCSRFDPSSPFSLRFRSFRRCRDAADVLISPVSATDELPTPLCYKSAADKVDAINGNGGEILIFHLTQDTGRLPPPPKRRIIKRAASRCFDAEDVQQGGRPDIVTTDLALLSEAPASDVVGDIVVLDNTNVISDPSGLGACFAPPRELKWVALGFSHSPDICPHGRISLNPCLFQTSRA

SEQ ID NO: 116112 - protein, 73 aa, Oryza sativa
  Clone ID: PAT_MRT4530_19644C.1.pep
HDVAYTKRSDAGERSRELSSIRGVLGGIANAYGGCSEARWNIIRGGGFVIGVAVGVLHIGPRLGFSHRDQAHL

SEQ ID NO: 116113 - protein, 104 aa, Oryza sativa
  Clone ID: PAT_MRT4530_19645C.1.pep
MAVGLRRPLAKMCFRWRPVTPDPRHFLRWRLPFLSGGPAGGGATRGGSQRRAAGRRPAGSRVAEGGGATAGEAAPGGGRRQSAGPRRQPAAGGAVPVVRGDRQR

SEQ ID NO: 116114 - protein, 393 aa, Oryza sativa
  Clone ID: PAT_MRT4530_19646C.1.pep
MSVITVVVVVGVVLALAAAASVMAAEYSVVDYGARAGGRADAAGAFLAAWAAACGDDGERPVMRVPAGTFLVGRAYFRGPCRSAGGVVLAIDGTVVAPPAVGNASWITFHYAHGLAIRGGTLDGNGHAFWACKAAAGRRCPPGTTTLDISQSNNVSVKRVTLVDSKNVHVSIFDCAGVTLQGVRIAAPADSPNTDGIHVALSRDVAVLSATVRTGDDCVSVGPGTSGVAIRNIRCGPGHGISIGSLGGRAGEGEVRNVTVESASLAGTQNGLRIKTWGKPFAGRVSGVRFANVAMRDVQNPIVVDQNYCPGNVNCPGQSSGVKISDVEYEGITGTSATAVAVRFDCSGSNPCTGIRLRNINLTYDGGGGKPARSFCKNAGGSASGVVIPPSCL

SEQ ID NO: 116115 - protein, 105 aa, Oryza sativa
  unsure (1)..(105): unsure at all Xaa locations
  Clone ID: PAT_MRT4530_19647C.1.pep
RCWMTDWLSKRGLPHPALSVLYDQQEETIDHIETXSHQFWQLILIAIGHPCFFAKKKTFFLSWWCECKKKVSGXLHRGFDTIVTLATWLIXKERNNRVFNQWQQT

SEQ ID NO: 116116 - protein, 216 aa, Oryza sativa
  Clone ID: PAT_MRT4530_19648C.1.pep
MAAAVDGAVQQRRRAPPTAKGGGVQATGGRLNHHPLPPLLEVCCPGLSSGRGRIGMWLLVQRKLRSGVSATRRSAGGGGGDEEERRRGGSDRPRCPPLERLTASSSNFPAWIRGKRMAAPDGGGVLTHRRSIARPLVSSVVGCPTASLVAPSLLSLWRFLRCPVANPRFTAVGCPDCLCRRAALLHLCTTAQSHQHTSNPPSQQAQDAQHSCTPHL

SEQ ID NO: 116117 - protein, 470 aa, Oryza sativa
  Clone ID: PAT_MRT4530_19649C.1.pep
MTPPPSPAVEGGAAAAGHGGRRRHVLLFPLPYQGHINPMLRLAGVLRARGFAVTVFHTHFNAPDAARHPEHRFVAVPDGMSGRPPPVSVGDVVKHIRALNAACEAAFRDRLAAVLAEYSRDAVACLVADAHLLRMVEVARRLAVPTLVLRTGSAACFASFLAYPLLCDRGYLPSQLDMPVSELPPYRVRDLMHIGRDGHELMCELLARAVAAVKLSSGLILNTFDALEAHELAKLRRDLAVPVFDIGPLHRFSPAADGSLLHQDRSCLAWLDAQTAESVLYVSFGSLASMGARELVETAWGIAGSGVPFLWVVRPGLVRGRRAAPGEPTRLLPEGFEAATRRRGVVVAWAPQEEVLRHRAVGGFWTHNGWNSTTESLAEGVPMLCRPSFGDQMGNARYVEHVWKAGFEVVGGELERGAVEEAIRRLMAESDGGEMRARARELKKAAAECTGKAGSSETAIVKMVTHMLSL

SEQ ID NO: 116118 - protein, 109 aa, Oryza sativa
  unsure (1)..(109): unsure at all Xaa locations
  Clone ID: PAT_MRT4530_1964C.1.pep
AHGAGDDKDYKEPXPSPXFEPGELKSRAXYRAGIAXEFVDTFLLLYITILTVXGVCKIYSKCVIVANQSIGXSLGSIILGLGXCTAGISGXHINPQHTFGLLLNHEACP

SEQ ID NO: 116119 - protein, 126 aa, Oryza sativa
  Clone ID: PAT_MRT4530_19650C.1.pep
MAAAVDGAVQQRRRAPPTAKGGGVQATGGRLNHHPLPPLLEVCCPGLSSGRGRIGMWLLVQRKLRSGVSATRRSAGGGGGDEEERRRGGSDRPRCPPLERLTASSSVRRNRSQAIPSRRCRRVRAT

SEQ ID NO: 116120 - protein, 112 aa, Oryza sativa
  unsure (1)..(112): unsure at all Xaa locations
  Clone ID: PAT_MRT4530_19651C.1.pep
RPRSDGGGRARPARTSGSSRLSGHGARRRGSTQRRRXGGDRPAAEGGGVLAMRTALAAAKWLGGGMVAKRRGRERXGEEVSHGRRLTTASDGGXXQQRDELRNHLANMMKGV

SEQ ID NO: 116121 - protein, 99 aa, Oryza sativa
  Clone ID: PAT_MRT4530_19652C.1.pep
YNIQHYVQEEKKDVVSNHVASTSIQYHLQVPQSSKVPNAHERRFSLPDPIYNGFANNPFLIKAENAHMYFALVRYLMYKFLCKNLLEWTKSTGRVGARV

SEQ ID NO: 116122 - protein, 52 aa, Oryza sativa
  Clone ID: PAT_MRT4530_19653C.1.pep
CAHPGLACCGRYSRRRGACSLVEDGEGVVGGELEEREPWRRRRRRPRTSSSV

SEQ ID NO: 116123 - protein, 215 aa, Oryza sativa
  Clone ID: PAT_MRT4530_19654C.1.pep
MPSPDAAAGDIESALDDFARADADCIAAALACGRTSFSYRRLPEPRRLRLTVRKLDDSYFDVQIARSAAVWELKAAIEDVFAALYDETDNKAISWQHVWSHFCLCFKDEKLTDDKATLRAFGIRDGDEVHFAQHLSVEYRPCKSLSLRRSRTSLDDFSARSRSLLDDLGEDDGDKFIDTRHSTSVLEEGLYVYQHDEERMEESRKKGGFFSAMLG

SEQ ID NO: 116124 - protein, 295 aa, Oryza sativa
  unsure (1)..(295): unsure at all Xaa locations
  Clone ID: PAT_MRT4530_19655C.1.pep
KGKRDLLRQRLGFXAVDQAHGSGSREQTAEIDXSKTNGRDQPIHGRATADGHDDVSGDVISGGGSGALARRRTTAQGRERRAPARRERRGELTDDQEKGGGTLRLDDGDSAPAVFSDGEGADEDGGDLATTMATSXRATTTTGTAAAHGWSDGDDSGSRSHGARALPTARDEGEGGGGGXKAAAKAHGDRRRKGKMRIRRKETNPTRDRIHGFPNDFSRRFQKRKGRGDLGKHFPSIDFTGEGKARWDPPVSDRTHARGGCGLGRLGRLGXREREKVLGRLSAQSQKRLLKTFFQ

SEQ ID NO: 116125 - protein, 58 aa, Oryza sativa
  Clone ID: PAT_MRT4530_19656C.1.pep
NGCRACQYARESIDSVCIHSQPVCIVYQQVALTMQSISSASRGGRLHDKIDHSFHPIS

SEQ ID NO: 116126 - protein, 63 aa, Oryza sativa
  unsure (1)..(63): unsure at all Xaa locations
  Clone ID: PAT_MRT4530_19657C.1.pep
LARPVNTADTNAQKMCSIHEAPAPLGCCQPALYPGSLKSLTXPSVEAILMWPASPRSPGSPAS

SEQ ID NO: 116127 - protein, 292 aa, Oryza sativa
  unsure (1)..(292): unsure at all Xaa locations
  Clone ID: PAT_MRT4530_19658C.1.pep
KGKRDLLRQRLGFXAVDQAHGSGSRERTAEIDPSKTDGRDRSIHGGSRQTDPDDVSGDVISGGGSGALARRRTTAQGRERRAPARRERRGELTDDQEKGGDTLRLDDGDGAPVVFSDGEGADEDGGDLATTMATSXRATTTTGTAAAHGWSDGDDGGSRSHGDRALPTARDEGEGGGGGXKAAAKAHGDRRRKGKMRIRRKETNPTRDRIHGFPNDFSRRFQKRKGRGDLGKHFPSIDFTGEGKARWDPPVSDRTHARGGCGLGRLGXREREKVLGRLSAQSQKRLLKTFFN

SEQ ID NO: 116128 - protein, 267 aa, Oryza sativa
  unsure (1)..(267): unsure at all Xaa locations
  Clone ID: PAT_MRT4530_19659C.1.pep
MDSPATPVGLSPPLLSLVPRNEPCYTKAVHGNGRPRSIHPKRTAEIDRVYGGSRKNDDDDVGDDVTTGDGXGGSSAHARWRTTARRCKRRTPKRCGHRGELTGDQSNGGGATNDVGDEVEAAEKVGSTAATRRRRGGRGRRRLGDHDGDLPERRRRPERRRRTAGAAATTAARGFTALGRSRRRETKARVAAGRGDTGDPFIGARRRRRRPTATGNAKERXGSGGKRRIRLEIESTDFQTILAGDSKREKIEEIPKIPCLFSFSMRM

SEQ ID NO: 116129 - protein, 306 aa, Oryza sativa
  unsure (1)..(306): unsure at all Xaa locations
  Clone ID: PAT_MRT4530_1965C.1.pep
ATGEEAAEAIGEGGVGGGEAAHGVGGLLVEELEEGDEAEALGETVGHRLPVPHGLSLPSSHAATVAGGGAERDRRGRSRVRPSGAEXCAAGDMELGAGGMVTRXRSWVAAGEGGRGRPSPRFSPSPLPHRLRVREAQEVGERGGRRRRRGQRRWRRGGCRRAGELEGVDGDVVAVVELDGTVDGAAGVGLAEAVEAVEDGPPLRPVDAGPASPHRPPHIHSPSCHRRSARVYASHGELGRDGAAVDDDDVVAAHLTEHVAGGGAGPXRPTGLLPLTSASLRHPRQWPPLLPPPPWINTPPIRQRAR

SEQ ID NO: 116130 - protein, 629 aa, Oryza sativa
  Clone ID: PAT_MRT4530_19660C.1.pep
MQVHNNLQKDKATSIDTLFGRLDQRRDDDDVRARQKAERIMALCRECGVTEATPHLWVAMFKLLKDRDAVNVFELSNPEGRKTLLEHLAREDVCPDPTDTSEEVSDKDLERIPVEYFMDDSADTAFMYVHDMRVFHDAMSIYSHVFPHPPPGKYYLVDLGYANRIGYLAPYKGTKSEYLRLVHDAPKYEGKLCKKACLLAYKEILKNEIGKSKALGRLIELVGPAERVKLTKVTKELHEAERHKWYNMRVVAGLLQLLPESEAPPNSPAFGTDSEKLALAPCDLEPLSSPSLQPCAAAVPVVVVARGGCHRGRQVTAVLVRPFAVAEDRRSTVAVVKSKSAAAFFLAPPPSVDLPPSFWSSVSSPRRSLRAGALRSRPCAVVRRRASAPEPPPEMTSPLTSSGGRRAPTGSVVVEEDATTDRGKEDSAADGETRIGRINPFPRRRRCQQARLSSDSTIPDAPLSLPLSPQSGYFGLKTSQSVVIHGAIRTPSAVLHSGSPRPALCCFYQRYGLYTSPSDMFAGVGTSTQGSQAGRAHTQPGLTIGRGFRTSPPDVFAGVGTSAHGLHRAVSGSAANPLIGPFIEGDLEDDDFEVDDDPVQDGLGSPLWKSEQEASLGTGVWRINDCKES

SEQ ID NO: 116131 - protein, 44 aa, Oryza sativa
  Clone ID: PAT_MRT4530_19661C.1.pep
MRTATRSSKGNKCAFQMCYSVGVLVYPTYIFFIYNNLIMIIMSY

SEQ ID NO: 116132 - protein, 106 aa, Oryza sativa
  unsure (1)..(106): unsure at all Xaa locations
  Clone ID: PAT_MRT4530_19662C.1.pep
MAESERWAWRGRAWXERGVAAEGVALEAEGVLAGAEGGVGGRVHDGDARDGVVEVDAGGAVAAPPPPPTTRAISASTDGVPDELRLRRRSYFLRLCSEEGIGNPSF

SEQ ID NO: 116133 - protein, 34 aa, Oryza sativa
  unsure (1)..(34): unsure at all Xaa locations
  Clone ID: PAT_MRT4530_19663C.1.pep
IEVEFVMSTPREWDRFMRFMKRXSQANGIQFVKK

SEQ ID NO: 116134 - protein, 261 aa, Oryza sativa
  Clone ID: PAT_MRT4530_19664C.1.pep
AAAAALLCSSISCVAVMDAATDTALRSRQDALRLEYHRDCPVPNPSHSISEIGRWKISGTSRYKFAHEEVPKNFEWWKAWQRQVASSAATCFVGGGGVAAADPFEAAASDPFEAEVAAAAVAASGSLRRGCVGCSGGGRGSGLVLLVVGAAVAWWWPRSRGSGGGWCVGSLGCEVVTGAMVPAMVTRWSSEPALWRLQRRGGHGVILAGDVQEHAPDMSDGHGTARNRGEVGAVVVNNADDVEHGLYRKEMNKYSVLGRQQ

SEQ ID NO: 116135 - protein, 184 aa, Oryza sativa
  Clone ID: PAT_MRT4530_19665C.1.pep
MTPPPRLLALLRCALRLPTLPRSRPPSSSHGPDPSSIPPIPPPPPPRRRWLHVVVVVARSRLAVHRAITDPAIPHTGLPHPDGPIPAARRRRRAGDDCRALRRRLPPPMPPHQGTSRMELFPRSRTLMLALMYHVVMGDDLDVRTGKPSLDMFLAEMRRFEVLPFFSLPLFVTGFDNFVWTLSL

SEQ ID NO: 116136 - protein, 360 aa, Oryza sativa
  unsure (1)..(360): unsure at all Xaa locations
  Clone ID: PAT_MRT4530_19666C.1.pep
MAAMATAPCFPATPGLPARGAVAARSRMAAGGSRSQRRRSSSGPKSPRSRRRAKSGRNPHHHHNHHRPVSFLLASLSRIVALVHQHPANMAAMATAPCFPATPGLPARGAVAARSRMAAGGSRSQRRRSSSGVFLCRSSTTGSSRMEDYNTAMKRMMRNPYEYHHDLGSEYSVVLGALVXMNTAIISESLIVGSQSRKPEDIDLLKAGEEVAFILCLHPDKDIEYWGIDFQTVVNRCKELGIKHIRRPPVDFDPDSLRTQLPKAVASLEWAISEGKGRVYVHCTAGLGRAPAVAIAYMFWFENMNLKTAYEKLTSKRPCGPNKRAIRAATYDLAKNDPHKESFDSLPEHAFEGIADSRGG

SEQ ID NO: 116137 - protein, 179 aa, Oryza sativa
  unsure (1)..(179): unsure at all Xaa locations
  Clone ID: PAT_MRT4530_19667C.1.pep
MTPPPRLLALLRCALRLPTLPRSRPPSSSHGPDPSSIPPIPPPPPPRRRWLHVVVVVARSRLAVHRAITDPAIPHTGLPHPDGPIPAARRRRRAGDDCRALRRRLPPPMPPHQGTSRMELFPRSRTXMAEYQWLLQQDVRTDKPSLDMFLAEMRRFEVLPYLQINMLTLPIHHTIPSEG

SEQ ID NO: 116138 - protein, 41 aa, Oryza sativa
  Clone ID: PAT_MRT4530_19668C.1.pep
GANFCKAPFSPFVTGKNGFQTNFLTRPWKLQSFFRFEQVIC

SEQ ID NO: 116139 - protein, 356 aa, Oryza sativa
  Clone ID: PAT_MRT4530_19669C.1.pep
MEIADLPIATSHRANLLAAGYSSLAALSAASPPRLARDLSIEVHEAEEILKVAVGANKSKGADGPSTSSVLKGVQNAWDMLSDEQSRRHINTGSADLNNILGGGIHCKEVTEIFDSGGVPGVGKTQLGIQLAINVQIPVEYGGLGGKAVYIDTEGSFMVERVYQIAEGCISDILEYFPHCHDKAPAGQEKLKPESFLADIYYFRICSYTEQIAVINYLEKFLGEHKDVRIVIIDSVTFHFRQDFDDMALRTRVLSGLSLKLMKLSKAYNLAVVLLNQVTTKFTEGSFQLTLALVIACDSWSHSCTNRLILYWNGNERYGFLDKSPSLPVASAPYAVTVKGVRDAVNSNSKRVRGLP

SEQ ID NO: 116140 - protein, 169 aa, Oryza sativa
  unsure (1)..(169): unsure at all Xaa locations
  Clone ID: PAT_MRT4530_1966C.1.pep
MARAAAAGAPPPGAGRVGWRLGLACLAYLALWRMGGELEGVDGDVVAVVELDGTVDGAAGVGLAEAVEAVEDGLVLADIEALERXESGPTGSPAHPPLRPVDAGPASPHRPPHIHSPSCHRRSARVYASHGELGRDGAAVDDDDVVAAHLTEHVAGGGAGPRPTGLLPL

SEQ ID NO: 116141 - protein, 116 aa, Oryza sativa
  Clone ID: PAT_MRT4530_19670C.1.pep
DDLSSTRVSRKRDCEDVGESSLKKCKVNPVEGAWDYDKGSSFLESDWFFGDDEFGLDSNEYKVDTIPLDQISEQPIEPNNNVVYITATQPHQHPMSMGSNCPVSVKFGAITRHYRE

SEQ ID NO: 116142 - protein, 114 aa, Oryza sativa
  unsure (1)..(114): unsure at all Xaa locations
  Clone ID: PAT_MRT4530_19671C.1.pep
TAPWXVENAEKIIWWVLHYLNKNWSKKIFTGGGGRFRALISPPNGRXPXKDAXGTTCPSPGXRVSTPWNRGQDRPSRKACPGVVSCADILALXARDVVSLXSLCTXNHFQKLSL

SEQ ID NO: 116143 - protein, 466 aa, Oryza sativa
  Clone ID: PAT_MRT4530_19672C.1.pep
MEAAISAIASDLMSRFMSFLIKKYTVTTVKDDKTKRMKELLLRVHAVVEEADGRCITNPKMLTQFKMLAEIMYRGYYMLDTINYKPPNDEEVRRLSTVSVSLKRSRTIFGTPRNPAIDNELETALNNLEAAVSNMNEFVVMPYDTYLYTDNFMFARHVEKQQIINILLQNPCHHSAPLVLPIIGGCRVGKKALISHVCNDERIRSYFSFILYISGDSMGRIEYAKLKKETSLIVCEYFTDIDEDDWINFYSTISQMTAGGSNVVIISRIENLARFGSVKAVRLNSLSKEVYNYLFKKLAFGSIDEKEDPKMASVANDLAVVLGGSLITANVIADLLRRNHDVHFWLHILQRFEGMVKNNLSKYGEHPKDIIEKEKPVDATRFVSSYPTRLHIMPPRVERDDLPNIGMPTIFFGDLIAGSVAIPNGDFEIVTWKSRIPPYTKYVSSGTSFVDDKNGFKTMRKRRSSS

SEQ ID NO: 116144 - protein, 169 aa, Oryza sativa
  Clone ID: PAT_MRT4530_19673C.1.pep
HASELMKLAKATVDEFFGIPVAVRDDLVQDLADGMEAIFLEYISFLTSCGSKQSYLPSLPPLTRCNQDSKIIRLWKKAATPCRAPVSSPRAHGHHQGQGGMASGGQNPRPSTSRGTQRLYVRLNTLHFILSHVHALDKSLSFFSRGRCSSSVVHPPPAVPLRPRARRGA

SEQ ID NO: 116145 - protein, 1458 aa, Oryza sativa
  Clone ID: PAT_MRT4530_19674C.1.pep
MADDEAAVLPPPPPLPPPCRPHRQLRPRGSRPTADTTPRTSQLVEVFEAALRGNTIAVLDTGSGKTMVAVMLAREHARRVRAGEAPRRIVVFLAPTVHLVHQQFEVIREYTDLDVMMCSGASRVGEWGADHWKEEVGRNEIVVMTPQILLDALRHAFLTMSAVSLLIFDECHRACGSHPYARIMKIYIVEDRNELESFSPPTTIVNKYYDAYMVDFDNLKSKLQIFSDEFDSLLVGLQESPSNKFKDTDNILETSRKSLSRYHGKILYSLNDLGPIITSEVVKIHIESVKPLCDSEDCIFSKASLCLHMSYFKEALSLIEEILPQGYGELMKSESGSEELTKRGYISSKVNTLINIFKSFGSSNEVLCLIFVDRIITAKAVERFMRGIVNFSCFSISYLTGGSTSKDALSPAVQRFTLDLFRAGKVNLLFTTDVTEEGVDVPNCSCVIRFDLPRTVCSYVQSRGRARRNNSEFILMIERGNLQQQEHIFRMIQTGYYVKNCALYRHPNALSYDLSIQGMYTYQVQSTGATITADCCVNLIRKYCEKLPKDRYFMPKPSFEVTIEDGLFKCTLTLPRNAAFQSIVGPLSSSSNLSKQLVSLEACKKLHQLGELNDHLVPLTEEPMDTDFTTADEKCISGPGTTKRKELHGTTCVLALSGTWIHDSENITLNTYRIDFLCDQEGENYAGFVLLMEPELDDDVAPSKMDLFLIPNKMVYTTVTPRGKVQLNKKQLGKGKLFQEFFFNGIFGRLFHGSRKSGAQRDFIFKKGHEIQWNTESMYLLLPLRDSSYIQDDLSIHWEAIESCAGAVEQLWSSYQGDENVIPVNCIPQKRRGGQEEIIHLANKSLHCSSIKDSVVLSLHTGRIYTVLDLILDTTAEDSFDEMYGSTGKPLLMEKEQIHARVPPELLIHLDILEAITTLRCCETFSLERLELLGDSVLKYVVGCDLFLRYPMKHEGQLSDMRSKAVCNATLHKHGIWRSLQGYVRDNAFDPRRWVAPGQISLRPFPCNCGIETAFVPSHRRYIRDDPSFFVGKPCDRGHRWMCSKTISDCVEALVGAYYVGGGIAAALWVMRWFGIDIKCDMKLLQEVKFNASHLCSLSKINDIEELEAKLKYNFSVKGLLLEAITHPSLQELGVDYCYQRLEFLGDSVLDLLLTRHLYATHTDVDPGELTDLRSALVSNENFAQAVVRNNIHSHLQHGSGILLEQITEYVRSNLECQGKESEFLQHTTCKVPKVLGDIMESIAGAVFIDTDFNVDMVWEIFEPLLSPLITPDKLALPPYRELLELCSHIGCFLNSKCTSKGEEVIIEMSLQLRDELLVAQGHDRNKKRAKAKAASRILADLKQQQGLSIKQCLSKAKQLDIVTSDLQFDLTSLCFHSKWRKVDLEVRFSSYARFCSGQCQNSNLWNKGSGLLLLWMGRQQQTSIALFRQSPCTYLTQQPLHFKCLERLKIRLRESTW

SEQ ID NO: 116146 - protein, 97 aa, Oryza sativa
  Clone ID: PAT_MRT4530_19675C.1.pep
KIRTKNTYRVIKRASRSEGTREPGTAEEKKKQRGKKGKKGGKQPDPDIKARALHYNVGENNPGHASRIRALPGRVVGHRGACKGARLQDRNDERNGG

SEQ ID NO: 116147 - protein, 644 aa, Oryza sativa
  Clone ID: PAT_MRT4530_19676C.1.pep
MASYRPYAPHPPPPQGGFPPQPPPMNPYGPPPPQQPAYGHMPPPQGAPPPFLAPPPPPPPGPPPPHQPQFNFGPGPPQQQQPPPPPQMYYQPPPPPPPYGVNSSQPPPPPPPPPSPPPWAPPPPPPSPTQPPPREAQLAPPPPREQQSKSALPRAETEEERRARKKREYEKQRAEDRKNQQMMRQSQATVLQKTQQVRAAQQPQSRHHQQPSGGSRPAVTATRPAAAPNAERFENRLKKPTTFLCKHKFRNELPDPSSQLKWLPLNKDKDRYTKYRITSLEKNYIPKMIVPEDLGIPLDLLDMSVYKYELSQIYVFLAAILIRRFFLAYLTYAQTIFSTPPVQPPMAPEDEELLRDDEVLTPVKKDGIRKKERPTDKGMSWLVKTQYISPLSTDAAKMSITEKQAKERRESREGRNTFLENINDREKQIKAIEDSFRAAKSRPVHQTKRGMEAEWVLPLLPDFDRYDDQFVMVNFDGDPTADSEQYNKLERSERDECESRAVMKSFLVNGSDPAKQEKFLAYMVPSPHELSKDLDDETEDIQYSWLREYHWEVRGDDKDDPTTYLVTFDDDGAKYLPLPTKLVLQKKKAKEGRSGDEIEHFPVPSRITENLKRQRSSVDDDLYDHPKHSRVEDMDQYSGDEYSD

SEQ ID NO: 116148 - protein, 118 aa, Oryza sativa
  unsure (1)..(118): unsure at all Xaa locations
  Clone ID: PAT_MRT4530_19677C.1.pep
MHRNPRSCCGPPASCCGPSSTSPPATKRRGSLLFCGARPSSSRRGAPTGAPSRRRASARDVDEVNRKFAEAREEIEAAMDSKETVYFXEEAACARDAAGEALAGFESLIARLPPADAD

SEQ ID NO: 116149 - protein, 86 aa, Oryza sativa
  Clone ID: PAT_MRT4530_19678C.1.pep
RRGVFEGVIEEIHQHWKHKEVVKVITKQNQASQITYTSMMLESMKYFAQERKKSIDELKRELIPINYALVAQTRALKQKDTEKHKC

SEQ ID NO: 116150 - protein, 97 aa, Oryza sativa
  Clone ID: PAT_MRT4530_19679C.1.pep
FGLAHLHQSVVICDGATCHNDGVKAPPVEPNAHVLRRGTARIPSPPVTDRLARDQIDHRMTRKNTASRTDVVPAQGILSLPLPKIIRELQVITWYSN

SEQ ID NO: 116151 - protein, 125 aa, Oryza sativa
  Clone ID: PAT_MRT4530_1967C.1.pep
MEDEPPESRPPAARDSAVSAHEKRQIGYRSNLDPNLTICHFEARGALPGDQQMDSASARKPARPKRRHAAEKAGVERRRRSVARREVVAEEKTFGELGMASANSPAAVAWIGEARRIGVGGDEKE

SEQ ID NO: 116152 - protein, 672 aa, Oryza sativa
  Clone ID: PAT_MRT4530_19680C.1.pep
MEHADADRTRVAPEIGSLHDEDAEADPARAREMERLQPWREQVTARGVVAAALIGFVFSVIVMKIALTTGLVPTLNISAALLAFLALRGWTRALERLGFSPRPFTRQENTVVQTCAVACYTIAFGGGFGSTLLGLNKRTYELAGNSPGNVPGSYKEPGIGWMVGLLLAISFAGNLSLIPLRKALVVDYKLTYPSGTATAVLINGFHTAQGDKNAKLQLHGFLKYFGLSLFWSFFQWFYTGGNACGFVQFPTFGLKAWKQSFFFDFSLTYVGAGMICSHLVNLSTLLGAVISWGIMWPLISKHKGDWYPANIPESSMTSLYGYKSFLCIALIMGDGLYHFVKVTGVTAKSLHNRFNRKSVSNTASEEGDMVSLDDLQRDEVFKRGTVPSWMAYSGYFLLSIIAVITIPIMFRQVKWYYVIIAYALGPVLGFANSYGAGLTDINMGYNYGKIALFVFAAWAGKDNGVIAGLVVGTLVKQLVLVSADLMHDLKTGHLTLTSPRSMLVGELIGTGIGCFIAPLTFMLFYRAFDIGNPDGYWKAPYALIYRNMAILGIEGISALPKHCLSLSVGFFAFAVLTNVARDALPARYKKLVPLPTAMAVPFLVGASFAIDMCVGSLVLFAWNKMNKKEAAFMVPAVASGLMCGDGIWTFPSSILALAKIKPPICMKFTPGS

SEQ ID NO: 116153 - protein, 161 aa, Oryza sativa
  Clone ID: PAT_MRT4530_19681C.1.pep
MTKKTFSGKQRMMASIAWQRCVVYGLRRLDDVPDNSDEMACDVAGAGDALRAPSSDAPAGILLEQLADEFEEDDDISTQTRKIDFCVRVTDDSAQLPVMFAGIIVKDIVKVAMLVVAQPQSCINILMKLSINVLQSNTERPVYYIFHFLVHNLKAVYYGLV

SEQ ID NO: 116154 - protein, 106 aa, Oryza sativa
  Clone ID: PAT_MRT4530_19682C.1.pep
HRLRSLAWIDLKFVTKDKSNVSEVYYNNNNNNNNNNNNSNSNNSNNSNSSSSTNNNNNNNNNNNNNNNNNNNNNNNNNNNNNNNFNCVGKRKERNKGKKKENGQME

SEQ ID NO: 116155 - protein, 27 aa, Oryza sativa
  unsure (1)..(27): unsure at all Xaa locations
  Clone ID: PAT_MRT4530_19683C.1.pep
LVXTWRCNNVLLRKYTCYSPMKVHDSI

SEQ ID NO: 116156 - protein, 374 aa, Oryza sativa
  Clone ID: PAT_MRT4530_19684C.1.pep
MGNCAGVQGNAEINPSFSAPNSSGTGSKNSSKNGADSSTFGTKASASSSVPPTPRSETEILQSSNLRKFTFGELKGSTRNFRPDSLLGEGGFGSVFKGWIDERTLTPVKPGTGMIVAVKKLKLDSFQGHREWLAEVNYLGQLSHPNLVKLIGYCFEDEQRLLVYEFMPRGSLEHHLFRRGSHFQPLPWNLRMKVALEAARGLAFLHSDQAKVIYRDFKTSNILLDSDYNAKLSDFGLAKDGPSGDKSHVSTRVMGTQGYAAPEYLATGHLTAKSDVYSYGVVLLELLSGQRALDKNRPPGQHNLVEWARPYITNKRRVIHVLDSRLGSQYSLPAAQKIAGLAVQCLSMDARCRPGMDQVVTALEQLQGAKKAAK

SEQ ID NO: 116157 - protein, 52 aa, Oryza sativa
  Clone ID: PAT_MRT4530_19685C.1.pep
LSIAHITTILLQEEISKTKMKELLHGQQFLSYILFMSIDMSTSTLLLISNYT

SEQ ID NO: 116158 - protein, 41 aa, Oryza sativa
  Clone ID: PAT_MRT4530_19686C.1.pep
PGPRSVGQGSGITVNCGVGHRHDLDPALLWLWLRPAAIAAD

SEQ ID NO: 116159 - protein, 68 aa, Oryza sativa
  Clone ID: PAT_MRT4530_19687C.1.pep
MFWHAPMQKDKASFDDDPILARAMVSKKVFPRLLLRHDEARSPGFMSLELKLGVIPPKNYSVPDRSYC

SEQ ID NO: 116160 - protein, 72 aa, Oryza sativa
  unsure (1)..(72): unsure at all Xaa locations
  Clone ID: PAT_MRT4530_19688C.1.pep
YGSLDMVSTLRDIIIWGYICRXRGGPLMMTAQYGYSSVFSTGYMVMTGCRKELGSXGWLLEVPVGHRIEGIS

SEQ ID NO: 116161 - protein, 531 aa, Oryza sativa
  Clone ID: PAT_MRT4530_19689C.1.pep
MGHVKKSVLVAHESHGEVNPPEKEGGGSPKRRRTEAEEEEDDGDEEAAAGDLIGDLPDDILRDIIARLPTREACTTQVLAKRWRHLWRSTPLRLDYRSLPLRRHNKGNALAVAVAGVISAVLSAHPGPCRCLCVPADSSRDTVDTWLRSAAVDNLQELEFLSNRGGAPPPPSPPPPPPVSLFRFSYTLHIATISRCELQHTTVHELRFLRLKHLGLEDVTITEASLHAMIARCPLLECLLLARSVGFRRVRINSPSLRSLGVLVARRRIAALPRQTQLEEIIVEDAPLLEKLLDLAVHNNLRLSVISAPKLETIGCLTDRWFGPRIMFGTTTVVKGVSVVRLTEAVRTMRILAINMFVLNLAKVIDLMRCFPCLEKLYLKCCLSAGNNYWRCEYQTLIKILDIRLKTVELENYRGTKPQIDFAQFFVLNGLGGIMNDIYRMLIHRQQVRAPKDVQKMIANNVSLEDACKGCVKEIFRRPMLAQLLLKHTISESEEVLTAGEGRPELHDGAAQEESGAAAEERERRADGMWR

SEQ ID NO: 116162 - protein, 133 aa, Oryza sativa
  Clone ID: PAT_MRT4530_1968C.1.pep
MAMNDSPSSHQISLGCPEAVVGGDPAPGAACVQELHHPPHHLLPEHIHGVLSSLPPPPPPPLPPLPLLRLPLPPPPPPAPWLPMTSPAPCSPPPPSPAPCSPPPPAPWPPMPSPCRRRRKRECVTAHGRRMMT

SEQ ID NO: 116163 - protein, 135 aa, Oryza sativa
  Clone ID: PAT_MRT4530_19690C.1.pep
KLTKQASKARQKKPLEPSRSKVANRTMAEMVARLASERAVVVFTKSGCCMCTAVTTLLGELAVSAAVHELDREPLGKEMERELARRLYGSGGRGGPAVPAVFIGGSLVGGTSKVMAVHLKGELVPLLKSAGALWL

SEQ ID NO: 116164 - protein, 516 aa, Oryza sativa
  Clone ID: PAT_MRT4530_19691C.1.pep
MALAQPTLTLTQRCGPARYGESLPLSESSGPEKKLKLFFFVKTKKYLFKPNTMTTQACKKRRAVYISSESEDSGTDSEVEGSKLSKKDGVTSVYTCGHQPTSKNKVDPMNTSKSRQCGSILKKLMDHKSGWIFNTPVDPVVYGIPDYFDVIRNPMDLGTVKRKLTSKQYSNPYEFAADVRLTFSNAMKYNPPGNDVHGIADQLNKIFDSEWKLLERKWKDRNLVQEQPSLKVLKAQPAVTPKPVLPKGVTAGTNSAVSKTLATALSSKVKIKFSVRGSELTSSKDTPLQAVGRRDGTINQSLPCTKDNAKTPRIQSSEDRSESTGDEYLPGDDASPSKALRAAMLKSRFAGTIVKAQQKALLDHGKKIDPAKLQLEKERLEKRQQEEKARIEAQVKAAEAAAQLKLDEEMRMKREQERRAARLALHMMKKTVDIDNSDFLKDLENLSKKWELNPPGKLIVDFVDGIDLPPGLGSPLERLGLFMKKDLEEEVEHEMEDSVSPSTEIDVEEGEISFCQ

SEQ ID NO: 116165 - protein, 141 aa, Oryza sativa
  Clone ID: PAT_MRT4530_19692C.1.pep
WVVLKKDRRKKRRRQRLGGGGEEANEQERHRGWRSEESMACRCGNDDNSVDGCDAPRRARGTWVVAWMETALRVELKAEREGSEGKSGVGGGIPSRGGDRAKDMEAREHDDPTADVEAADRRGCGQGERESPWQPSCSSHD

SEQ ID NO: 116166 - protein, 108 aa, Oryza sativa
  unsure (1)..(108): unsure at all Xaa locations
  Clone ID: PAT_MRT4530_19693C.1.pep
XXPXPPXGXFXXXGXXXXIXAGLXXPSHXXXPXNXSXDSXLXLXXRAGXXTXPXXVAPXRDEXGRXTXVLPVTXIMXXXXXEPRLQAXCWTRXXXIDXXPXACXIXGC

SEQ ID NO: 116167 - protein, 359 aa, Oryza sativa
  Clone ID: PAT_MRT4530_19694C.1.pep
MSSSPLVLTVLLFASLTWLVVLAPRSSSPPATATPSPPVVGDGVGGGGEDGDLALFRRATLDGGEGAAAMAVAEPKVAFLFLTNSELTFAPLWERFFEGHGERLNVYVHADPAARLMMPPTRSFKGRFVAAGPTKRADATLIAAARRLLAAALVDDAANAYFALLSQHCIPVHSFRHLHATLFPPPAAAAAAARRQRRLPSYIEVLDGEPQMASRYAARGEGAMLPEVPFDRFRVGSQFFTLARRHAALVVGERRLWDKFRQPCLDQNACYPEEHYFPTLLDMADPAGVARYTLTHVNWAGSVHGHPHTYTAAEVSAELVADLRRPKKNTTHDYMFARKFSPDCLAPLMDIADAILFND

SEQ ID NO: 116168 - protein, 267 aa, Oryza sativa
  Clone ID: PAT_MRT4530_19695C.1.pep
MAWSAQRELKYSSPTLLCPMPEARGVSTIHCRVVAQLSALPPMSLGPAHPRSHPVVPRSTTATRIPEASKTSGKGKDVLVTSDPSSRKKNPTGLGGSPGTPQATTRTATTASRAAKAEDATAKVASHGPTRTPKIGVHKTRQSTRVSTQDNPDAAADSARPSGGDAAGEEVGGGNESTGAAANSIRPSKGDVAGAEVGAGDGSMSAAADSAQLSGGNAAGAEGGAGDGTFWFQGGREKEALKEGFDDAADKAYATVDVKTRRPGRSA

SEQ ID NO: 116169 - protein, 88 aa, Oryza sativa
  Clone ID: PAT_MRT4530_19696C.1.pep
PTRPPTRPPTRPPTRPPTRPPTRPVQSFIYARTLTPSGNHIAVIRGWGGLFLTVILSNIIFLFFHFLSIVNSDKKNSNKALIFMINFH

SEQ ID NO: 116170 - protein, 67 aa, Oryza sativa
  unsure (1)..(67): unsure at all Xaa locations
  Clone ID: PAT_MRT4530_19697C.1.pep
PRRAARLLRRRRRRGGAPPRELQPVGGQRGEXPAKSIHLMIFCDCCRSVAIHEICMMTIHVPSRTLH

SEQ ID NO: 116171 - protein, 102 aa, Oryza sativa
  Clone ID: PAT_MRT4530_19698C.1.pep
MEAKGENDARAPLLAERRRNSVGSMRGEFVSRLPKKVLDAVDPERPSHVDFSRSKGLREGEKEYYEKQFATLRSFEEVDSIEESNVMSEEDDIAGKSRVSLP

SEQ ID NO: 116172 - protein, 62 aa, Oryza sativa
  Clone ID: PAT_MRT4530_19699C.1.pep
TNINSDQVYFGFATQINMHCITIHPPLLKLYITKPTGTFLSHTHCFLTHSHIITNHTQYAHT

SEQ ID NO: 116173 - protein, 45 aa, Oryza sativa
  unsure (1)..(45): unsure at all Xaa locations
  Clone ID: PAT_MRT4530_1969C.1.pep
XIFFFFXFSNPHIKSYHMGRVLFITRIPHNKYIXLVHTMLPNPLS

SEQ ID NO: 116174 - protein, 136 aa, Oryza sativa
  unsure (1)..(136): unsure at all Xaa locations
  Clone ID: PAT_MRT4530_196C.1.pep
FFFFFFLTANITVFHVTFTHKHKRMKVDHGDTSSSVLFQETRSTGTXHNRHYQHMHFTHIISNSATVSSICTHMHHQHRHHASPIIGHTARCMWHLSMVNLHSLLQNSTKKLLPRILLRKQAANQNIPFPRALLLW

SEQ ID NO: 116175 - protein, 94 aa, Oryza sativa
  unsure (1)..(94): unsure at all Xaa locations
  Clone ID: PAT_MRT4530_19700C.1.pep
KTPGGAKEKPPDGAQQGGAPRPAGPPAXEPTSPTTTNTRATRARPPAHPHPRRSKPPPPRRPGPKAKSTKTQQCACTGRGQTRPQPHHTRQTKG

SEQ ID NO: 116176 - protein, 422 aa, Oryza sativa
  Clone ID: PAT_MRT4530_19701C.1.pep
MEAKGENDARAPLLAERRRNSVGSMRGEFVSRLPKKVLDAVDPERPSHVDFSRSKGLREGEPGLPLFHSLFPPPEQYFFSGPGQREKEYYEKQFATLRSFEEVDSIEESNVMSEEDDIAEQKQSEFAMKISNYANMILLALKIYATIKSGSIAIAASTLDSMLDLMAGGILWFTHLSMKSINVYKYPIGKLRVQPVGIIIFAAVMATLGFQVFVQAVEKLIVNETPDKLTPVQLTWLYSIMIFATVVKLALWLYCRTSGNKIVRAYAKDHYFDVVTNVVGLAAAVLGDMFYWWIDPVGAIALAVYTITNWSGTVWENAVSLVGESAPPEMLQKLTYLAIRHHPQIKRVDTVRAYTFGVLYFVEVDIELPEELPLKEAHAIGESLQIKIEELPEVERAFVHLDFECDHKPEHNILSKLPSSQP

SEQ ID NO: 116177 - protein, 138 aa, Oryza sativa
  unsure (1)..(138): unsure at all Xaa locations
  Clone ID: PAT_MRT4530_19702C.1.pep
PPPPPPTLLLSLPRHRRSSPPVNRAGSRDGGGGAIPRRRAVSGAREAGQSAARKAGQSRAECGAPVGEGGRGSGTAVAGSGRTAQGCGGSGARAARRWTXSVARGPRGGGGGGVARATLRHEGHAAIGAASAPGPRRG

SEQ ID NO: 116178 - protein, 74 aa, Oryza sativa
  unsure (1)..(74): unsure at all Xaa locations
  Clone ID: PAT_MRT4530_19703C.1.pep
GREAGADGVARRWRGICVEAPPPPPPPPPQXAPASARVPRRRTSSPPPPPPPRQRRRRRRAAGAAAPPQWRLEP

SEQ ID NO: 116179 - protein, 209 aa, Oryza sativa
  Clone ID: PAT_MRT4530_19704C.1.pep
MSKPDRRSGAATSPSLRFLGLLKQPDDGSGDHELELDERDVVWSSSSSSNTSPSSWASSTNSSPSLTPSASAGVGVRRPLSSSHAFPAAGSVGLSALLADDHAPTASIPAKARPERQQPPQPYHQSAPVAVPAWPKATDSDRRRRGVQHEALNDEEDDDDELVVPPHEMAARRAAAAASVMEGAGRTLKGRDLRRVRNAVWRTTGFLDL

SEQ ID NO: 116180 - protein, 449 aa, Oryza sativa
  Clone ID: PAT_MRT4530_19705C.1.pep
MATNRFVCEICGKGFQRDQNLQLHRRGHNLPWKLKQRGSKEAVRKKVYICPEASCVHHDPSRALGDLTGIKKHFFRKHGEKKWKCDKCSKKYAVHSDWKAHSKICGTREYKCDCGTIFSRRDSFITHRAFCDALTEESAKAIGGIPAAMAAPGHHHHHHHHHHQLLFSPPPVMAHHQELAALQEQQQQQHHQDVMQSPHQHQQQQQQRQQLVQQNCGYAVKPEMAPWPTTMPYDHHHPLLQPLCNANAAATAQSSATSAPPTTPQLPAAAAAAHLSATALLQKAAQMGATIGGAGTGAAGAHYAHMASPAGAGAPAGGSATFGLGLSCLNTHQDGGGGGGNGLIPAGMMGHLARTASHGRSGEDVAGAGGGGGDGMTRDFLGLRAFSHRDILLAGFDSSCMGHVNAAAGMAGYEPPPPHHGQPQHQHQQQQQQQQGGSNEPWHGMGSHS

SEQ ID NO: 116181 - protein, 80 aa, Oryza sativa
  unsure (1)..(80): unsure at all Xaa locations
  Clone ID: PAT_MRT4530_19706C.1.pep
PRVRGRVXRFXFGFVNINHGGAYXLYTXTFXWPPYLYXXVCTXILEKWRTHNAYFPLFXIRVWXIDQYCVXNRCMYHXVL

SEQ ID NO: 116182 - protein, 83 aa, Oryza sativa
  unsure (1)..(83): unsure at all Xaa locations
  Clone ID: PAT_MRT4530_19707C.1.pep
QAEVDWQAKDTDLLREAAAAVVAVNPPHEAVTTGGSVRGKPPAPSLPSNPPREVAATAXSGRGKRPASPVLPDLPGGSPRTPP

SEQ ID NO: 116183 - protein, 693 aa, Oryza sativa
  Clone ID: PAT_MRT4530_19708C.1.pep
MKKLLDGIDDWKYEKLDKELRSYLKDKRYLIMVDDIWTIRAWEAIQSVLCDNNRGSRIIVTTRIEAVAKACSPAIGGHHIHHTQPLEFEDSKKLFLSRTFVNKECPEELEDVMENILKRCGGLPLAIVSIASVLAGYTSPGSKDKWESIYKSIGSHMESNPTLEGMRQILALNYNHLPHELKGCMMYFSIFPEDYEVNKNRLLWRWIAEGLVTEKRGLSLMEVAESYLDDLVNRNMIQLREDIEYYWKAQMYRVHDMFLEVMVSKSLESNFASLLGGQYATMSYDRIRRLSIQGDDDRLENAEQPRKNTAASAGVDDGILDLEHVRSLSMFQHTGKKLLDQLGKFRLLRVLDLEGFKGALTKDHMGYICRLYLLSFLSLKGIEVEEVPSEIGKLEHLQTLDVRQTSVRGLPDTVTKLYKLERLQISYNGDANLMWKLPLELKKMKMLREVGFSVLGNHLQVAQDVGELDHLQEMVVYVDDITFDDNVLTEFANSLSKLYSLRRLIIGDVGYGKTLNFLDQLPSPPQLLRHLMIAGGIDRLPSWIMSLTYLVQFNMSWGKVAGDQLFDVLCELPSLETICIHNYCYEGNVLVARTRHRFPELITLRIASGSKLPNVIRFENGTMPKLENLLVNFTDNDEKKIIGIRHLTSLKEVQLWGNESNLALHRALKHLKSENKRRLFESSSQFQIVVKYE

SEQ ID NO: 116184 - protein, 374 aa, Oryza sativa
  Clone ID: PAT_MRT4530_19709C.1.pep
MPTKKKGKKRKKEKGKLVERTGKKSRESVSRILSSLRGAKVANFQSLRVLQFLMFELKAVDLDNIYEFLRTYPPQSDGALCLPTTSDHGLFEYDPIDEQRQNPLEDGLANLEDRRIENHMRCFILTLCWLNLNVPMFAVVHPMSCLAKIHLNDVRITDEALRRMVILSPSLRVLTLFYCNGPLAMIIASSRKLSSLIIVECNNVRGVVVMPDSPLHNFHCMGSPLSPFNLSGGARLLTDLLFCFNPPILGHQVLREWFRNNLPFLSNITSLSICSNTLQVVSFLRHPGANLDMAILDNFQSLTMLELTMLEFKAVGLGNIFVFLKSCHRPNLKKFLVTVDTSKPTLNCILIFQRSDRTIHDSDIRFEEDFPGSL

SEQ ID NO: 116185 - protein, 255 aa, Oryza sativa
  unsure (1)..(255): unsure at all Xaa locations
  Clone ID: PAT_MRT4530_1970C.1.pep
WTRGLAIGVAGLCKALHSSLVIPPVSQKKLLSNSDRLYYTGGLKNLGNNCFLNVILQALASCDGFVSSLDNLLGSEDVLPEEKSEKMPLIFALSSLIKDLSVVRDKRTELSPHRVMDALSFYVGHFNLTREQDASEAFHHLLTSLXMNFPVVMYQIGVLWQTSPCFLPKYIVKGKLSLDFENFYCLPLSPVATINGDIINGCSLVDCLEHYTALEHLDNYRCDHCWHNVAAKYXLSLKIRGDEEKINKLHTCVDY

SEQ ID NO: 116186 - protein, 124 aa, Oryza sativa
  unsure (1)..(124): unsure at all Xaa locations
  Clone ID: PAT_MRT4530_19710C.1.pep
LYTKCHWYHKTNGNTNSATIMNNLSFLEVKSCSRSSRFDRLHKGEHEAVGARGGGGYCVFLRGGCLSEANLYIQYTRARTWAARRTTTKSGTASRRREPAGGCGCCCGIVGGVGGGVEARAXVG

SEQ ID NO: 116187 - protein, 98 aa, Oryza sativa
  unsure (1)..(98): unsure at all Xaa locations
  Clone ID: PAT_MRT4530_19711C.1.pep
PSISLINLFYNSPIFSXXAEQPTPKTRKXKXCPLNLXSSSPTSPPPTAHDNRQAPNQARLIPHPPDQLASPRVSGFYCARPGFASRWTIRLGPQQRLM

SEQ ID NO: 116188 - protein, 110 aa, Oryza sativa
  Clone ID: PAT_MRT4530_19712C.1.pep
MVSKGNLFGMKIRIRNGKYLVLAMSRRWVAASFFLAAGNEEEREEESWSSPSRFLWLTGGETEEGQAKEAAKWVQGEGNKSGVREFNAHYGEAGFSRLRIIIGLSFNWFD

SEQ ID NO: 116189 - protein, 66 aa, Oryza sativa
  Clone ID: PAT_MRT4530_19713C.1.pep
MDLAARDPVATDPTLLSAPRPAAVIPAVASHGSALPVVASDGSTLPAVAGDGSALPAVAGDGSAIP

SEQ ID NO: 116190 - protein, 176 aa, Oryza sativa
  Clone ID: PAT_MRT4530_19714C.1.pep
MESLAEEMTMASGCPHDEEDLIQYIVTQLGEGYNEVVSAMCARVEPISVGELHHGNLLLPITASYPSPSDVTAAPSKPRHQSLIGRAQGCQIRAERAPTLPPAHPYSGLPSDDMHGLSGDAVDDTTTTTSSSARCSSRPPPTASFSLTSLWRNELDGGSLSSTVILNFVYSLAKRQ

SEQ ID NO: 116191 - protein, 102 aa, Oryza sativa
  Clone ID: PAT_MRT4530_19715C.1.pep
AATLSMTRRRRHPPQRDAPVDHPRRSLVNPQLLQLFPLYSCSSLGLLLPDLAVEERARRRQPFIHRHPQFCLFSGKEAIKLTGDAHKLPMPVLVSLGAELGL

SEQ ID NO: 116192 - protein, 63 aa, Oryza sativa
  Clone ID: PAT_MRT4530_19716C.1.pep
NGFLSVHGHVGPLRGPVTRCRWPPPPASPLGYDLMMFSSASLISVENHSFFIYAAKRFGNMCA

SEQ ID NO: 116193 - protein, 193 aa, Oryza sativa
  unsure (1)..(193): unsure at all Xaa locations
  Clone ID: PAT_MRT4530_19717C.1.pep
MDRRPSAGTAGLTAGGGPALAAGENGLQPWERDGGRERRPTRGSLAGAVDPFRLASKARRRGSGAATAQDVEERSRSRMRESGGGGGWIEKWRKSMFVMLQDLXGGRRARATAAVAGGRAGAGVATMAGWRGPNNSPWPPAAAPLQPPVWTSTSVLFDAAAAPGPGXEEATRLEKQRLDTMLRCLDPLLATTE

SEQ ID NO: 116194 - protein, 98 aa, Oryza sativa
  unsure (1)..(98): unsure at all Xaa locations
  Clone ID: PAT_MRT4530_19718C.1.pep
DDNGTRNGKKVGDAGSQCGRWQGGHLGRWRERPAWRWHGGVAVDGDSMRHFCSXGRCRVVSFLLVGLPDENPVLVLPKASMDYNDGAHRRFSPWTCRL

SEQ ID NO: 116195 - protein, 445 aa, Oryza sativa
  Clone ID: PAT_MRT4530_19719C.1.pep
MEVSASAAAEAGMMVGHGEWRDDDGRARRMGTVWTASAHIITAVIGSGVLSLAWAIAQLGWVAGPAVMLLFAFVIYYTSTLLAECYRSGDPCTGKRNYTYMDAVRANLGGSKVRLCGVIQYANLFGVAIGYTIAASISMLAIKRADCFHEKGHKNPCRSSSNPYMILFGVVQIVFSQIPDFDQIWWLSIVAAIMSFTYSTIGLSLGIAQTVANGGFMGSLTGISVGTGVTSMQKDTIKAPPPSEAKVMNPATMLSVATTTVFYMLCGCMGYAAFGDAAPDNLLTGFGFYEPFWLLDVANAAIVVHLVGAYQVFVQPIFAFVERWAAPRWPDGAFIARELRVGPFALSLFRLTWRSAFVCPTTVVAMLLPFFGNVVGLLGAVSFWPLTVYFPVEMYIAQRGVPRGSARWVSLKTLSACCLVVSIAAAAGSIADVIDALKVYRPFSG

SEQ ID NO: 116196 - protein, 61 aa, Oryza sativa
  unsure (1)..(61): unsure at all Xaa locations
  Clone ID: PAT_MRT4530_1971C.1.pep
LGXTDVGHPMAEVFPXXREGTXXXXXXPFSXTVDIPNXQVGXCYWXGYPRIPRMVLGHKVT

SEQ ID NO: 116197 - protein, 848 aa, Oryza sativa
  Clone ID: PAT_MRT4530_19720C.1.pep
MADQTLGAVGSLLGVLSKVVKDEAKLLGGVEGDIQFIRDEMDSMNGFLVHVTKTTNHDDQLRAWMKQVRDITYVADDCIKLYMRDVVPEEKAGLRGCLLRRVPSVCKPYCSFLHRNLTTRDQLARRIHELKDRVREISERRQRYDVKLPEGDAVQSPPVSQDRKTKEKRDEFVRALEDGQSPFRDAVRKLSSGDGGALIRDRAAPALVRSIVDTCITKLADDHDRIIKMLLRSLYAHPCGTKELENLSNKLREGEDVAKQVMLFCYSKLSVHYKSCLQYLITFELEESISRTSLVRRWLAEGLVLNDQQQHGIDDDESMEEAGERCFDDLLFRGFLSPAPAHRFPRTGGLKLKCCVLDASVKTFIYDMSTSENFLDDLPTHLRHQINIRKTARRRELPQKQHQHKLRWTQSTICCCYCRVPRIMKATTADAGGSNINDPLLPLHHPMDEIVTLLKTLPPEYRLNVLDLGGCLGLKMSHLKNICKLVPSLKYLSLRKTNVSQLPKKMNRLLHLETLDIRDTNVRGAAMRDIFLNELKHLLVGRIFIPDAAAGDNEASALLSTVLMPPKISKNTEILRHIQIKDGPEAQLQLSHVASLDGLRKLGVVLDGREDNIKLLLTTIARRSDTLRSLSVWITEPPPEHSVTGERHGVFVTLDHKEKATTLFSHPSKLESLNLKCYKGKNNNNNYNIPPWIISLQKLSKITLRHSLLSRGGLRELGKMKSLRCLKLRQESYIEADVTVKYGEFEDLRLLVIDKISNKMTKLVFEEDAAPKLEKIVWNFDTMTTLMGITVNNIKGIENLQNLKELWINGVNIPFPSRSREWKDITTVPQKLWRHTFGPVIESLASES

SEQ ID NO: 116198 - protein, 113 aa, Oryza sativa
  unsure (1)..(113): unsure at all Xaa locations
  Clone ID: PAT_MRT4530_19721C.1.pep
ACSNEAGQRSKSLILQERFSDDKXGARERKFYLTLSKTSCIYCSTPKSTKASTTNVDKTSLQILRLLDHSRKVGGSRQGIRNEKMEGSSAVFDLAGHELEKEDYPVIDYKSDL

SEQ ID NO: 116199 - protein, 461 aa, Oryza sativa
  Clone ID: PAT_MRT4530_19722C.1.pep
MATRREISAAAGCGWWSPTPTTTGPGTTTTTGLFVEPISLALPLPLPVVGFAKSRVGCARLRLFDGTRRGGWRGEQPMQMRICNDGAAAATPHGTGYGGHLADTAAGGAFFSRSASSASTSATATSPTQPFARRPDDSPPRWSPSSAGPPSSQPSENTATCTNDEPRHGDGAPDAAMTTKTSGGGGGAGGRGGRHSVASRPRAPTAPSSSGSPPPAPVCGGGATRVRAVVKTLLAGERHLCDELLASDEELGHEWFADVARRCLLQLIGFADAVAMSTPATEKLYRMLGMYEALTAVEPDIESLFTGDVRDLFSSEVTGVVAQLGNTIRHTMTIDQFVNVIHGESSRRPVHGGKIHPMTRYVLNYCGLLAECRTTLDMVLADNNNTNDDHHDGGGASSSGRCMRELLTHLLRKPDEKSRLYDHTGLQNIFLMNNLYCIVQKMMEEEEEIDPQWAPLFFLRE

SEQ ID NO: 116200 - protein, 138 aa, Oryza sativa
  Clone ID: PAT_MRT4530_19723C.1.pep
MGVWLFRNSKNLDALPYYRRKYFTFGRENRKDFKFYGIALEIFFSFLSSVIIFQIMIPISLYITMELVRVGQSYFMIGDTRMYDSSSGSRFQCRSLNINEDLGQIRYIFSDKTGTLTQNKMEFHQASIYGKNYGSPLQ

SEQ ID NO: 116201 - protein, 91 aa, Oryza sativa
  Clone ID: PAT_MRT4530_19724C.1.pep
GAPPCLSRCRSPSRSQSVPLPQARSLARSWPDIAWLAWRCRMCMSRPMCERSSVFELLPGSGVCLYDGGGYRTYPRNDPPRIWKSVVVLYK

SEQ ID NO: 116202 - protein, 943 aa, Oryza sativa
  Clone ID: PAT_MRT4530_19725C.1.pep
MQQASKPKASSSVPRVARLQQVRPSSAASTSNNAHANANALLDKSSMDIPKPERRSFKASRATTPDRMQKARGANARPAAASAAEQLLQAQLNAVQEDLKNAREHLAVIDRDKAQLLHDLSLARRLADDAHAAQSAAEEALDLERFKSIEREQLAIDLAQTKERDWNARCHAIDLRRAELAAELGRVKDELALAVEATNTARQIADANADKAATLAAEVSRLQSELETKAEEATAIVAKLESEASGLRAELQNAEASRKEDVGRAEQLLHGLKVDIAYAKRAEADANLAAQEWKTKAESLQARLHELSSLNKSNEDSLQSLTSSFDECKSMLQHEQSQVVQLKEKVSSLEKEAREYKECFLETNRRLDVATKESHQLQATIDRLTSQHKLLNEAHQQVVTNEKTVNSQISLLSQDKIRIEQELDGARDERDKAKKAVEDLAAALREVSSEAREAKERVLAKQTELDSAQLQISELKAEMKNAQDRYQLMLDESKSEVECISKTVEKLGSEAKISNDEWASKEAGFVEMIRRSEEEMSSIKSEMSSLMVSLGAAEKQVQELKAERTQLLDKLKQSELTNSEGSSISSTGVQQTADESESTVGLKDLVSRKEKEVLALNDEVTDLRLRETAALAKANELSKLLAEATAKKAEEEEAAKGTEKSKVLLMKLEMDKLLGSLKAAEQEANAAKDDKAQLQAKLRLLESKMTEANLTAEEEKISSLRLKETLAEKEEELLSIAREYDGLRTREAAAQAKIDELSSLVAEASTARKLAGEYSANGVAAIRSPEKQHNMFRKMICSPMDNVRDDVNSSNRRTQEDEIKHVEVETVIMKQQQQQVIVKHGKEEALAMEVKTLENSKIIEDDISKHRDDDDNESSDDEEIESQGDDAAVEQMNGPLIHGPTSSFNKEQHNQHKKKKALLKKFGSLLKKKAHFTKLNSHAKLVS

SEQ ID NO: 116203 - protein, 688 aa, Oryza sativa
  Clone ID: PAT_MRT4530_19726C.1.pep
MAHWRQCHEADAARRVVVVDFVVVAEYLCLGAAFGRHAGNGCAAAAGSLEGRDELPQQAARMEPEEEVPRMWPTIFNIFQIKLPQMERKLVLWNEWEIQVLVLVSFSLQVFLLLLSGIRKRTTSNVLSIFIWLAYVSADSLAIFVLGHLALHINGRRHGLVLFWAPFMLLHLGGQETITAFSMEDNMLWKRHLLTLATQVGLAAYVVGKQWQGDKQLLAPMVLIFISGTIKYACRTSALMFTAEQTTPGSNLGMQAKGWSANWKHYSTNNWMMNEVHTYNELLWEANAGWTLYMAFLMDMTPLISRPETYSLKGLLSKEHRVYVSYKLAELQLSIVYDYFYTKLGVYFEPEERLNGRFAQLATLGSTFAALFLFARGNFSYDRADIVVSYILLSGAFILEILSVFIVVSSFWAYFMATVSDFLCTRCHDVIFSIVKLVHPESKPQWSQKLAQYNLIIGCIKQKRAAAGSCLLKCMKRVIGIQPSTMTHVDISHELKKLVLDKLLQVLISDSIQRAGFMSAVLAWHIATDISFFHEDELGCSSPSRGPSRELSKYVMYLSAKHGILSGNDGHMRLRNAQEFIVECLEDRQEALDQDAVVRSVAAKIDNLTEDFEHPRILTAVEPVLIQSGQLAKELLKMKEANDRWDIIMNVWMEMLCYMAFHCGPGFHIKQVSKGGEFISHACEGCDI

SEQ ID NO: 116204 - protein, 92 aa, Oryza sativa
  unsure (1)..(92): unsure at all Xaa locations
  Clone ID: PAT_MRT4530_19727C.1.pep
TPFFQSILFXLKTNQIFQHLILFTQQSHYQNINFSKPIXQQLHLQQFNNLYINRNLAQAQTXLAFNXPSTYGIYPRYYSAPGSITTPAGVLY

SEQ ID NO: 116205 - protein, 116 aa, Oryza sativa
  unsure (1)..(116): unsure at all Xaa locations
  Clone ID: PAT_MRT4530_19728C.1.pep
LGYPTLIWFPRXPRIQTPTPPLPQPPSSCLSLRLRKCGARAAALCDGDMRSGGRRRAAGREGRLGLAMRLGKEGRRVGVRRESDGGADGGTENAQGGKAAYTDVGGGDDRVSVRTR

SEQ ID NO: 116206 - protein, 53 aa, Oryza sativa
  Clone ID: PAT_MRT4530_19729C.1.pep
AAIHHMIEQLFPNCSCFLSPCFFHFLLLFFVIMSFSLIFPFAITPCLVHSTCC

SEQ ID NO: 116207 - protein, 94 aa, Oryza sativa
  Clone ID: PAT_MRT4530_1972C.1.pep
MARKAIIVFALVVVAALCLVASAQDPQANKQGGGGPPGYGHYPPWNGGYPGRPDRPWDRPDRPWDHRPHPGPGGHCRWGCCGHRNHWGECLRCC

SEQ ID NO: 116208 - protein, 139 aa, Oryza sativa
  Clone ID: PAT_MRT4530_19730C.1.pep
MPVLRYGYNKRKAIQENKQKLFAITKQGIINYLSILQVVKKNVSYSIRSATTQPRKKGICPFRTEGVWYRHMKTDHKACRDFQNMKKTIARIFEQTPPIRAHIFGHTQLNVISTKLSRTEINHIFRTHRANYTCAVRLF

SEQ ID NO: 116209 - protein, 46 aa, Oryza sativa
  Clone ID: PAT_MRT4530_19731C.1.pep
RCLGRKVMGWDFSATDQLQSTADAEDRPPELLVIHGGHSRTISCFF

SEQ ID NO: 116210 - protein, 214 aa, Oryza sativa
  Clone ID: PAT_MRT4530_19732C.1.pep
MSSAAAATRFIKCVTVGDGAVGKTCMLICYTCNKFPTDYIPTVFDNFSANVSVDGSVVNLGLWDTAGQEDYSRLRPLSYRGADVFILSFSLISRASYENVQKKWMPELRRFAPGVPVVLVGTKLDLREDRAYLADHPASSIITTEQGEELRKLIGAVAYIECSSKTQRNIKAVFDTAIKVVLQPPRHKDVTRKKLQSSSNRPVRRYFCGSACFA

SEQ ID NO: 116211 - protein, 247 aa, Oryza sativa
  Clone ID: PAT_MRT4530_19733C.1.pep
MSSAAAATRFIKCVTVGDGAVGKTCMLICYTCNKFPTVECRAAANPFLSVLAPARRAGLSSLRLDLDYIPTVFDNFSANVSVDGSVVNLGLWDTAGQEDYSRLRPLSYRGADVFILSFSLISRASYENVQKKWMPELRRFAPGVPVVLVGTKLDLREDRAYLADHPASSIITTEQGEELRKLIGAVAYIECSSKTQRNIKAVFDTAIKVVLQPPRHKDVTRKKLQSSSNRPVRWPHGSTQNGIEDHG

SEQ ID NO: 116212 - protein, 134 aa, Oryza sativa
  unsure (1)..(134): unsure at all Xaa locations
  Clone ID: PAT_MRT4530_19734C.1.pep
RRENERKLNKPETKKKNLVRNKKKGKTRNNNFGKTPAKKKGNGKNRGXEGTKKPFGKTIGPGGRAIGTRGGESSPPGKRGPSGGGQPTAPETGGLGKGRAPPPPPGPPPFWGQQGGPEGGRGPQPCKKRDPLGR

SEQ ID NO: 116213 - protein, 74 aa, Oryza sativa
  Clone ID: PAT_MRT4530_19735C.1.pep
LHNTSSSKHATTVIVLSVMLILCKQDKCRDSCLRILPAMGTIKLIFSQYFSLAALFRSPCTSIMGIKRDNYVGL

SEQ ID NO: 116214 - protein, 61 aa, Oryza sativa
  Clone ID: PAT_MRT4530_19736C.1.pep
GKSSLDRHYKWVADGHCGREKDALQGVLREGRHLKRRMTTWQHCTPRCHNMGRGPKIKPTP

SEQ ID NO: 116215 - protein, 103 aa, Oryza sativa
  Clone ID: PAT_MRT4530_19737C.1.pep
MREDVSSPLNIGLTDPEWMCTSMILRFLLFCSVLDLLLQGKNRIGESAGETAPTRALLRFGPKRLSGHRSAAACGPSGHTARPRPSTRVLKTSHGLWPVEEAN

SEQ ID NO: 116216 - protein, 114 aa, Oryza sativa
  unsure (1)..(114): unsure at all Xaa locations
  Clone ID: PAT_MRT4530_19738C.1.pep
VIKSCLLTTTKEICLEKINFRQLTFHQVQLLKKLRILRATLVVNLKKKGGANNIEWFSLLSSRINRCYQQCSIAVTWGSXSKFEVTEELASMNGLSVWNITGKNIFKESEKTLI

SEQ ID NO: 116217 - protein, 91 aa, Oryza sativa
  Clone ID: PAT_MRT4530_19739C.1.pep
MASRLVAAAAASSSSSPLARLVSRRGLAGAADHHGPPKVNIWQEPMNPANWKEEQFVLASLAMWGGIFYGVGRLFSGKKEDKTTEAAPAQA

SEQ ID NO: 116218 - protein, 202 aa, Oryza sativa
  Clone ID: PAT_MRT4530_1973C.1.pep
MAPYEALYGRKCRTPLLWDQVRESQVFGTDILREAEAKKSYADNRRRDLEFAVDDFVYLRVTPLRGVHRFQTKGKLAPRFVGPFRIIARRGEVAYQLELPASLGNVHDVFHVSQLKKCLRVPSEQADLEQIEAREDLTYVERPVKILDTMERRTRNWVIRFCKVQWSNHAEEEATWEREDELKAVHPDLFASSSESRGRDSV

SEQ ID NO: 116219 - protein, 155 aa, Oryza sativa
  Clone ID: PAT_MRT4530_19740C.1.pep
MYADQISTGRKRSIHDRIDGDQPAARAGAGAGGRGARNPPSKRQRQTDEKWKHDLYREDDEPASKSIDPRDLRLKLQKKSSQQSFAGQRGSGVRDLREMLSGTMHPQPVNADPPKAKPSSEIVKVTRRENADVMPVRQSKKVPKPTSSKKTSQPK

SEQ ID NO: 116220 - protein, 69 aa, Oryza sativa
  unsure (1)..(69): unsure at all Xaa locations
  Clone ID: PAT_MRT4530_19741C.1.pep
VAPLQXXSSIXXRXNKCXXYXXXXIYTXDGXXVFDXXXVFXVXRXXSSVXFXXXXXXSVICSRGXXXTG

SEQ ID NO: 116221 - protein, 101 aa, Oryza sativa
  Clone ID: PAT_MRT4530_19742C.1.pep
QSQNLNRNLSLSLSQNLKPLRKSTNPRTNRQRPTSDGDPRRPSTCCCPIEALRTLFRQREKRASPYPVAFLEKNNEQAFGLLFFPFISRCFFKCAPASKGN

SEQ ID NO: 116222 - protein, 379 aa, Oryza sativa
  Clone ID: PAT_MRT4530_19743C.1.pep
RCHRQDGGSRRADAARILCAQDRRGDGVRPRQIRRLRAGEAGSRAGGDQHLAARGKGVTYCNSVPPDVREFFCRELDRIKDAGDQRKSDSGRRVEAARVNYYDLTGDADEEEQMEAAIAASRQDENFRRDVEERGGTYEHGGFFTKKGKQARQAIGESWARFFFTAGIPGRNADNPYFVSAVRETQKWGESVPSPTGNEIDGKYLDSTEKDVKKQFDRFKKDWDEYGVTIMCDSWTGPTSMSVINFLIYCNGIMFFHKSIDATGQSQDANFVLKEIRKVVREIGSEHVVQIITDNGSNYKKACRLLRQEYKTIVWQPCVAHTVNLMLKEVGKMPDHEIVIESARKICRWLYNHNKLHAMMVLAIGGELVKWNATRFGTN

SEQ ID NO: 116223 - protein, 101 aa, Oryza sativa
  unsure (1)..(101): unsure at all Xaa locations
  Clone ID: PAT_MRT4530_19744C.1.pep
MVGCERIVLMVVLMTIKDRFASYCCETLTMPTTSXMGXRHFLLYSIIHYGAPDCEVARSPWGSLGSPXPLVIEGVIMIQERCVVVDCVMRGVLSQLLSEVS

SEQ ID NO: 116224 - protein, 861 aa, Oryza sativa
  Clone ID: PAT_MRT4530_19745C.1.pep
GCKACFVCCYGEKISSKRCSCAQDRRGDGVRPRQIRRLRAGEAGSRAGGDQHLAARGNGVTYCNSVPPNVREFFCRELDRIKDAGDQRKSDSGRRVEAARVNYYDLTGDADEEEQMEAAIAASRQDENFRRDVEERGGTYEHGGGSGSAQPEARKGRSNPITNMLRRATSHRESPAVRDYNLASAKAPVQPRIDTGFFTKKGKQARQAIGESWARFFFTAGIPGRNADNPYFVSAVRETQKWGESVPSPTGNEIDGKYLDSTEKDVKKQFDRFKKDWDEYGVTIMCDSWTGPTSMSVINFLIYCNGIMFFHKSIDATGQSQDANFVLKEIRKVVREIGSEHVVQIITDNGSNYKKACRLLRQEYKTIVWQPCVAHTVNLMLKEVGKMPDHEMVIESARKICRWLYNHNKLHAMMVLAIGGELVKWNATRFGTNYMFLQSFLRKRDLFMQWMASSVFMQSKFSGTLEGRYAHACLSSLSWWENLEAVVSSVQPMYSFLRFADEDKNPNLGEVLLRYQLLKMEYDSLFANQRDKFEAYMEIVNRRMHDLTNETLINAAAALNPRTHYAYSPSATVFQDLRQAFEWMTDIDTAAAALLKVEMYRRKTGEFGRALARRMAIDGKTSPAQWWSMFASDTPNLKKLALRLVGQCCSSSGCERNWSTFAFVHTKCLDGLVLIAMKRPKEAQSTKSPMIVAQELKQMTATTMVKEAKALLMCPPRGHTQQSDHHSPVQFTGEGDFTHATQDQDHGAPSSQRTTIAPGVRQQQQFSDIQQDSSSSFSASNFESGYPTYVYNHPQASDYPVTTWVYEWQEPQCSNISRLPSSYRGYRTKPCGYRVYTVDFEFKNLETKFVRFFAVTARLPR

SEQ ID NO: 116225 - protein, 74 aa, Oryza sativa
  unsure (1)..(74): unsure at all Xaa locations
  Clone ID: PAT_MRT4530_19746C.1.pep
SPPSPPLAPPPTPRRPPSPSSPGGSPPGTTTAAGRRSPASGTPPPRAAASPATPPXMHSPAXPPPPPPPATPPP

SEQ ID NO: 116226 - protein, 2371 aa, Oryza sativa
  Clone ID: PAT_MRT4530_19747C.1.pep
MAGAVLWLQLSRAMLGLLTSGEVSQFRPSLNISPSGTWYRVFSWTHRVWLAEANGVFSVKSAYSLLCAGKTRSAIGKIIWKSRAPTRCKFFMFLAMRGACLTTDNLQRRGWQMASICHLCLADGESCSHIFHDCPFTQQVWTRIRSRLDLPCSTPSEGLINWWYTARKTVHKQDRKTFDAGVILVTWLVWKERNARIFDGKAASAEQATSPMVSTNEHLVGVTGDDHERFLLRIKNRFDRVGLELPTIEVRAEGLAVEAEAYTWRSPAAPTVFTSMGNTLLALANAMHVLPITWKTKYTILHETNAIIKPCRFCGIRKKHIAESLVWKVRSKAAASKLTCTHKALQVSGRVTYNGHGMEQFVPERTAAYISQEDLHAGEMTVRETLAFSARCLGTGDRQDLLNELTRREKEANVTPEHDIDMFMKDETSVENRSFPLEFLALLPSHTTVASESLCSLSSHHPLGPREKVKQGLICCHRVKLHIQSIYTVVVQFEKKSTQLLKNNGLRYLIKLIRKDIAHHLNAIGLCLLSLLVYYCINFLSDSPMLFLLPIRLFIMESANGGESKIVINYIMQILGLHICADTLVGNDMARGISGGQRKRVTIGEILIGPARALFMDDISTGLDSSTAFQIVNFLRQMVHILGETAVISLLQPSHEMYDLFDDIIFLSEGHIVYQGPKEKAVDFFESLGFICPHRKAIADFLLEVTSRKDQQQYWSREDEPYRYFTVERFSEAFHTGQTITKVLEVPLERNLSSLSALETSKYGVRKRKLVKAIFSREFRLLRRNPSVYIVNCVNLTVLSFVAMTVFWHNNMRHDSVDDGGIYLGVLFFFMAETMFSNMCDLGGTIMKLPLFFTQRDVFYPAWAYTFPTWILKIPITLIQVTIWVTMTYYPIGFDRNIGRLAKHYFLLLALSQMSSSLFRLVAGVTRNMFAAKIFGTFTMLLLLLLSGFVVSSKNLNKFWMLGYWISPLMYAQNAISTNEFTAHSWSKVLPGSSESLGASVLESRGLFLETKWYWVGLGALVGYTFLFNCLYTVALACFKSPGRTFLLGGPKVLNKKLEELSRNTPVKSQQKRVTNELQSSVSRRATLPFMPLSLTFNDIRYSVDMPKEKKVCAGTEDRLEILKGVSGAFRPGVLTALMGFSGAGKTTLMDVLAGRKTGGYTEGTINISGYPKKQETFSRVFGYCEQSNIHSPHLTVLESLLFSAWLRLPSEIDSMTRKMFVENVMELLELTSLQDAHVGLAEENGLSSEQRRRLTIAVELVANPSIIFMDEPTSGLDARGAAIVMRTVRNLVDTGKTIVCTIHQPSIDIFESLDELFLLNQGGEEIYVGPLGSHSSELIKYFEVNSNLSAKPIVNYKKEKRLNGMGQVCTVHEAHCAQDRRGDGVRPRQIRRLRAGEAGSRACTYNYVVLLHNGRVEMSDSRDPVWEHGENIPPGWRCKYCHTKRGGGGATRLKQHLAARGKGVTYCNSVPPDVREFFCRELDRIKDAGDQRKSDSGRRVEAARVNYYDLTGDADEEEQMEAAIATSRQDENFRRDVEERGGTYEHGGGSGSAQPEARKGRNNPITNMLRRATSHRESPAVRDYNLASAKAPVQPRIDTGFFTKKGKQARQAIGESWARFFFTAGIPGRNADNPYFVSAVRETQKWGESVPSPTGNEIDGKYLDSTEKDVKKQFDRFKKDWDEYGVTIMCDSWTGPTSMSVINFLIYCNGIMFFHKSIDATGQSQDANFVLKEIRKVVREIGSEHVVQIITDNGSNYKKACRLLRQEYKTIVWQPCVAHTVNLMLKEVGKMPDHEMVIESARKICRWLYNHNKLHAMMVLAIGGELVKWNATRFGTNYMFLQSFLRKRDLFMQWMASSVFMQSKFSGTLEGRYAHACLSSLSWWENLEAVVNSVQPMYSFLRFADEDKNPNLSEVLLRYQLLKMEYDSLFANQRDKFEAYMEIMNRRMHDLTNETLINAAAALNPRTHYTYSPSATVFQDLRQAFEWMTDIDTAAAALLEVEMYRRKTGEFGRALARRMAIDGKTSPAQWWSMFASDTPNLKKLALCLVGQCCSSSGCERNWSTFAFVHTKVRNRLTHKKLNKLVYVNYNLRLRIQQANAQIRVEDDDPLQRLADLSFYETNNHISAWMDNARSNACPELDEDSAESDAPLPSQLVSDLVNLDDLRRTTGASSIAEWADTNVGDTHIGKRKTRKPPKARPSKKVKGKGPRSTSVDSDEETQGSPEYQESNDSSSRTETDDGDDDGRGGQGTTNVPPRGHTQQSDHHSPVQFTGEGDFTHATQDQDHGAPSSQRTTIAPGVRQQQQFSDIQQDSSSSFSASSFESGYPTYVYNRPQASDYPATTWVYEWQEPVWPAQLYAQWQTTSSWTEL

SEQ ID NO: 116227 - protein, 85 aa, Oryza sativa
  Clone ID: PAT_MRT4530_19748C.1.pep
RSQESIQLPLFVSLAVESPSVEPFRALFVTHLLEYCQIYAQLHPLTLRAKLATEERHGAITWTGCLCAPGPRVGDLPRETAVTRR

SEQ ID NO: 116228 - protein, 81 aa, Oryza sativa
  unsure (1)..(81): unsure at all Xaa locations
  Clone ID: PAT_MRT4530_19749C.1.pep
RSVTPTGXXPRPRRRCXQQHVVKGXRSXXIXRSGSGRHLHNHNHGNDYLMGAXKTKVXXDFNXCXGEFPRSASXXFLLKSD

SEQ ID NO: 116229 - protein, 380 aa, Oryza sativa
  Clone ID: PAT_MRT4530_1974C.1.pep
MDEVGRRWTFSRANEGYTSCGPVVEMSYGGGLVPNARGSVLPACPGYPGRSEASCEAGVKILENPSQNLSHPLNRNNPAGATNVQVPTVQQQCKRSHVPSGMITLRKRAFRYLKQGDLTVTEYLHEFYRLARYAPEDVETDEEKQEKFLQGLKDELAVQLLLEDYENFEKLVDKAMQLESEHNRMTNCKRRIVNIPVFPGGNQRQRTEPLPIIGSSVGYHEFLPQEDERNVDNNNIIHQDIDDSINEGTQNGNPSNFDSEKDSKGDSNNGTTDADVSKDFQPPIPTPSQDDRSQADNSAKKTLICYNCKEPGHFSRDCPQPKRNLRHHSGHYARRRQVTRLVVTGANAVPVSLKGSKPKDLIVTRSIHNSRSEEYLVDKV

SEQ ID NO: 116230 - protein, 84 aa, Oryza sativa
  unsure (1)..(84): unsure at all Xaa locations
  Clone ID: PAT_MRT4530_19750C.1.pep
ETEELSEHIGIXSNSKRLDEPNMQDYFFSIFPRDHPKNTSFSTNFFTSIGLGCITXDHERDYLKSIPRHLMQQKPASCIGIHVF

SEQ ID NO: 116231 - protein, 215 aa, Oryza sativa
  Clone ID: PAT_MRT4530_19751C.1.pep
MDAAALLLLAAAAAVALKWLILGSSTARKLFALSMSFSESIAAPPSPPPLAARRSPKSSAHRGDEWSLSRIGRLAADHVTFAASTNEMNGARRGSAACRPTVVVVASLRRHRRRTAGRAHPCRRRALGGDEWSLSRIGSLSANHVTSAASTGCHRRHRKPPPPSPSRSAAKCMQLPQSSCKWYSKTATTKTTCDHARPMYRTILQKRLETKDYPK

SEQ ID NO: 116232 - protein, 102 aa, Oryza sativa
  Clone ID: PAT_MRT4530_19752C.1.pep
HCHHHCDHTPLAQSVAVSLHISSVRRHSHDASQHALTSNTQSDGLIYPTNPKRKFNPNQKPKSRAVVDDLAARRTAWQLPACGTCAVARLPLACCLLCTPVW

SEQ ID NO: 116233 - protein, 259 aa, Oryza sativa
  Clone ID: PAT_MRT4530_19753C.1.pep
MAGKTSKAATLTMKLLVDTKAQRVLYAEGSKDVVDFLLSLLAVPLAGVTKLLTAGDMVGSVGNLYGSVVDKLGADYACRGDVKAALLAPTAALRLGSPADADNGGGALYRCSGCACSRSCYNFVTKVNGTPCPVCKRKMATEVSLVEPDDVSGAGAKVVTSPAAPSGEASSSKAGYAPGKVTYTVMDDLTVAPSSTVSAVAALVALGVTDIRGLQEKTVEVGYDEGLAVLKASLQSKTVLTDVFLGARRTAHRRHPMLV

SEQ ID NO: 116234 - protein, 179 aa, Oryza sativa
  Clone ID: PAT_MRT4530_19754C.1.pep
MQIFVKTLTGKTITLEVEPSDTIDNVKSKIQDKEGIPPDQQRLIFAGKQLEDGRTLSDYNIQKESTLHLVLRLRGGMQIFVKTLTGKTITLEVESSDTIDNVKSKIQDKEGIPPDQQRLIFAGKQLEDGRTLSDYNIQKESTLHLVLRLRGGMQIFVKTLTGKTITLEVESSDTIDNVK

SEQ ID NO: 116235 - protein, 337 aa, Oryza sativa
  Clone ID: PAT_MRT4530_19755C.1.pep
MCWLEITGKLQPAALAPLSGDDVRRLTCLLISPVVGLQQRLVLSPVAGMQQRDAPAGAGITPLKPHQSSPTKPPALATAMDVVSSLSSSPTPAPSVLKSLLLSYAYVSVWITFSISVIMYNKYILDPTMYNWPFPISLTMVHMVFCASLAVVLVRVLRVVAEPTSPPMTPSLYAASVVPIGRALRAVALMLKALMPVVVYCLAIAFRTDSFHHASMLNMLGISAGIAVAAYGEARFDAFGVMLQLVAVTAEATRLVLIQILLTGATPPPAPAPVPAQADRNVEMGLLGGESSASRPAMKPRQVLDCEIAPPSNRATEFGSTGLRVGIDWDAGAIWAF

SEQ ID NO: 116236 - protein, 610 aa, Oryza sativa
  Clone ID: PAT_MRT4530_19756C.1.pep
MPEAPTAKTAPAYGYAPGAHAEALEFIEHVTANAGQVQRRVLGEILAQNAPAEYLRRYGIPGSPDVVDAFRRLVPLVTYEGLQPDILRIANGDTSPIFSGKPISEFLTSSGTSGGERKLMPTIADEMNRRSLLYSLLMPVMSQSVSGLDKGKAMYLLFVKAESRTPGGLAARPVLTSYYRSRQFLDRPRDPYTSYTSPDEAILCVDSYQSMYAQLLCGLVHRADVLRVGAVFASGFLRAIHFLEKHWARLCHDIRTGELDPEITDRVVRDAVGRVLRADPALADAIEDECARASWEGIIRRLWPRTKYIDVIVTGTMSQYIPTLEFYGGGLPLTCTMYASSECYFGLNLNPMCKPSDVAYTLIPTMCYYEFLPVNCNNATAEASHRDLVDLVDVKLGHEYELVVTTYSGLYRYRVGDVLRVAGFKNKAPMFSFVRRQNVALSVDSDKTDETELHAAVSGAVQHLAPFGASLVEYTSYADAATIPGHYVLFWELRAGSTAVPASVFEECCLSVEEALNSVYRQGRACDRSIGPLEIRVVAEGTFDKLMDYAISRGASINQYKAPRCVRPGPVVELLDARVQGKYFSPKCPKWSPGNKQWNKSKDLVGKGDA

SEQ ID NO: 116237 - protein, 373 aa, Oryza sativa
  Clone ID: PAT_MRT4530_19757C.1.pep
MSRLPPRPKLGRHTPLDGRHHEARRRRVRRVQPSVGPIARVAAVIRFLRWRSSWTCWLEINGKLQPAALAPLSGDDVRRLTCLLLSPVVGLQRRLLLSPVAGLQRRDAPAGAGVTPLKPHQSSPTKPPALATAMDVVSSLSSSPAPSPSVLKSLLLSYAYVSVWITFSFSVIMYNKYILNPTMYNWPFPVSLTMVHTAFCASLTVVLIRVLRVVAEPTSPPMTPSLYAVSVVPIGVLYALSLWFSNSAYIYLSVSFIQMLKALMPVTVYCLAVAFRTDSFRHASMLNMLGISAGIAVAAYGEARFDAFGVILQLVAITAKATRLVLIQILLTGATPPPAPTQADRDVEMGLLGGESSASRPAMKPQHAGLLQK

SEQ ID NO: 116238 - protein, 108 aa, Oryza sativa
  Clone ID: PAT_MRT4530_19758C.1.pep
MTCLAPVLLEPLQPLHNRRPLWNGTTATVHCRSTGIGARLGTSRLGDGEQRCGKEREEEKRRASPTMTATDAERTTTKAARGERAPEQPWEGDERERERGHGGKHCQP

SEQ ID NO: 116239 - protein, 120 aa, Oryza sativa
  unsure (1)..(120): unsure at all Xaa locations
  Clone ID: PAT_MRT4530_19759C.1.pep
MRSGLTSVGERSSRGXPCRYRRRSPPSSSASRKRWRGRDLTGHRPNMWGPAVSSSSLRFFPRIGGIKQHLCQVKSKLAHVRVHEYTSKLRCVHVHNEPLIVRHGLPEMKTAYCRIKLTLS

SEQ ID NO: 116240 - protein, 60 aa, Oryza sativa
  unsure (1)..(60): unsure at all Xaa locations
  Clone ID: PAT_MRT4530_1975C.1.pep
FFFFCSXYSHILIWSNINTILHFFSAVYKCTKQYYNIRYTIFQQESTRGRQQVLYAMNAL

SEQ ID NO: 116241 - protein, 89 aa, Oryza sativa
  Clone ID: PAT_MRT4530_19760C.1.pep
VFHLSLEMHPPLRLHRHPMCAEIIEEFQKCHLDHPVKKFFGECTDLKIKLDRCFRQEKALKRRANFEESKKFKEQLLAYKREIAETNQE

SEQ ID NO: 116242 - protein, 53 aa, Oryza sativa
  Clone ID: PAT_MRT4530_19761C.1.pep
QICVSYQICIALNTLVAFTHASPLWLQSGAQEKSCEDRLDNTLISSHPYLLSR

SEQ ID NO: 116243 - protein, 112 aa, Oryza sativa
  unsure (1)..(112): unsure at all Xaa locations
  Clone ID: PAT_MRT4530_19762C.1.pep
AFRDNPGHGSFAPLAFQPSAMTNCVNQRCLSYYGELLSRGGHHXGKTNLSHYGLNPTHVPYWWGNNPTLGEFCFTMIGRAYIXRSKSNVSMNAWVPQASYPCGNFSDTSSFK

SEQ ID NO: 116244 - protein, 215 aa, Oryza sativa
  Clone ID: PAT_MRT4530_19763C.1.pep
SKRKVRSHAQPKALEELKKTCTDTASASIPAADPADGNGEQRWSRPSNLPHRIVIDVCDSGLIRESVFHGVHALDASARFKLFFGLPYASKVPILNAGTNHSDSSKNINRKWSFLGAPEWLAPSPNMAALATLAPCSRHRGTRAVVAVLTGQKGGTSHTGTAPHTTAPAWQARPSSVGRALKPQEDRDSDEGRNPYDVRTRVGYQMEHAPLRDRV

SEQ ID NO: 116245 - protein, 97 aa, Oryza sativa
  unsure (1)..(97): unsure at all Xaa locations
  Clone ID: PAT_MRT4530_19764C.1.pep
LFLHCQQRREDGVSGGGWRHRGAXXSAARTAAARPGRLAXWEDEXNGGGGGPICCSSSSPLRLPARSPTARESLDHISINCIGVTCPAASSNWVRSN

SEQ ID NO: 116246 - protein, 407 aa, Oryza sativa
  Clone ID: PAT_MRT4530_19765C.1.pep
MTVVRAALLLLVALSALSLLAAGSRNDRHAGLGLATLLPIHSCPRQASPSNIVAVARHCDGGELLAGCSSRRGLLQRKKEGTRRKEGGDVEMVVLVVATTSDAASATPAAAFLAMPGWTPGPSIPDGVESFANGAGVRLLRHARGIVEEDDLDLRWEAATGERVSEVVLLSRHTAVSNRPALTVHPIGVPHLRDGVDVPPQGGRPGWAAPPNPRIGPWLRLLRRIAADRGLVPEFEITLEGTHHGPVTNTPTLFVEIGSTEEYWGRQDAADAVALLLWKGLGLGEEESVGNWHGNGEKVLLGIGGGHYAPRHMDIVTKDGVWVGHLLSGYSLPMEEPKQMNGKNVADVGGMWKHSIKVSYEATKAAFPGGEIIAHIDQKSFKGWQKNAITSYLQELNIRVGKPNDFF

SEQ ID NO: 116247 - protein, 118 aa, Oryza sativa
  Clone ID: PAT_MRT4530_19766C.1.pep
MREESAASGDGVSASERRAAVSNGRRPVEISIGNWQNIRGWRATGSIEQPHLRGLGIQMPVASSSATLDGVEVCVFDESPEVFSRAVHAISELTAGEPEPNFPNAEVERLASSLTFLG

SEQ ID NO: 116248 - protein, 55 aa, Oryza sativa
  Clone ID: PAT_MRT4530_19767C.1.pep
MPHRSALYYCSATPRATNERKVARSYGAGESGTAAAEQSGIAAAADKSGTAATAE

SEQ ID NO: 116249 - protein, 69 aa, Oryza sativa
  Clone ID: PAT_MRT4530_19768C.1.pep
YYLMPGSMLNILYTQLHLAGGFRVFNPPFSPLHRLEYPFTSSYLCTKSENKPQIMPYIIVRKAGFRGWG

SEQ ID NO: 116250 - protein, 792 aa, Oryza sativa
  unsure (1)..(792): unsure at all Xaa locations
  Clone ID: PAT_MRT4530_19769C.1.pep
MVDKKHDIDDENIIPVMLDKLTEEQKATLEQMMNQLQNQYLHSFTLTRHGTVQYRPRGSPQPQYLPQYNQLHQMQQQLGGTPRQQPWVDMIANVMREQFGLKPKDGGNLYWHPYPEYFERVPLPNRYKVPDFSKFSGQDNVSTYEHVSRFSVQCGEASANDALKVRLFPLILSGSTFTWFSSLPNNSIQSWADLEKQFHKYFYSGVHEMKLSDLTAIRQKPKESVLDYIQXFRDMRNGCCILALTDSQLANLTFQGLLTPIKEIFLVQAFESIAHLAQKINNVDQYASESDEDDPEVAATEWARNKKIVTCQWVRNSGREVKFDFDITKADRIFDLLLXEKHIQLPAGHVIPSANELGKRKYCKWHNTGSHFTNDCISDNRFXSAIEQGRIKFDDPKKPMKIDGNPFTVNMNEGMRLPSIEDCPGCGGSRRRYVGSSSRSHARREDRQVQKKLPVHQRLGPTHQDSFQEEDAEDEDETRKPQWCPSGIFTKNQKRRIQRTRNMEQIQEAKEEINHRLKRTRNEWRVKSKVVSADEVEADKARWLAKGKAVASSLVYMVFILPAKYCAKPADAEIMEESLAKLGLSPKQAIFEKPEGTGHRHLKPLYVKGFVNGKPISKMLVDGGAAVNLMPYSTFRKLGKNSDDLIKTKMVLKDFGGNPSEXKGILKVELTIGSKTISTTFFVIDGKGSYSMLLGRDWIHANCCIPSTMHQSLIQWKGDQIEIVPADKSVNVGNADLTIWEMDGCPIVIYNQLEMESPNCCFEGVVEGSNFYTEDTVDDLDDKYGHRAERIS

SEQ ID NO: 116251 - protein, 84 aa, Oryza sativa
  Clone ID: PAT_MRT4530_1976C.1.pep
MVNLFLVIIAYADCFSADGKPGLVVVASANHAFVANVQSHPHANDDGVMLANLQAMAQIDNDKSWYVPSIAVDLPSCTDQGVGS

SEQ ID NO: 116252 - protein, 158 aa, Oryza sativa
  Clone ID: PAT_MRT4530_19770C.1.pep
MLAARTRFAGGGGAAVVLLLIVASTVATRAAVADDFFSPLSPLLAPVIGSMCKTVACGKGNCTAASGFPGYRCECEPGWKQMHVGDQASFLPCVIPNCSIDRACSNTIAPAPAPLPSPKNFSLPTDPCQLAYCGSGAHARMGQASATTASAVRVSVTF

SEQ ID NO: 116253 - protein, 41 aa, Oryza sativa
  Clone ID: PAT_MRT4530_19771C.1.pep
PPLGRFPVRALGQPGAVGVIKNVEKRAPPGARVPRAPPKKK

SEQ ID NO: 116254 - protein, 67 aa, Oryza sativa
  Clone ID: PAT_MRT4530_19772C.1.pep
LPYSQQNKCITYSHTVKRHLFQKNCFINCTYVTTSFIHSCYVRRHVYKVWMQFVEKKKIESPDKYVT

SEQ ID NO: 116255 - protein, 101 aa, Oryza sativa
  unsure (1)..(101): unsure at all Xaa locations
  Clone ID: PAT_MRT4530_19773C.1.pep
APHLTGLSVRAFVWLMAATIFGRLLTSVLKSKNNITRMLNDTVIPERPMYTARVPVXEPEDGALLLEDDRDLVDRAVDALQCLPRYDPVLLWPDDTPPQLY

SEQ ID NO: 116256 - protein, 557 aa, Oryza sativa
  Clone ID: PAT_MRT4530_19774C.1.pep
SNRLSRRRLAPRVAAAAASVGAEEKGRGAMAKGDDALARKRNKVRRKRMRSSENAVSARVAGIIASKRRRKSGKRRACEGMCFSLPTPEDPFNDRHGKKRKGDDEPTGDAPAAAAAGRDESKKKKKKKKKKDSSAKKQPAREAAAAAAANAKSREKDGAEYDRPSKFLVVCLNAIRDAAASEDGGGGGIHDTGSWGVELWNCCSAAPPTHVLDTSGECATREKTAWLVSTACDIVARKEKLAVVVSCPFLLYLVPSQEKAVQVRSICKPLKSLGIHSVSLHPGASIEHQISGLKSCEPEFLISTPERLLELIALKAIDISGVSMLVIDGLKCFTDLNVSDKLCSIRDAILSNPQITIFSDPSDRRVAALATKLVGGKKITRLCTNDSVTSRGAFITQKIHICPSKDQKAPKVKEILEQILNDHARKTAKVLLVTASDHEAQHLSSSLKLQNCTVTNDSHGNSFTICSSVGLINVLVKDWENITTANFEDFDTVLVADLPPSVDEYIEILAGASCHVLVGEVHCIFSSADALLAKPLSEVLTSCGQVVPEFLRKLASS

SEQ ID NO: 116257 - protein, 65 aa, Oryza sativa
  Clone ID: PAT_MRT4530_19775C.1.pep
QLQRIFWVAFYSFHSQSLRNVFKDVPPVYTASQKDTDVSTSVMYLYTLNQAHSSIVHLFSNKFLC

SEQ ID NO: 116258 - protein, 188 aa, Oryza sativa
  Clone ID: PAT_MRT4530_19776C.1.pep
MAALSVFASSILSKVTTFAVEYALADIKLACTVRNAERKQSTSSSLKHWLENLKDIVYDIDDVLDDVGTRALQQKVGKGEIRTYFAQLFIFPFELGRKIRRVRERLNEISALKRNFDLKEEPIDTPSDRIVQRETYSIVDERKIVGRDKAKNDIVKVISEAAESNSDTLSVLPLIGMGGVGKTALAKL

SEQ ID NO: 116259 - protein, 56 aa, Oryza sativa
  Clone ID: PAT_MRT4530_19777C.1.pep
KVIYIYIYIYIYIYIYIYIYICVCVCVCVCVCVCVCVYMYIYIYVYIYIYIYIYIY

SEQ ID NO: 116260 - protein, 64 aa, Oryza sativa
  unsure (1)..(64): unsure at all Xaa locations
  Clone ID: PAT_MRT4530_19778C.1.pep
PENRGVELSSCNSNVPTLMREHSXXSWTRREFGHQQPRRRRGPRTPSSSFNAXQRFSCSCASRN

SEQ ID NO: 116261 - protein, 681 aa, Oryza sativa
  Clone ID: PAT_MRT4530_19779C.1.pep
MLNLPSLDLEDLEEDITEEELKATIFSMPAEKAPGPDGFIRAFYKVAWEIIKEDLLKAVISFFNLNTLQLRDLNSAFICLLPKKDDANGAEHYRPISLIHSLSKIISKLLANRLAPELHELVSPNQSAFIRKRAIHDNFLYVQNMVKFLHKSKKQSLFFKVDIAKAFDTVCWPYLLEVMRYFGFGTRSLNWISNLLATSTSQILLNGVPRPSIAHVSGLRQGDPLSPMLFILAMEPFHRIVKAAESASLLSPIGGRFDRFRCSLYADDVALFMKPEPNDLSALLQLLSFFAQASGLHTNVSKTEIYPIRCEGIDLTSLLANFPGLIKQFPCRYLGLPLHFRKLRKVDFLLLIEKIGSRIPGWKGRLFTSAGRKTLVQSVLSSMPTHHLIALQAPKWVLKRIDRYQRAFLWKGEDPDKTNPGSSLVNWQTFSWKDEGKPWAGMPVPCDETDRRLFQAATSITLGNGEKTSFWHDNWLQKCCPKDIAPSCFRLAKRKQRKVQVVLLGNKWLASFRQFSTVKEIHELVHLGSLSQDVNLSAIPDDISWKWNEAGIYTSKSAYLFQFEGSFASINFSSIWKAPAEPKTSECPFVRQVWNLVCSWLNLAGGNAQATGGTSNWWTEIDRQGSNEQKLKTRGALLTTWWNIWLERNNRIFNSSVISERDIAYFVKQEIDLRSSAFKPP

SEQ ID NO: 116262 - protein, 118 aa, Oryza sativa
  Clone ID: PAT_MRT4530_1977C.1.pep
MAAPPRAPSPARACTRGYDPGTCVCCDGDPDGDGSVKYKFFRGLSNAANLELVAEAGMGHEDMVEIEESSSSIGQLVQFQNLERVKGKEAERHPHGFSKLVLVLKSLEEGGVDQVPVV

SEQ ID NO: 116263 - protein, 571 aa, Oryza sativa
  Clone ID: PAT_MRT4530_19780C.1.pep
MLNLPSLDLEDIEEDITEEELKATIFSMPAEKAPGPDGFIGAFYKAAWEIIKEDLLKAVISFFNRNTLQLRDLNSTFICLLPKKDDANGAEHYRPISLIHSLSKIISKLLANRLAPELPELVSPNQSAFIRKRAIHDNFLYVQNMVKFLHKSKKQSLFFKVDIAKAFDTVCWPYLLEVMRYFGFGTQSLNWISNLLATSTSQILLNGVPGPSIAHVRGLRQGDPLLPMLFILAMEPFHRIVKAAESASLLSPIGGRFDRFRCSLYADDVALFMKPEPNDLLALLQLLSFFAQASGLHTNVSKTEIYPISWKDEGKPWTGMPVPCDETDRRLFQAATSITLGNGEKTSIWHDNWLQKCCPKDIAPSCFRLAKRKQRKVQVELVGNKWLASFRQFSTVKEIHELVHLGSLLQDVNLSAIPDDISWKWNEVGIYTSKSAYLFQFEGSFASINFSSIWKAPAEPKTSVQILCEESRGDSRASDIVDCHNTITFQVQISTEISGLISRCEYGSVCKTVACAKGGMREGDPHAGEGVIGVKVRHCSRRTSVTSTADCAESPRSVRIHIPLLLKWIEI

SEQ ID NO: 116264 - protein, 113 aa, Oryza sativa
  unsure (1)..(113): unsure at all Xaa locations
  Clone ID: PAT_MRT4530_19781C.1.pep
CFSHSSETKLCIQTFARQLFLPTTKRTWSSRSXSSQRDGGMSNNGSCAKRXISRTEASIVASAGVDXESYSNDALIARSTPGSVLAAEISQCKLEAALLGLEHREPNDKELDT

SEQ ID NO: 116265 - protein, 116 aa, Oryza sativa
  unsure (1)..(116): unsure at all Xaa locations
  Clone ID: PAT_MRT4530_19782C.1.pep
MRPASEDVGVFAGGPLNCIFSGGVLNPPTSQIIFYGGLNEPTYDDRQEKCDDEVLSWDEDVIVVAEEEEEEVHAVEPVDDDDVGGNGXHSIVDDADDGNVSVDDGKFADLEEMLRH

SEQ ID NO: 116266 - protein, 91 aa, Oryza sativa
  unsure (1)..(91): unsure at all Xaa locations
  Clone ID: PAT_MRT4530_19783C.1.pep
METXAQXLQRLXLVSGLXXXXWSLXPXTXXXGSTGSTNRRXISPVXFVFFSFSLXXPNXIXMXXCXKVSXVTFGVXPKKKKKKKKKKKKKK

SEQ ID NO: 116267 - protein, 126 aa, Oryza sativa
  Clone ID: PAT_MRT4530_19784C.1.pep
MAEGLAAGGEAAVVRRPSDGALPSARSGGRKGGGGAGPAAAGGAAGDGWRRWVEAAAASAVMAAPSPPLAATNEVAGSGIGGGQGGKIRRRRPFPRRRRPFPRHRLLPWGRFVIDECLVHGVICDL

SEQ ID NO: 116268 - protein, 87 aa, Oryza sativa
  Clone ID: PAT_MRT4530_19785C.1.pep
MARSSAVMRVIMAALAVAAIILSATLHEAAAARPVHGWNPQAKGAAAAATTRHGGFAAVQLAGSVPSCCTNGGGAGNCPPGVTCPFE

SEQ ID NO: 116269 - protein, 64 aa, Oryza sativa
  Clone ID: PAT_MRT4530_19786C.1.pep
HIIFFLILLVDTAPTGTVSSWTKTTIANQRANTWDKHKEVLTRKEPPLSYGSPTYTCQGDEDCA

SEQ ID NO: 116270 - protein, 82 aa, Oryza sativa
  Clone ID: PAT_MRT4530_19787C.1.pep
MVERGRKMGSGVAKSNQRDRMGSAMDDVPNTHGPEDDVIVDGEHKRYDCSECGNTNNTYGECAIHTQDEQGTKWQLTTNNVV

SEQ ID NO: 116271 - protein, 1380 aa, Oryza sativa
  Clone ID: PAT_MRT4530_19788C.1.pep
MTSSLLDDNANPGINQGSSTSTILVWTQVGEIVFPVYTTMPISTGPAMAGSESDVVTTLTDSMSKDPPAEAENGTSTTSEPEKDPNATQSCPSDKKYEPTRTTSEATRERGIQRISPTRDVYCPIHKTKNHDLSSYKVLLSAMRTSPPKVQQSQISPRDADKERGAAAISDRFVGVIDIDPHEPYVLHLLEDQASSSTSTPRDVYAIDGTSTSRGGNTEAEDQVATPAQHISTINAILRETPYDPVLNDDLEQWTERLRESVANLSNTFEEAAARVPPEQPPTGGDNGELPEQRASPRQATPPPRGTSDLRDHLNDRHPRRTYDRRQPTAPGGGCRAFSRALRDVRWPERFRPGAIEKYDGSTDPKEFLQSGVRDRYTTQELATRRITTARKLFEIVDRCAHADDALRRKNDKPKTGGEKKSAKDAPESSKKNSRRSGKRKAQTEVLAAEYADPPKHPDSQGDDTKKIWCPIHKSDKHSLESCFVFKKALAKQLALEKGKRVRVVEKAAEAATQDSDSAYPDSDLHVSHIFGGSTAYSSKREYKKVEREVCSTWQGAAPTMKWSEQKIEFSEADHPKTAVIPGRYPIVVEPTIRNIKAAQVLIDGSSSINLLIANTLGRMGIPRSELTPTDQPFHGITPQSSSKPLGKITLPVTFGQANNFLTEQITFDVAEFDTAYNAIIGRTALAKFMAASHYTYQVLKMPGLKGTITIQGNAMLAVQCDKRSLDMVEHTPNPPATAERPKKPSDMPGVPREVIKHKLMVRPDAKPVKQKLRRFAPDRKQAIREELDKLLKAGFIRDVLHPEWLANPVMVHKANGKWRMCVDFTDLNKACPKDHFPLPRIDQLVDSTAGCELLSFLDAYSGYHQISMEAEDAFIALKCYLSNPPVLVAPQPNEELFHYIAATPYSVSVIIVEREKVQRLVYYVSEALHDAKTRYPQIQKLLYAVIMTSRKLRHYFQAHRVTVVSSFPLGEVVRNKVVVSRIAKWVVELSQFEVHFVPQTAIKSDGQTDNETWTMAFDGALNSQGAGAGFILTSPSGDQFKHAIHLNFRATNNIAEFEGLLAGIRAAIALGVKRLIVKGDSELVANQVHKDYKCSSPELSKYLAEVSKLEKRFDGIESHSNTFLGVLTKPSVKAANDEDSTVVPDIGSGATEAERAVADIETTDDWRTPLIKFLSSDELPENDAEAEKITRQAKIYYMIGNDLYKKAPNGVLLKCISFDDGKHLLLDIHEGICGSHAAGRTLVEKVFRQGFFWPTALKGACDMVQRCEACQFLSKHTRLPAQALQTIPLIWPFSCCGLDILEPFPRGQGGYRFLFVAIDKFTKWIEATPTGEIKADNAIKFIKGIFYRYGLPHRIITDNGSQFISADFQDYCIGLGVKI

SEQ ID NO: 116272 - protein, 69 aa, Oryza sativa
  unsure (1)..(69): unsure at all Xaa locations
  Clone ID: PAT_MRT4530_19789C.1.pep
LRLCXNRDGPPKSQCSPGAPHLVASAAAXLLSETAATLVESAAASRICPPASLSEDEKREEEKENIMCS

SEQ ID NO: 116273 - protein, 979 aa, Oryza sativa
  Clone ID: PAT_MRT4530_1978C.1.pep
MLYAILMAPRKAPSPYLQAKQIGSPRFVRCSGKMLCEEGQTCTLPRLHAVDKNDRFVTGLTLTISSAHSHVPTTRSPPAEVEFFLFSLMAEQGKTHDLSPSVSGDDGEPNPRRRARTPPPPPRQSPKQGEALERVDKSAASPAAGDAGERRDGERRLLVYGDGSTPQGALQAAGALLRHPPVVHDPESPAQRWLEDVANLVMTAQQRLGAGGRSATTTKTSGAATTGSVSSRRRARRAAAAARHSAATPSSTPSTREDQHGEPDARLNIGRRRNSRRTPRATEGASSSRVSPRHGREDQPSVPPAGGVGCRAFVASLRNVRWPPRFRPTITEKYDGSVNPTEFLQVYTTGIEAAGGDDRVMANFFPMALKGQARGWLMNLPPASVHSWEDLCQQFTMNFQGTYPRPGEEADLHAVQRGDDESLRSYIQRFCQVRNTIPCIPAHAVIYAFRGGVRHNRMLEKIASKEPQTTAELFQLADRVARKEEAWTWNPSGSGVAASAAPGSAAQTGRRDRRRKKSLYKKGARRPRKKKEKAIQDWRGPGGSLRRARVTSLVVVIVRTTVAALLVGVEGEREPRGRTLEAVNDVVGGVPDLRACAVLGSERELFQRCPRGEVRVREAPKPNGGPRPPTARVGPPPACPTVSGAPDPQDSLGATAGRPRLSPSYPEDIGAEAEGAPRCLSDEERPGDAAPSEEDRPRRKVQRPVYFVSEALRDAKTRYPRAQKMLYAILMAPRKAPSPYLQAKQIGSPRFVRCSVIRQENPGRSESWVRNKHMSSFNEWLKNRIARLQNLPSETLQWLSQGPEWSATTWQGYDINGYTFHTVKQDSKCTVQNSGLRIEAASDGGRRDQYYGRVEQILELDYLKFKVPLFRCRWVDLRNVKVDNEAFTTVNLANNAYKDEPFVLAKQVVQVFYIVDPCNKKLHVVREGKRRIVGLDNIADEDDYNQHVHGIGQEIPLEEEEEEDEVQYARVDHEEGLFL

SEQ ID NO: 116274 - protein, 63 aa, Oryza sativa
  Clone ID: PAT_MRT4530_19790C.1.pep
MPGGEKDGKLAGKAAGFQASTPGTEMEAEAGEMRGSGVAALAAWGVRRWGQCDMADDSKKESW

SEQ ID NO: 116275 - protein, 63 aa, Oryza sativa
  Clone ID: PAT_MRT4530_19791C.1.pep
HNTHIYKLVIRVVVLVSIMVKLIKYCSCSSCQLSTASVSTHCSACPKDLIIQLIIQPLLTAQA

SEQ ID NO: 116276 - protein, 54 aa, Oryza sativa
  unsure (1)..(54): unsure at all Xaa locations
  Clone ID: PAT_MRT4530_19792C.1.pep
MLAETPDPNARLSNGRSTTPFLNFKTHEPKGITSDIMAKGTPXHVKKQCFYTGV

SEQ ID NO: 116277 - protein, 307 aa, Oryza sativa
  Clone ID: PAT_MRT4530_19793C.1.pep
MGPKRPSVPKFGTWEADNVGYTLYFDKIRENKGATAPPLRHPYNHNDPAENPGVIRAADNLAAAPSSRPATSSGHRESQRHHQQPPGSHQHHRRSGSVASDPGDFQSKFAPPPQFRPSPSPSQYDHHSSDHRHGHGHHPPHAGVQLRRRWAPRARASAVPKFGVWDEQNGEAAAQGFTVMFDNVKRSRAAARGAGAAGVVPRSPPQEISAANMRHSRDHSLMSKVHVVCIAADVRVLPTNHKRMRTNGDVSLIRSCTCINFSLVSLLLLVKKEIEVTQSMVTNAAAACVPPLLGYISLARNKFSLSP

SEQ ID NO: 116278 - protein, 85 aa, Oryza sativa
  Clone ID: PAT_MRT4530_19794C.1.pep
GHYRIELVLNIGANQVCLMALYISPDPECHETEVGRDRAPVTLVQDAGLATMVRRANPLGFLKTRPLPICGDLLKSYALGTAPSY

SEQ ID NO: 116279 - protein, 915 aa, Oryza sativa
  unsure (1)..(915): unsure at all Xaa locations
  Clone ID: PAT_MRT4530_19795C.1.pep
MPLLRGGLVSVVLLLLASPFFFSANPAATAVGDCPLDFSWANFTLASAACSDPTQRAACCRYINAFVAISMARYANATGRLGVPPAFSEICLSSVSETFKLRGIPTDADVFCGLGPKIRXGPLSLDITCKTCLNYGIVXLHRLIGSDDNVGLSVCRNAVFVTLATQQGIFSYDDIVKCFFGVQGITIFPGPSSVTSTPASSPNVTTPVDAPAPKTKTVLQKHHQPYRITVIPGIGIAVILLAVLLQLVLVILIRRKNRELKNADLHAQNPENAFCQSQSWRCPEGQSPMFQRYSYKETMKATNNFSTVIGKGGFGTVYKAQFSDGSIAAVKRMDKVSRQAEEEFCREMELLARLHHRHLVTLKGFCIERKERFLVYEYMANGSLKDHLHSSGRKALSWQSRLQIAMDVANALEYLHFFCNPPLCHRDIKSSNILLDENFVAKRDDNTICGSYWSCYWSETIPRHQNLLSGTGHLSSGKITPEFVDPTIRGLVDMDQLHLVVSIVQWCTQREGRERPSIRQVLRMLSERLDPGNGSFGEGMEDAEGGFYPRNSKFRVHQKDLFPHGGLFSLASVSELHCQIKKKLEREQRSKQIKKKKTRKMHAKTDSEVTSLAPSSPPRSPTSRGGRPVYYVQSPSRDSHDGEKTATSVHSTPALSPMGSPRHSVGRDSSSSRFSGHPKRKGDKSSSGRKGAPAGKGWQEIGVIEEEGLLDDEDERRGIPKRCKYFLIFVLGFVVLFSFFALVLWGASRSQKPQIVIKSITFDNFIIQAGTDASLVPTDMATTNSTVKLTYRNTGTFFGIHVTADPFTLSYSQLTLASGDLNKFYQARSSRRTVSVGVMGNKVPLYGGGPTLTAGKGSGSMAPVPMILRTTVHSRAYVLGALVKPKFTRAIECKVLMNPAKLNKPISLDKSCIYL

SEQ ID NO: 116280 - protein, 40 aa, Oryza sativa
  Clone ID: PAT_MRT4530_19796C.1.pep
MLKTGSLGRLAVYSIGAAELRAIRGCSIGGALGGDDKCEE

SEQ ID NO: 116281 - protein, 93 aa, Oryza sativa
  Clone ID: PAT_MRT4530_19797C.1.pep
MAAMVIFFTALLLLASSSSCLARARMMMMPGDHAVNGKETSASSKEATSPHDLLQGVAPPLPPSPPATEIIRPDSSGWMPQGSVPSPGIGHRA

SEQ ID NO: 116282 - protein, 85 aa, Oryza sativa
  Clone ID: PAT_MRT4530_19798C.1.pep
TGSGTQIKGSRMGSKQMGPPKGPKLGQGPKTCKNWGWEPSGGTTLTLTQPVKGHHGGTTITFFGHKTKLGGGPSPIWEGRTPPLA

SEQ ID NO: 116283 - protein, 55 aa, Oryza sativa
  unsure (1)..(55): unsure at all Xaa locations
  Clone ID: PAT_MRT4530_19799C.1.pep
AGWVKAASEILTEGRLNYFWNPSLSQAHRMLPIWAAQVALMGAGXGYRIAGGAVG

SEQ ID NO: 116284 - protein, 1534 aa, Oryza sativa
  Clone ID: PAT_MRT4530_1979C.1.pep
MSAHGNVSWGCVLWVQLYTSDQSKTIRIAVPAVMGGRPDSQWVVLSLALFSPTPELKFFSAGAVSERFAACGLAGGRYHVLVMVKTRNDPRDSNGASGSEEQINGAHTSGASSNIPSPPPENPMVIQMMTMMMQQMQQHYHEMLQQAQQNQQSGPPPLHLSKLLDFLYIKPLTFSSTTNLMEANDWLHAIEKKLNLLQCNDQEKVAFATHQLQGRHRFPRGSWHKRREFRALQQGTRTVTEYLHEFNRLVRYAPEDVRTDAKRQEKFLFGLDDELTNQLISGVYEDFKKLVDKAIHQEEQRNKMDRKRKAAQFRTPQGNSQKPRFMTGQLGEPSTLIVRQHRPYHSGNFNNDYNGGSHNSSEQHHHNSTPPPLMAPAESELPAMSAQSEQLKKESAGKPGPCFNYGKHGHFASKCPKLKRAGPKFVQARINHASAEEAQAAPEVVLGTFLVNSYPATVLFDSGATHSFISKKFAGTHGLSVVELKIPMRVHTPGNDMNTAHYCPSMTIEIKRSPFLSNLILLESKDLDVILGMDWLTRHKGVIDCASRTITLTNDKGEKITFRSPVSQKSVASLNQAAIKEQTEIVEKSPKELEDIPIVQEYPEVFPEDLTTMPPKREIEFWIDLAPGTAPIYKRPYRMAANELAEVKEQVDEQLRKGYIRLSTSPWGAPIIFVEKKDKTKRMCVNYRALNEVIIKNKYPLPRIDDLFDQLKGAKVFSKIDLRSGYHQLRIREEDIPKTAFTTRYGLFECTVMSFGLTNAPAFFMNLMNKVFMEFLDKFVVVFIDDILIYSKSEEEHEQHLRLVLEKLKEHQLYAKFSKCNFWLSEVKFLGHVITAQGVAVDPSNVESVTKWTPPKTIFQIRSFLGLAGYYRRFIENFSKIARPMTQLLKKDENFKWSVECNQSFEELKKKLVSAPVLILPDQMKDFQVYCDASRQGLGCVLMQEGRVVAYASRQLRPHETNYPTHDLELVAVVHALKMWRHYLIGNCCEVYTDHKSLKYIFTQPDLNLRQRRWLELIIDYDMSIHYHPGKANVVADALSRKSYCNALGTEGMCKELQQELEHLNLGIVEHGFVAALEARPTLMDQVRAAQINDPEIAELKKNMRVRKARDFLEDEHGTIWLGERLCVCVPDDKELKDLILTEAHQTQYSIHPGSTNMYQDLKEKFWWASMRREIAEFVALCDVCQRVKAEHQRPAGLLQPLQIPEWKWEEIGMDFFTGLPRTSSGHDSIWVAVDRLTKVAHFIRVHTTYTDKRLAELYLSRIMCLHGVPKKIVSDRGSQFTSKFWQRLQEELGTRLNFSTAYHPQTDGQTKRVNQILEDMLRACALDFGGAWDKSLPYAEFSYNNSYQASLQMAPFEALERLRIAQSRQKSYTDNRRRELTFEAGDYVYLRVTPLRGVHRFQTKGKLAPRFVGPYKILERRGEVAYQLELPSNMAGIHDVFDVSQLKKCLRVPEEQANSEHIDIQEDLTYVEKPVRILETSERRTRNKVTRFCRVQWSHHSEEEAIWEREDELKAAHPHLFASSSESRGRDSI

SEQ ID NO: 116285 - protein, 709 aa, Oryza sativa
  Clone ID: PAT_MRT4530_197C.1.pep
MSGDRYGGGGGGGGGGGGGSGSGHRRDRYAEGGRRGSCSPHPQDRYGSGRRGGGSGRGGLVDGDRSHPRDRTGGGDHYGAGEGSGPRMDRHAEGGRRGSCSPHPQDRYGSGRRGGGSGRGGLVDGDRSGGGDRYGAGGGGGNGNGKGSRSRSAHPRDRYSGGGHLYGGGGGYTSDRGPPTCSHRYDGQSSKEHGDSFYSGGNSSKFADTPRNNQHQPLTSMRFILAGFGSPLKAEYKQLINGMGGQVLTSLEYEIATHIVPMGGREGAAIVWELDGKRVYSKEWLDSLLYVRPKALEASYTGRTRNGSQALYPGERRVRRRINFDSYHDDGASLCSKHHDIFKCPFDKSTQTTLLQFAEKNRKNLIYAGPTPGSFDTHWSIVGSTEIKLKLRRAFRLIQALHKENISLCGKFGAENFFYDDDNNARIGNLMEDNLKYGADLSDKNLDYESFVKMVKKEVFVRTSIPNSLSEWLCLMSSGVKGFEYLLCHHDGLMEPRQNASSFMSLHDIFLEIETSDPAAYGSVLSDLRQYNYWKSKMPNNSFLKSTKEYMDKDGKQIEYKDDVKDLLRFLRNCRRHAAQFKEDEFPSIVDHFYPKLMCDFQKAMFKEVEHNSKEEVSMAYFSRLPAGCPCRGQLLTMDHRLEENASGGEVGPLGCWPGGLCLSRSIGCRGAISHVDQVKRQRHAGCRDLPAELAAKLMQALKRNWAER

SEQ ID NO: 116286 - protein, 174 aa, Oryza sativa
  unsure (1)..(174): unsure at all Xaa locations
  Clone ID: PAT_MRT4530_19800C.1.pep
RSKQSERHGRRHHGPLVPGAGQARPRRCSARGSPCASRRTQTRRVGEPWYXXDRXLYLXPLSGXXPNYLTXXFPGDYGWDTAGLSXHXETFAKNXXLXVIHSXXAMXXXXGCLFPELLPXNXXXFGXAVXFNXGSXXFXXGGLXYLXNPXLIHXQXILPIXXVXXVLXGXLQGF

SEQ ID NO: 116287 - protein, 291 aa, Oryza sativa
  Clone ID: PAT_MRT4530_19801C.1.pep
MAMGDAKPSAVHIPMPARDRDRDRDRELLLVPPAAVATSASASASAAGRDSDSDDESKPSSASAAAAAAQTGREAFHKVVHSWASKKFMTGCVILFPIAVTFYITWWFFRFVDGFFSPIYAHLGINIFGLGFVTSISFIFVVGVFMSSWLGASILGLGEWFIKRMPFVRHIYNASKQISAAISPDQNKHAFKEVVIIRHPRIGEYAFGFITSEVLLQDYSSEEQMYCVYVPTNHLYIGDIFLVNSSDVIRPNLSVREGIEIVVSGGMSMPQVLSIVETEQNQWSRMRSSRS

SEQ ID NO: 116288 - protein, 41 aa, Oryza sativa
  Clone ID: PAT_MRT4530_19803C.1.pep
LCSRLAYRFRPWACPKNPSCTAVSVHSGVYLSCTNVLEMIK

SEQ ID NO: 116289 - protein, 575 aa, Oryza sativa
  Clone ID: PAT_MRT4530_19804C.1.pep
MGFLVGLVLGIAAGVALIVGFARAENSRAARRRQLAATIASFSKMTIEDSRKLLPADLYPSWVVFSTQQKLKWLNQELIKIWPFVNAAASELIKTSVEPVLEQYRPIILASLKFSKLTLGTVAPQFTGVSIIENDESGIVMELEMNWDANPSIILDVKTRLGVSLPIQVKDIGFTGVFRLIFKPLVDQLPCFGAVCFSLRKKKKLDFRLKVIGGEISAIPGISDALEDTIKNAIEDSITWPVRKVIPIIPGDYSDLELKPVGTLEVKLVQARDLTNKDLIGKSDPFAIVYVRPLPDKMKRSKTINNDLNPIWNEHFEFIVEDADTQTVTVKIYDDDGIQESELIGCAQVTLKDLQPGKVKDVWLKLVKDLEIQRDRKDRGQVHLELLYCPFDMKEETPNPFRQQFSMTSLERTMTSMENGSGSNGFNRLSSRKKKEIIMRGVLSVTVISGEDLPAMDMNGKSDPYVVLSLKKSKTKYKTRVVSESLNPVWNQTFDFVVEDGLHDMLMLEVYDHDTFSRDYMGRCILTLTKVLIEEDYKDSFKLEGAKSGKLNLHLKWSPQPIFRDSREEDSLRFR

SEQ ID NO: 116290 - protein, 1063 aa, Oryza sativa
  Clone ID: PAT_MRT4530_19806C.1.pep
MLLRNEDEQEVISRERKDRRDFEQLSQLAERMGLYSRQYSRIVVFSKVPLPNYRSDLDDKRPQREVSIPSGLQREVDALLSDYLARKRTSSGSFPNAAFSRSSSTDSFATDESFLEQQDNQTSTSAVIERIQRRKSLQLRNQQESWQESHDGQSMMEFRRSLPAYKERQTLLEAIAQNQVVVVSGETGCGKTTQLPQYILESEIDAARGATCSIICTQPRRISAIAVSERVAAERGEKIGESVGYKVRLEGMKGRDTRLLFCTTGVLLRRLLVDRNLKGVTHVIVDEIHERGMNEDFLLIVLKDLLPRRPELRLVLMSATLNAELFSSYFGGAPMIHIPGFTYPVRSRFLEDILEITGHRLTPYNQIDDYGQEKSWKMQKQALRKRKSQIASVVEDTVQAADLRDYSARTRDSLSCWNPDSIGFNLIENVLCHICQKERAGAVLVFMTGWDDINALKEQLQANPLLGDPSKVLLLACHGSMASSEQKLIFDRPEPGVRKIVLATNLAETSITINDVVFVVDCGKAKETSYDALNNTPCLLPTWISKASARQRRGRAGRVQPGECYHLYPQCVYEAFADYQLPELLRTPLQSLCLQIKSLRLGSISEFLSRALQSPESLSVENAIEYLKVIGAFDRNEELTILGKHLSMLPVEPKLGKMLIFGAIFNCLDPILTIVSGLSVRDPFLTPFDKKDLAESAKLQFSCRDYSDHLALVRAYEGWREAERDRNGYDYCWKNFLSVQTLKAIDSLRRQFLFLLRDTGLVDENMTACNKWSRDENLVRAVICAGLYPGVSSVVNKEKSISLKTMEDGQVMLYSSSVNGKETKIPFPWLVFNEKVKVNSVFLRDSTAISDSILLLFGGNIKQGGLDGHLKMLGGYLEFFMSRDLASTYLSLKSELDNLIHCKLQNPRMDIQTSEELLSAIRLLVTEDPCNGRFVYGRQEQRSKKAKTMFSAAPMSHGGGGNGGDNAKNQLQTLLTRAGHDNPSYKTKQIKNSLFRSTVEFNGMQFVGQPCANKKLAEKDAAGEALNWLTGGAPSDSRDPQDMDHMSMLQKPPRRKRHHHRRG

SEQ ID NO: 116291 - protein, 59 aa, Oryza sativa
  unsure (1)..(59): unsure at all Xaa locations
  Clone ID: PAT_MRT4530_19807C.1.pep
XEFCVSTTLSPEVPATRLPSSSHFHAHCFTYLTPTXALLLIFVLKLLDVHVVHLLCRXH

SEQ ID NO: 116292 - protein, 144 aa, Oryza sativa
  Clone ID: PAT_MRT4530_19808C.1.pep
MDYVKQGVDQLGQAAEKVKEAVRSATSTVVGAVSGDANTNQKAEEAKRHGDRAADNFRNAANEAKNRSGYGNTSSSSRSNSFSSDESTTDKIKDKANEFAQQAKSTAKSAGATAQNYAQQAASKAREVADDVASSAKNAANKAA

SEQ ID NO: 116293 - protein, 89 aa, Oryza sativa
  Clone ID: PAT_MRT4530_19809C.1.pep
SILSPFNHLSLNSRRTTGFSLSSCLIRRWQPHLNKRHQKSFIFLLNNVITILEMLYTRGWTMEGVALLSEFDCRVFFFFQTMWAILTLF

SEQ ID NO: 116294 - protein, 484 aa, Oryza sativa
  Clone ID: PAT_MRT4530_1980C.1.pep
MGLILAQSAAACGGVRRRGRPWLVVATPYATARKRPAVRARRGRRRRGRRRLAGRSRLRLAAARCGARPAVARDGTVRGASALGAAPCGGVASGSASNPIQSNPSHNARTTPPTNTTSHAHAQTILRHRLPPPPPIALLLTVMLLPSPVAAHHHHVHAAGDGVVISPTASSATAIKHDLTDPYGFLRSRSTSGPAGGGGGSSSRSAVPAEVGMGGERGALSNVDYDRLLAPVKAPPRPLSGEGDEEEGDIAMVAAQSFVSTQDSASDTVVDYSVNEDEFHKIRLLHCDFFIRKVPDPDDDVFDFREMYVTPPDTDIYSIPRVLAPMPQKYVRCMKKNFGRYHVSEPPVEHLRDPLYKTEREIMKVFLTKHYRNRRCNDPDFFLDFEEIYVIDSKARSITRAKVVVSVPEGKKRDRRNDLLLIRDGGESFRIIDKEASRANVGCLYQTKRDDATTVIQREEWAKSRQDVEKHFRKLRDFDYSNWF

SEQ ID NO: 116295 - protein, 310 aa, Oryza sativa
  unsure (1)..(310): unsure at all Xaa locations
  Clone ID: PAT_MRT4530_19810C.1.pep
NKTSGQTVQIKTKNPLGSVWLQGWDGMGWDEPTFRGVWLRGEWDGMVPGEEYSSQIRDETVRQNRPDQSIPLRRRERRLXPARLRRGAATAARPSSACSLPRRRSVLLRLLPPPAPLRPPLRPRPAAASSATVSATGRRRSSSAPAASRSAPPRRRHGRPSLLRLLPLPAPLRPPPPVLSAASAASSAASSATGPRRSTAPRLVSAPASASSATGRRRSSLAPAASHSTPPRPPIPPPPALSATSAASSATGRRRSTAPRLVSAPASASSATASATGRRRSSSAPAASRSAPLRRCLSFARADLLLRPPF

SEQ ID NO: 116296 - protein, 342 aa, Oryza sativa
  unsure (1)..(342): unsure at all Xaa locations
  Clone ID: PAT_MRT4530_19811C.1.pep
MDAAWRGGVGCSPVCLDLCVGLSPVREPSAARHELLDRPAGCRGGGDSKSGAFLQAKIVEAKVTQMSEENRRLTEVIARLYGGQIPRLGLDGSASPPRPVSPLSGKKRSRESMETANSCDANSNRHQGGDADHAESFAADDGTCRRIKVSRVCRRIDPSDTSLVVKDGYQWRKYGQKVTRDNPSPRAYFRCAFAPSCPVKEEGAAERGGQLAXVATYEGEAQPPAPVSARRRAPGGGGGGRWLAAVLHLHQLLRPDHHARPHQERGSRAGGRGGASAAAAGPQGGVPGGRVAGVPDRAGGADGQRAHQRPQVHRRARRGDPPEAARILASFTILQFFLQEKT

SEQ ID NO: 116297 - protein, 307 aa, Oryza sativa
  Clone ID: PAT_MRT4530_19812C.1.pep
MAVDLMGFSPRGGCRPSVETEQLAFQEAAAAGLRSLELLVSSLSAGGEHHHRRRPQEKQSSPPLGEIADQAVSRFRKVISILDRTGHARFRRGPVVGAAAAEAAAAAASASPSSSPVSPPLPPVTTQPAAAVKSLTLDFTNPAKVAAASVTSTSFFSSVTAGGDGSVSKGRSLVSSGKPPLAGGVKRKHPHPPCAAAGDGHGHGAGHAHAHGGCHCSKKRKQRVRRTVRVAAASARVADIPADEYSWRKYGQKPIKGSPYPRGYYRCSTVKGCPARKHVERAADDPATLVVTYEGDHRHSPPPPPLV

SEQ ID NO: 116298 - protein, 149 aa, Oryza sativa
  Clone ID: PAT_MRT4530_19813C.1.pep
MAEFDGGVDEVALGRANPKTTTARLGGGASGGRRRGEGGGGEPYRGSRGADTAGKPPDLAGDGATTWARHGVGRSGRGKGGKRHRHGRFRRRLPLSEVEDGADRILYGPTKRGANFPLVWKRWTPRSGVIRRIIYLSISDLIHERRACL

SEQ ID NO: 116299 - protein, 47 aa, Oryza sativa
  Clone ID: PAT_MRT4530_19814C.1.pep
AGGGFVRDCICILNADLGMYLVGRYQYMVTDRWQARANASRFVLGCH

SEQ ID NO: 116300 - protein, 89 aa, Oryza sativa
  Clone ID: PAT_MRT4530_19815C.1.pep
LVPSPTRLVGHTAIDGHIHLQRRLASVTADWCHRIHDWLVTPPLMGLYVFTPASLRRYPWSLRFHGWPIMPLLKDVFVFIIILLLLRLH

SEQ ID NO: 116301 - protein, 26 aa, Oryza sativa
  Clone ID: PAT_MRT4530_19816C.1.pep
SFQPINFKGLIFVSGAMWLGLCHEIK

SEQ ID NO: 116302 - protein, 90 aa, Oryza sativa
  Clone ID: PAT_MRT4530_19817C.1.pep
IPNCSEFYFVKLQKRENKGEGRVQILGFAGVFGFTSKKIGGLIRRIGSTRKKWLFSKTLLGGRLFCKIKLSSKSRFLRRAKKSTKKGPHI

SEQ ID NO: 116303 - protein, 101 aa, Oryza sativa
  Clone ID: PAT_MRT4530_19818C.1.pep
MGRGAGAAEPARTPDAAPVAQPAQPVAAPAAAAAAAAVAPEQDRWGSRDDRPRPDMRPLRQEAPPARDAAPPARQDGPPGTWRPSRYSSSSSSSTWSSRRN

SEQ ID NO: 116304 - protein, 259 aa, Oryza sativa
  Clone ID: PAT_MRT4530_19819C.1.pep
LSKQHHAGDLQEKNRLSRMLEHKNIFQERIVQRREAEFSRLKKERDERTSQLISSRKRERDTVRKLMYYLNLEEQRLQRLREEEEARKREEEERRKREETERKAKLDAIAAKQLQRERELEEKKEKQRMEALMGRGAGAAEPARTPDAAPVAQPAQPVAAPAAAAAAAAPAAGKYVPKFKRGGDGGSSAGGQRPAVAPEQDRWGSRDDRPRPDMRPLRQEAPPARDAAPPARQDGPPGTWRPSRYSSSSSSSTWSSRRN

SEQ ID NO: 116305 - protein, 78 aa, Oryza sativa
  Clone ID: PAT_MRT4530_1981C.1.pep
MAARAEKSLIDFVLISVIEISNASLRRLETRVTEMCELMNNRSGVYGGILEAGLDLYFVKIATHKKQGDEPSIQKESK

SEQ ID NO: 116306 - protein, 191 aa, Oryza sativa
  Clone ID: PAT_MRT4530_19820C.1.pep
MASVAAAEGAAAALRSVLSRAQQAAARSGRAPESVRVVAVSKTKPVGVIRGVYDAGHRCFGENYVQELIDKASQLPEDIEWHFIGNLQSNKARALLAGVPNLDMVESVDDQKIANRLDRVVADLGRKPLKVLVQALANCRKEVCKELGIPEEQCELSMGMSADFEQAIEMGSTNVRVGSTIFGAREYPKKN

SEQ ID NO: 116307 - protein, 1001 aa, Oryza sativa
  unsure (1)..(1001): unsure at all Xaa locations
  Clone ID: PAT_MRT4530_19821C.1.pep
MATFAKPENALKRAEELIHVGQKQAALQALHDLITSKRYRSWQKPLERIMMKYVELCVDLRKGRFAKDGLIQYRIVCQQVNVSSLEEVIKHFMQLSNEKAEQARNQAQALEDALDVEDLEADKRPEDLMLSYVSGEKGKDRSDREHVTPWFKFLWETYRTVLEILRNNSKLEALYAMTAHKAFQFCKQYKRTTEFRRLCEIIRNHLANLNKYRDQRDRPDLTAPESLQLYLDTRVEQLKIATELSLWQEAFRSVEDIHGLMSMVKKTPKPSVLVVYYAKLTEIFWISDCHLYHAYAWLKLFYLQKSYNKNLSQKDLQLIASSVLLAALAVSPYDHKYGASHLELENEKDRNLRIANLVNFSLDSKRENREVPSRASLFSELAAKGVIACASQDVKDLYNLLEHDFLPLDLVSKAQPLLSKISKIGGKLSSAPLVPEVFLSQYLPALEKLTTLRVLQQASQIFQSVKIDMLSRMIPFFDFSVVEKISVDAVKHNFVAMKFLKSVGHFSLLSVLIGGIYFFIVLFPYFKLGVTVVDIFGNLDIESDCLSNHLSVLADSLNKARSLIHPPVKKPSKLGENLTSLAAVVENEHKRLLARKSIIEKRKEDLERQILEKEKEEEKKRLSVLKKSAEDERIRLLNDVKLREQERIRRQLVEKEKIEAEELLQKQIKEIAKRGGKKPVLQGEVTKEAVMELAMNEQFKERQEMEKKLQKTGKQMDYLERAKRQEEAPLIEQAFQKRLEVEKILHEQEQLREIELSKQHHAGDLQEKNRLSRMLEHKNIXQERIVQRREAEFSRLKKQKAARTCQLMSXSRKRQRDTLPKSIYYLNLEEQLPQRLSEVXEGRKRAGGQRTCWRRLERRPFWRHMGTNRPRPKYGVRETKKTQTMQAXMGRRSRASVPEWTPDTGKFVQVDQSLANPEEAAAAKASAAXRAGGKRRFVALEQDRWGXRDDRPRDDMRPLRQEAPPARDAAPPARQDGPPGTWRPSRYSSSSSSSTWSSRRN

SEQ ID NO: 116308 - protein, 109 aa, Oryza sativa
  Clone ID: PAT_MRT4530_19822C.1.pep
WQLRTGSRDALEEFIVLTTSQPHPGKGRRDGAGWALRRPLVLPDSPKHERGLPAALQGVGVKPEVWCVWLEGVMRRVLSRPLSSMPCSGGGLGLSQCGVALSSGWFNIG

SEQ ID NO: 116309 - protein, 55 aa, Oryza sativa
  Clone ID: PAT_MRT4530_19823C.1.pep
PEPGNRGPGVYTGLHMKIKQDWDFQLSGSSIIIRAGQGKSQNEGWGKKAKRKKQG

SEQ ID NO: 116310 - protein, 84 aa, Oryza sativa
  Clone ID: PAT_MRT4530_19824C.1.pep
HKRLKQGASQEPVTVSDCWEERKGRAIGLLLKQIKWGRATSIQSKGIKMGYPSVQFRNDEEKTRPVNLDYVTIELQARVPKIGY

SEQ ID NO: 116311 - protein, 120 aa, Oryza sativa
  Clone ID: PAT_MRT4530_19825C.1.pep
MATKTTQCSSTTREYPLISRTKRRAANLAQARGVPIPYRITISDPLPHLECGTSTMYDYESPIPTRITISSIDRLPHPEARTSTLIRRPEQARLVPSPTRITIPLDPLPHLEAGLVTELA

SEQ ID NO: 116312 - protein, 138 aa, Oryza sativa
  unsure (1)..(138): unsure at all Xaa locations
  Clone ID: PAT_MRT4530_19826C.1.pep
VAVLLHKFRQWKTRKKYTEGPSTCHRVTKSFSNRKTXTNVSLNLQNQCKVGPLAVLTPVLSDVAAGSAWVPRVSLFFPLSTRAVNEPSSSELTYLSSSSVQARAELEPSPALPSSLKVGSVRARSRLGSTRAQFVEAR

SEQ ID NO: 116313 - protein, 39 aa, Oryza sativa
  Clone ID: PAT_MRT4530_19827C.1.pep
QQNYNHMKVNSNVNPMIIFSTIKFNSYYTNYLVNILEVE

SEQ ID NO: 116314 - protein, 309 aa, Oryza sativa
  Clone ID: PAT_MRT4530_19828C.1.pep
MAEKEVGRIFVGGLSWDTTERTLERAFSEYGKVIETQMVVLERDTGRSRGFGFVTFSEPRAVDAAIRGMHNGELDGRTISVNKAQPRMNTDDGYGYGGGGGGGGTYSSGARGGYRGGGDAVPSANDDCFKCGRAGHWARECPYSSGGGGGRTGRYSPPSRYGSGTGGGRGDRFGGSDRFANRYVDDRYDGGRYVDDRYGGGGRDRYATDRYPPTADRFTGDRYGGSDRYASSGFTRERSYERDGGRSGGSYYRDEPRGSGGYDRGGMRMGSGDRYGTGGPARFAGSYRDRPAPYDRPSRAAARTYDDRY

SEQ ID NO: 116315 - protein, 68 aa, Oryza sativa
  Clone ID: PAT_MRT4530_19829C.1.pep
PRSQSQQPASLRKQSPGNPPRNQSEEAKNTLGVRRDDGILLSRPAVAHLSTPPDVVDGGGSASLSCRG

SEQ ID NO: 116316 - protein, 1604 aa, Oryza sativa
  Clone ID: PAT_MRT4530_1982C.1.pep
MAKEDEDKTAFITPFGVFCYVKMPFGLITTGNTFQRTVQGALSDQLGNNVEAYVDDIVVKTKTSDSLIDDLRETFDNLRRYRLMLNPEKCTFGVPSGKTPRALLYPSPPSPSPLVVGEALAPCALAQPSPPSLQPCAAAVPAVAVAREGHRWDRQVAAVLVRCFAAVGDRRSTIAVVEPKSSAASSSSPPPSVGFPPSFWSPMPRYKPEYLFGVEGFVQELRTMSFVIGFGTAPFYAQIPHDRHEEKCRVKVTLNSNSEDIPSVMFEAGGRNYIHASQEVARIAIGELRDRYSDQLADTEYRYHPRQPQGSDRGSYLETEGIENDATTRHLVEMLWAMDESRAETVLAAQDREDRNRGKICKLEDKVDRLEKELAALKGEAPPQKARIRLTARKRALFVPRYQLAPKVRVVEKEVAPTLADPPVNIISDDEEEESKRNHSKIEWVATQDDEDEPKEPSIDLRCSEELDKMVNTRSNGNGPNNPNNNNNEGNPTLAQVLAQQVQLMNMMMQQLQNQQNQGNNHAPPQNRLTDFLRVRPPTFSSTTNPVEAGDWLHAIEKKLDLLQCTDQEKVSFASHQLHGPASEWWDHFRLNRTTAEPITWLEFTAAFRKTHIPSGVVSLKKKEFRSLTQGSRSVTEYLHEFNRLARYAPEDVRNDEERQEKFLEGLNDELSYSLMIGDYPDFQKLVDKAIRQENKYNCMEQKKRRIAQFKTQQGNNQKPRLTLGPQSIPHGSSSSVVRPQRQFFNNNAGNNIRNQVPRPVAAPTQQQPIKREQGSKPAVCFNCGDPGHYADKCPKPRRVKVVPAQNNSTVPVSKARVNHVAAAEAQDAPDVILDKFVVVFIDDILIYSRTEEEHEEHLRLALEKLREHRLYAKFSKCEFWLSEVKFLGHVISAGGVAVDPSNVESVTNWKQPKTVSEIRSFLGLAGYYRSRAPPPFQPSPSLGKATVGIAKSPPSSSVASPPSETAGAPSPSSNRRAPPLLLRRRRRPLGFRRRFGRRLRSGGDKPTGVAGESITSGFEGEIMIQERCTVVDCVVRERNRSKSREDHGNREHEVAYKTQGSTEANRMHGSTKQEAEEAFIAFKRYLSNPHVLVAPQPNEELFLYIAATPYSVSTIIVVEREKVQLPVYYVSEALHDVMTRYPQIQKLLYAVIMTSRKLCQYFQAHRVTVVSSFPLGEVMRNKDVVSRIAKWVVELSQFDIHFVPRTAIKSQVLADFVADWTMPDNRSDNQIDNETWTMAFDGALNSKGAGAGFILTSPSGDQFKHAIHLNFRATNNTAEYEGLLAGIRVAAALVVRKLEKRFDGIEVRHVYRKDNIEPDDLARRASRREPLEPGTFLDVLTRPSVKEASGEDSPVAPDISSGAIEAERTVADIETTDDWRTPLIKFIGSEELPEDDAEVEKISRKAKVYCMIGNDLYKKAPNGVLLKCILSDDGRHLLLDIHEEICGSHAAGRTLVGKAFQQGFFWPNALKDACDMVQQCEACQFHSKHTKLPAQALQTIPFTWPLSCWGLDILRPFPRGQGGYRFLFVAIDKFTKWIEATPTGEIKADNAIKFIKGIFCKFGLPHRIITDNGSQFISADFQDYCIRLGVKICFASVSHPQSN

SEQ ID NO: 116317 - protein, 74 aa, Oryza sativa
  Clone ID: PAT_MRT4530_19830C.1.pep
GDRGSEEDCHVADDANSSFRRFLERKWCRKNHTWHYTLLNGVFFYFYVTFVRVTKHFIANFNSIECKFCQKKKK

SEQ ID NO: 116318 - protein, 80 aa, Oryza sativa
  unsure (1)..(80): unsure at all Xaa locations
  Clone ID: PAT_MRT4530_19831C.1.pep
SSSSRSSSSSSAAADGSTIMXPTSRXLAAKTPFLGHXXPSNAPXRXIXAAATGRXXXGMELWYXTDRVKYXGPFSAKESQ

SEQ ID NO: 116319 - protein, 259 aa, Oryza sativa
  unsure (1)..(259): unsure at all Xaa locations
  Clone ID: PAT_MRT4530_19832C.1.pep
WRSRRPRCHRRLCRSTWSWRSPSAPTPSRSSAAPPRAGTSAASSAAPPASPATSASATPTASSLASSAASSSSLAAPPPTPTTSRYVSSRLAMPSSAAAVAPIRYGPSCPAPTTCMVLSIGASNPWRRAVASSSSGPATPPANPRALXSARPPSSTASPTSSAATHRLSSTSNTSAASCPTTTSSSASTSPAKPRSGVQHLRRRSRGCRPNSGCYRRARARQTSRRGSSCWCRRRRAAAATGSRWRCSSAGGRRWRSGR

SEQ ID NO: 116320 - protein, 83 aa, Oryza sativa
  Clone ID: PAT_MRT4530_19833C.1.pep
TQVLFFSFVPTYKGVVWKKKCTFFSQLALKEGGGPYKPPPLFFFKIKKTYRFFRFGGLGIPWEAKGFFWVLAIWGIRAITRFF

SEQ ID NO: 116321 - protein, 318 aa, Oryza sativa
  unsure (1)..(318): unsure at all Xaa locations
  Clone ID: PAT_MRT4530_19834C.1.pep
IDWAWMYETWITHPAFMKEASKFTDQARHMPRGRIRGIFFCPCFDCKNQKMLKDPKIILKHIVKCGLRXDYKIWTYHEEVAIPKETLDXISFDGAENFTIEDMSRDMVDEFGGSDIDDLDADFDLEDMLCHAEPEVLTGTMQWLDNWEVFYKXAKDLLYDESKTCDKDYMVLCYVLELLRLKARHGWSNTSFNDLMGLLRVMVPKPNLLPFNTYQAKKLIXPLSLGVXKIHACVNHXLYYKEYTDLDMCPTCGTSRYKXGNGASDSDVVDPVLLVDTKRKILAMVMWYLPMKDRMKHMFSNPINVELIRWYLKNQKID

SEQ ID NO: 116322 - protein, 178 aa, Oryza sativa
  unsure (1)..(178): unsure at all Xaa locations
  Clone ID: PAT_MRT4530_19835C.1.pep
DARATLAALHLSTPPHCPLPPLFSPRPAHPLLSPSRLPARARSRPPVCTSALPPTLPIPPVPTSHLTTPHSSLARPPARPYACHSLAPLPPSSRPSACLHPPTPRPLTTLSAPPSXHQPPTPPRRTPEPRRSSAPPAHSPPYLSSSPHHSLTSTAPPTLSSPYPLLASQPPRIPPHHS

SEQ ID NO: 116323 - protein, 230 aa, Oryza sativa
  Clone ID: PAT_MRT4530_19836C.1.pep
MAMVGRSLLLLLLLVTLAAGHGVVVVVAFDPNPLQDFCVADPTSKVRVNGLPCKDPAAVTADDFFFSGVGEPAAGGGRGATASRRYGFTARSVDIPGLNTLGASAARVDVAPGGVFPPHYHPRASETAVVLAGAVYFGFVTSYPDSRVVAKVLRRGDVFAVPQGLVHFLHNNGSEPAALYASLSSQNPGLVLVADALLAAPLPVDLVAKTLLTDEATVDKIRANFIVHRS

SEQ ID NO: 116324 - protein, 437 aa, Oryza sativa
  Clone ID: PAT_MRT4530_19837C.1.pep
MRVLEDDMFPSTPGKVKIERATAMNRQLHRCFASTSTMFLWALFLVAMTASYLSFQSFVDTSSKYFAASWGGLHWERQIRASAAPRRPPGSAAGAGMSVLVTGAAGFVGTHCSLALRKRGDGVVGIDNFNSYYDPSLKKARRSLLASHGVFVIEGDINDGRLLAKLFDVVPFTHVLHLAAQAGVRYAMENPASYVHSNIAGLVTLLEACKDADPQPAIVWASSSSVYGLNDKVPFTESDRTDQPASLYAATKKAGEEITHTYNHIYGLSITGLRFFTVYGPWGRPDMAYFSFTRNILQGKPITVYRGKNRVDLARDFTYIDDIVKGCLGSLDTAGKSTGTGGKKRGPAPYRIFNLGNTSPVTVPNLVSILEKHLRVKAKKNVVEMPGNGDVPFTHANISLARQQLGYKPTTNLDVGLKKFVKWYLSYYGYTRGSKNL

SEQ ID NO: 116325 - protein, 77 aa, Oryza sativa
  Clone ID: PAT_MRT4530_19838C.1.pep
SIYIAWKPSTHLYLNQASQPDGVIQYISTGCGRSIPAPAVLESATKHLPGTLTGWPRFGPFLHIWKIYSLGLFPWGG

SEQ ID NO: 116326 - protein, 264 aa, Oryza sativa
  Clone ID: PAT_MRT4530_19839C.1.pep
MALVGADLGQILGNLVLLTPRMLLDKLMWKNDSMTNPFDSDSDSEVPSRPSRAQSVPVRRTDQSIQELEDYAVDKVEETSRKVNDCVRAAEAIREDATKTLVTLHRQGEQITRTHRVAADIEHDLSMSEKLLGSLGGLFSKTWKPKRNQQIKGPISQNNSFTSSANHMEQRQRLGISSTRQPSPNQVHRSPATAIEKVQVEIAKQDDALSDLSNMLGELKGMALDMGTEIERQNKSLDAFGDDVDELNFRVKGANQRGRRLLGK

SEQ ID NO: 116327 - protein, 345 aa, Oryza sativa
  unsure (1)..(345): unsure at all Xaa locations
  Clone ID: PAT_MRT4530_1983C.1.pep
MAATVSLSLVVSASGFPYPFPSPLSKTLANPSSSRSLLLAAPLSRGATPLPLLRRDVSAAYGDDDMDDDFGDFDLDDGDGVGDDEDLDNEQDYDVDYDRLLAPVKAPPRPLSGEGDEEEEGDIAMVAAQSFVSTQDSASDTVVDYSVNEDEFHKIRLLHCDFFIRKVPDPDDDVFDFREMYVTPPDTDIYSIPRVLAPMPQKYVRCTKKNFGRYHVSEPPVEHXRDPLYKTEREIMKVFLTKHYRNRRCNDPDFFLDFEEIYVIDSKARSITRAKVVVSVPEGKKRDRRNDLLLIRDGGESFRIIDKTKRDDATTVIQREEWAKSRQDVEKHFRKLRDFDYSNWF

SEQ ID NO: 116328 - protein, 121 aa, Oryza sativa
  Clone ID: PAT_MRT4530_19840C.1.pep
IRVLRIFVRQRRNRQRQPCTELRHCLRALCSVVCRCSKTPWLATVCCSSSSAPSLHLSSLPHRLDLVRVTTRGVEIMRRRRGSGGDEEEEAAARGCLGKVEEATVAGGDGEEAAEIRSRSD

SEQ ID NO: 116329 - protein, 130 aa, Oryza sativa
  Clone ID: PAT_MRT4530_19841C.1.pep
MDKKQTSLGTPVYRTNPFDSDSDSEVPSRPSRAQSVPVRRTDQSIQELEDYAVDKVEETSRKVNDCVRAAEAIREDATKTLVTLHRQGEQITRTHRVAADIEHDLSMSEKLLGSLGGLFSKTWEPKRNQQ

SEQ ID NO: 116330 - protein, 1004 aa, Oryza sativa
  Clone ID: PAT_MRT4530_19842C.1.pep
MTAGRFGAARRHGRQARAGAAQGDGSGDQATVKTLRQSSAYDGRPSDEYLAGIDGFLLFAYREKSLEDKIRCPSILQQAIPNGKNLPGTFAEAKKIIGKLGLNYVKIHVCPNNCQLYRKAKANDDFCSKCGTSRWKNKEDKTTLTKKERRRATPRKVLRYFPIKPRLKRLFMHKETAIALRWHDEGRTKDGVLRHPADSEAWKSIDSRNPQFASDSRNIRFAMASDGFNPFGTLSSTYSCWPVVLIPYNLPPWLCMKASSIMLALIIPGPSYPGKDFHLFMEPVYEELFDLFEVGTPTYDASQNEMFQLRATVLFTISDYPGIGIFAGYSVNGEFACIMCREETCSKRLKHGHKYCFMGHRRFLPLDHELRYNENSFDGTEEHRVEPLAYSETSVLQKIEKINDFEKSKTWKCRSGLFSLPYWDLNVLHHNLDVMHIEKNVCDNIYGTLLGLEGKSKDNLQARLDLQEMNIRPDLHPIRKANNKYYLPPASYTMSKREKHQFCKVLHDIKVPDGYAGNISKCINVSQGKISGLKSHDCHILMQELLPVALRGVLPYNVTSVLFDLCGYFRELSSKVLYIDVLDKLEEQIKMTLCRLEMIFPPGFFTIMVHLVVHLATEAKLGGPVCYRYMYFVERYLSVLKSYVRNKAHPEGCLAEAYLADECITFCSRYLEGFETKHNQPTRNDDNDESVACSDDECTPYLFPHVGKPLGKPRSYVIRGLTKMQAHRYVLFNCPDVNPYLRTHADEIRRTYRQGRITPKIIERIQNEKFHEWFRAHIMDLERKNGICSVKNDHRWLARGPIGPAKRYRAFNTRGFRFRPKHLDGVTQNSGVVLSAKTSSYTKSSDTNPILGDLTYYGRVIDIIELNYSGQFSVVLFKCEWVDVVSGKGVKKDKYGYTLVNFSHLIHTGEKVEHEPFIFPNQADQVYYVDDPMNPEWSVVRKNKPRDIYDIGEDEWAGDIEIEPFHVSHLGGMSSNANNYKQWVRTDVEGTTVDVDNNALNNEG

SEQ ID NO: 116331 - protein, 474 aa, Oryza sativa
  Clone ID: PAT_MRT4530_19843C.1.pep
MGDIVRQILGWFPGHPASGNGATLSAAEGYGSEDRVSALPDDLLRNIVARLPVKDAARTAALASRWRRVWSSTPLVLRDADLLFSAGEAAGVAAVGRALAGHPGPFRVVHIEHCMFAFHRPELAEWARLVAAKGVEDLVFVNIPVHYFDVPLPADILRCAALRRLFIGNWNFPATSGFPRGADVFPHLLELYIWNTVMSARDLNHLLACSPVLQSLALALNSHPNRVRLCSQSLQCVLLFLSKAEEVAVVDAPLLQRLVLWKISTSYDTDDELPVKIRLACAPELQVLGYLEPRAHQLQIGETIIKADTKVIPSSMVPSIKVLALRVNFCVQEEIAMLVSFLRCFPNVETLHIESDIDDEFTGQPHAKFWQEVCPVECINSHVKKIVFHDFHGDKCELEFIDFIARTAQELQALLLMLTSKTYGPVVDVDEVNSQLGVLSFASEECITSLLGPKVQMVHIFHRSLDLSVDDPFL

SEQ ID NO: 116332 - protein, 237 aa, Oryza sativa
  Clone ID: PAT_MRT4530_19844C.1.pep
DSLQSLCLPNVDIYRHPIRVAVCKVAEHYDSVVATDVSAEQLRRAVPHPKVRYLHTPDAGADDDDLVAALGGEGCVDLITVAEAAHWFDLPAFYGAARRLLRKPGGVIAVWGYNYRVSPVEDMMSRFLHTTLPYWDSRARYVIDGYRDLPFPFDGVGLGKEGEPAGFDMEHEMAFPGLVRMLRSWSAVATARQRGVDLLDERVVRRLEKEWGGASLVRKVTFKAFLLAGTVRADDPA

SEQ ID NO: 116333 - protein, 356 aa, Oryza sativa
  Clone ID: PAT_MRT4530_19845C.1.pep
MAKKRKRSSDAAAAVEKPDEFAPQRPERTLFGFKEKPADDEEAEAEAASEGEEDAAAAAAAAPFRNKEKVLVTCSRRINYRYRHLMQNVVSLLPHAKKDSKVESKQSKGNALNELLELRNCSSCLFFECRKQKDLYLWMVKSPGGPSVKFLVNAVHTMEELKLTGNHLKGSRPLITFSTNFDEQPHWQLVKEMLTQLSHVMNFMENWGNAIRDEVIHASFLIFATPKDHRKAKPFHDHVFVFSIVDDHVWFRNYQISVPHNEIDKVDKGGLDKMTLVEVGPRFCLNPIKIFGGSFGGPTLYENPFYVSPNQIRALEKRKKAGKYAKKVKAKVRRKMHEMENTLEPDEFAELWKGED

SEQ ID NO: 116334 - protein, 309 aa, Oryza sativa
  Clone ID: PAT_MRT4530_19846C.1.pep
MLGPRSKIQDRMAGLFTRQAAEYAAARPVYPKDLFVKLASLTAHHRVAWDVGTGNGQAAIGVAEHYDSVVATDVSAEQLRRAVPHPKVRYLHTPDAGADDDDLVAALGGEGCVDLITVAEAAHWFDLPAFYGAARRLLRKPGGVIAVWGYNYRVSPVEDMMSRFLHTTLPYWDSRARYITTWAQHTLQFYNLAIASKHHPWRKESLTCCSCRYVIDGYRDLPFPFDGVGLGKEGEPAGFDMEHEMAFPGLVRMLRSWSAVATARQRGVDLLDERVVRRLEEEWGGASLVRKVTFKAFLLAGTVRADDPA

SEQ ID NO: 116335 - protein, 139 aa, Oryza sativa
  Clone ID: PAT_MRT4530_19847C.1.pep
MTVEKVDATVADFDAHFDKLFAAGDDAEGKVKLLLFLADRDASSNQTWCPDCNVAEPVIYDRVEAAAKGKEKDVVLLRAYVGDKPTWRDPAHPWRADPRFRLTGVPTLIRWENGAAAARLGDDEAHLADKVDAVVNAAN

SEQ ID NO: 116336 - protein, 1065 aa, Oryza sativa
  Clone ID: PAT_MRT4530_19848C.1.pep
MGILGSFLVLLLLAAPAFGQLPSQDILALLAFKKGITHDPAGFITDSWNDESIDFNGCPASWNGIVCNGANVAGVVLDGHGISGVADLSVFVNLTMLVKLSMANNNLSGSLPSNVGSLKSLKFMDISNNRFSGPIPDNIGNLRSLQNLSLARNNFSGPLPDSIDGLASLQSLDVSGNSLSGPLPSSLKGLRSMVALNLSYNAFTKGIPSGLGLLVNLQSLDLSWNQLEGGVDWKFLIESTVAHVDFSGNLLTSTTPKELKFLADISETVLYLNLSNNKLTGSLIDGVELSTFGRLKVLDLSHNQLSGDLPGFNYVYDLEVLRLANNAFTGFVPSGLLKGDSLVLSELDLSANNLTGHINMITSTTLQVINLSSNALFGDLPMLAGSCTVLDLSNNKFKGNLSVIAKWSNDLEYVDLSQNNLTGTIPDVSSQFLRLNYLNLSHNSLADTIPEAVVQYPKLTVLDLSSNQFRGPIPANLLTSSMLQELYIHDNMLSGGLSFPGSSSKNLSLQVLDISGNHFNGSLPDEIASLSSLQALDISTNNFSGPLPASITKLAALTALDISINQFTGSLPDALPDTLQSFNASYNDLSGVVPVNLRKFPESSFHPGNSRLDYPASSSGSGSSSGSAGGRSLSAAAKIALIAASIVALVILILVAIVCHYKQISRQFPSSEKVSDKNLHKTSKDMASTKGKDDKGGLVVSADELGAPRKGSTSEALSQEEKLSGVGGFSPSKGSRFSWSPDSGEAYTQEGLARLDVRSPDRLAGELHFLDETITLTPEELSRAPAEVLGRSSHGTSYRATLENGVFLTVKWLREGVARPKKEFSKEAKKFANIRHPNVVGLRGYYWGPTAHEKLILSDYVSPGSLASFLYDRPGRRGPPLTWAQRLKIAVDVARGLNYLHFDRAMPHGNLKATNILLDGLDLNARVADYCLHRLMTQAGVVEQILDLGVLGYRAPELAASKKPSPSFKSDVYAFGVVLLELLTGRCAGDVVSGSEGGVDLTDWVRLRVAEGRGSDCFDPAMASDSENQVSVKGMKDVLGIALRCIRPVSERPGIKSVYEDLSSI

SEQ ID NO: 116337 - protein, 190 aa, Oryza sativa
  Clone ID: PAT_MRT4530_19849C.1.pep
MSHIAVERNRRRQMNDHLKVLRSLTPAFYIKRGDQASIIGGAIDFIKELQTLLQSLEAQKKRRQQPQAHLISPASISASGGGSPSPTPSPRSLITSCSPTAAAGSSAGSSSSISPKDENKQQLQLVAELAACCNSPMADVEARISGANVLLRTLSRRAPPVRIIALLESLHLEVLHLNITTMDDTVLYSF

SEQ ID NO: 116338 - protein, 108 aa, Oryza sativa
  Clone ID: PAT_MRT4530_1984C.1.pep
MPSSLSSSSALPPFSLSFPFSSLPFGRPRGARAGAAASGGGGKIGSSGLAALAKDYDATIELYWAPMLAESNSDGAAVLDDRLIRSAPMNKHSTFWKGADVLVFNSHR

SEQ ID NO: 116339 - protein, 883 aa, Oryza sativa
  Clone ID: PAT_MRT4530_19850C.1.pep
MMQQDSKRKRSVLPETATLAPGSKRRRRKSVPSRHAAAMLPDELLTEVCLRLPVKSILRFRAACRSWDAMLSSEEFGQLYAARAEEMSSAPKLLFVSPTANFNSTAVYKCSPSKPTDDLLLTLDDVRGNYVEVTPAPCHGLSLLYDGIAPAYYVMNATTRAVTRLPPFRDVAFATAGLGCDARTKKYKVVRLFEGNLLEKEFLKCEIYTLGGDEGDIWRPAAGGVPFRFYSFARSAISNAVMNKLQPLFFNGYLHWLINPLHHVKLPRASILSFSLTDETFRWIRSPPFVASGVHLVELDGNLCMVRDLRDRSTAVCKLEIWKLKDYNSGDWSLDHRIDLTGQLPRDLLEPQIVKVIGSAGSCRSGTKIIIATSKHKVCSYDPVSRTLETITSISETCTSYQNEKSDIRFSLFKECLTPVHKTREEIAFATPLSKATKEILLRLPAESVLKFKPVCKQWLGLIKSERFIRAYFAHKNMDKRPKIMLVGKGSGKSLFNFVPLSKWLQEASNQGTLFLDTKVVCSKPCRGLNLMSFVEEDYLFNPCTGYHRVYWNREWHQHQPWKMPTGCREQEDNPFAVGNKNVGLGFSQVIQDHVVVGIFYDRKDYNSREYSLTCSLWSCGSGYFEQLPQPPLPVNDMPPVSVDGVLYWMSEPRLGQSYERAIVSFDIAAKIFEVIPCPSSIAMWDPRSRCHAFVVELLGKLCAVLSNSVADELDIWKWDHGLWTRAYTINLKFWPDYSLATNVVVPMAVDLTDGRILLNTGRKLGLYNPFDQTIENLLALDQVSLATPKVQQQRTGGHLKCHITRCEDVPRKFSPWKLSMAPCENFATPPSASSGKNLLSSRHQYVKALNSVSPKVMPVVPMLYEESLTYYPFAARARVLFS

SEQ ID NO: 116340 - protein, 228 aa, Oryza sativa
  Clone ID: PAT_MRT4530_19851C.1.pep
MYSASKKLSKASSSPPVNLTSYYSTIGGLRYLVNTSPDIAHAAGYLSRFMEEPHEDHLAAVKHVLRYIARTRHHGAHYARGKGGLLKLHGFSDSDMAGDLDTRRSTSGILFFLTTSLITWQSTKQKVVALSSCEAEYIATTAAACQAVWLARLLSDLLDSEIGAPEIKVDNKSSIAMTKNPVFHDRSKHIDTRYHFIRECVENGKIVINYVRTEEQLKDVLTKPLSRV

SEQ ID NO: 116341 - protein, 288 aa, Oryza sativa
  Clone ID: PAT_MRT4530_19852C.1.pep
MAVPAPAAAVGEEARKVRKPYTITKSRESWTEPEHDKFLEALQLFDRDWKKIEAYVGSKTVIQIRSHAQKYFLKVQKNGTGEHLPPPRPKRKAAHPYPQKASKNVSPAAISQPPPLGEQGCVMSMDTSPVIRNTNASAVVPSWDNSIAQPLSASRTQGTGAVATNNCSSSIESPSTTWPTSEAVEQENMLRPLRAMPDFAQVYSFLGSIFDPDTSGHLQTLKAMDPIDVETVLLLMRNLSMNLTSPNFAAHLSLLSSCNSGGDPIKSEGMENLGSPQSCHLPFMETSE

SEQ ID NO: 116342 - protein, 98 aa, Oryza sativa
  unsure (1)..(98): unsure at all Xaa locations
  Clone ID: PAT_MRT4530_19853C.1.pep
LCFIDSFPASFACGPNPELFGVKMLVVIFQTGGAGPDSYPSSVSMARGRGGRTKGGSVGHSGKRGRPSAMAEEPEGGAARKRRKQDDPTNESGDTGPX

SEQ ID NO: 116343 - protein, 295 aa, Oryza sativa
  unsure (1)..(295): unsure at all Xaa locations
  Clone ID: PAT_MRT4530_19854C.1.pep
STTVVLGTSAISAVSSQQNVATCSCAAAAADGRACXAAAVGEEARKVRKPYTITKSRESWTEPEHDKFLEALQLFDRDWKKIEAYVGSKTVIQIRSHAQKYFLKVQKNGTGEHLPPPRPKRKAAHPYPQKASKNAEIQMPXAVVPSWDNSIAQPLSASRTQGMFTYYAHKPLSKINEKNPTNAIDELNLAGTGAVATNNCSSSIESPSTTWPTSEAVEQENMLRPLRAMPDFAQVYSFLGSIFDPDTSGHLQTLKAMDPIDVETVLLLMRNLSMNLTSPNFAAHVSCSVFKMLIK

SEQ ID NO: 116344 - protein, 64 aa, Oryza sativa
  Clone ID: PAT_MRT4530_19855C.1.pep
MANSPITPAISMALKLRSLLYTFDARRYLPRMYLVALVSRLHHLRRWCSLPYDYDVLTARTSSR

SEQ ID NO: 116345 - protein, 136 aa, Oryza sativa
  unsure (1)..(136): unsure at all Xaa locations
  Clone ID: PAT_MRT4530_19856C.1.pep
MASKVGFLAAALMATMVAIFVAQLSETXIRFRDRQSQREVQDRPLDACRQVLDRYLTVRKRFQPMXRLPVSLGLRMQCCQQLQDVSRXCRCASIRRMVRSYDESMPMPLEQGWPPSSSEYYGGEGSSSDQGYYREG

SEQ ID NO: 116346 - protein, 105 aa, Oryza sativa
  unsure (1)..(105): unsure at all Xaa locations
  Clone ID: PAT_MRT4530_19857C.1.pep
LXXSVWIICIPKEDSKLLTTALSTVSTVHIIVHTHAHPLLHIPGTHTHTVSTSSSITCHPRSLGGVHQHRSXNTPPXTRAAVYVSNHSHXTXQYGAPHNLATGIP

SEQ ID NO: 116347 - protein, 50 aa, Oryza sativa
  Clone ID: PAT_MRT4530_19858C.1.pep
CIVSACVPDNGSLGKNHVVSCVGCVSVIVLSISIKSANCCRAGHVNVLDQ

SEQ ID NO: 116348 - protein, 162 aa, Oryza sativa
  Clone ID: PAT_MRT4530_19859C.1.pep
PAGRELTSLSLSKRDMEEEDDEKVVKKSSASGGLHGEEQVDGGHVVTAETEMAAAAAPSRQPQSILIRAFAGCLLALCGGGGGDPSDPPPLRPRPHGATAAVTDTTSAAAAAAAAHHLQHEADGGSKHVVTGFNLEIRFYAGDDRNFRNFWSKLFENLTEFE

SEQ ID NO: 116349 - protein, 756 aa, Oryza sativa
  Clone ID: PAT_MRT4530_1985C.1.pep
MCVDYRALNEVTIKNKYPLPRIDDLFDQLKGATVFSKMDLRSGYHQLRIREEDIPKTAFTTRYGLYEFTVMSFGLTNAPAFFMNLMNKVFMEYLDKFVVVFIDDILIYSQSEEDHQHHLRLVLGKLREHQLYAKLSKCEFWLSEVKFLGHMISAKGVAVDPETVTAVTDWKQPKTVTQVRSFLGLAGYYRRFIENFSKIARPMTQLLKKEEKFVWSPQCEKAFQTLKEKLVSSPVLILPDTRKDFMVYCDASRQGLGCVLMLDGHVVAYASRQLRPHEGSYPTHDLELAAVRRWLELIKDYDVGIHYHPGKANVVADALSRKSSCNTLGVRGIPPELHQQMEALNLSIVGRGFLATLEAKPSLLDQIREAQKNDPDMQGILKNMKQVVDRLTKVARFILVKTTYGGNKLAELYFARIVSLHGVPKKIVSDRGSQFTSHFWKKLQEELGTRLNFSTAYHPQTDGQTERLNQILEDMLRACVLDFGKTWDKSLPYAEFSYNNSYQASIQMAPYEALYGRKCRTPLLWDQVGESQVFGTDISREAEAKLELPASLGNVHDVFQVSQLKKYLRVPSEQADSEQIEVREDMTYVERPVKILDAMERRTRNRPIPISSPVLPNLGVEIPFKGGSFRRLCRILADLVHLSVSVADGRSAVDPVDPSRAAAFLRSGRLFRRRRRPRVSRGPPPLFPLPFPSLGRRSAVPMAAAGDHRGAGAASHRPRRVAAFGRAECARSTVDREAAAWAPLPWTRSARPLPLG

SEQ ID NO: 116350 - protein, 69 aa, Oryza sativa
  Clone ID: PAT_MRT4530_19860C.1.pep
MSLNLRTKRIRRSAVAIVIPSRAAVFFLSVRRSRRRRCLGVSRRPPFAFPLPSSLSGATPPRRWSPAAT

SEQ ID NO: 116351 - protein, 86 aa, Oryza sativa
  unsure (1)..(86): unsure at all Xaa locations
  Clone ID: PAT_MRT4530_19861C.1.pep
ARDVALSPQIQLPSEELSISHKKLADLPQVVEGXKARLKSAMKNVADLTKSLKVNPGTDAQDAQAIEEVEQIRRKAILAIQSYLNN

SEQ ID NO: 116352 - protein, 68 aa, Oryza sativa
  Clone ID: PAT_MRT4530_19862C.1.pep
AHASGHSSGHACVYTRIVFTPTLVLLSPRIYGDRITHLQSWLVIHNHRTEKRSFYLFSSQLFSGRFTC

SEQ ID NO: 116353 - protein, 41 aa, Oryza sativa
  Clone ID: PAT_MRT4530_19863C.1.pep
RTTMLYKLKMGQSDTTMPTMRLKVKTGEDRNICLNLGDVGG

SEQ ID NO: 116354 - protein, 110 aa, Oryza sativa
  Clone ID: PAT_MRT4530_19864C.1.pep
MESRQAAIRSTDPIVHYPLRSQESLRRHAPTLPVRRRRGSEDGRGDTSRKELGGVGGVRRCRSPEMPPVVSDESRRRRRRDETTARERREDERISRPVWSIRPDPSDLGP

SEQ ID NO: 116355 - protein, 483 aa, Oryza sativa
  Clone ID: PAT_MRT4530_19865C.1.pep
MARFLLGAAAIALLAGVSSLLLMVPFAIRARIKTNGAGGLGKKKLKKERRTLKRPSNKKGVCLSLCEWRERERERHRPWRGFSWGAAAIALLAGVSSLLLMVPFAEAYDPLDPNGNITIKWDITQWTPDGYVAVVTIYNFQKYRHIQAPGWSLGWAWAKKEIIWSMAGGQATEQGDCSAFKANIPHCCKRDPRVVDLVPGAPYNMQFGNCCKGGVLTSWVQDPLNAVASFQITVGHAGTRAPTCCVSLSSFYNETIVNCPKCACGCQNKKPGSCVEGNSPYLASVVNGPGKGSLTPLVQCTPHMCPIRVHWHVKLNYRDYWRVKVTITNWNYRMNYSQWNLVVQHPNFENVSTVFSFNYKSLNPYGVISEYLLQLLNDTAMMWGVKYYNDLLMVAGPDGNVQSELLFRKDRSTFTFDKGWAFPRRIYFNGESCVMPSPDLYPWLPPSSTPRFRTVFLLMSFLVCGTLAFLHNHLVLDKNCGKC

SEQ ID NO: 116356 - protein, 74 aa, Oryza sativa
  Clone ID: PAT_MRT4530_19866C.1.pep
PARPTRSPTRTENICKLYIYVDNSLLTLLFRSITCIFHCSIFLTSSLIHANFCMVTGWLLLTYLSDLPRSIYIC

SEQ ID NO: 116357 - protein, 125 aa, Oryza sativa
  Clone ID: PAT_MRT4530_19867C.1.pep
MASFGEDNRAATQREEDPTFYEAAIKDGNRLQGSSQNKYGGISPKKPLINKDHERAYFDSADWALGKCYLFLQQGASNSTKGTTEPLKPKLQVAETVRVWQGNHRGGIEFDPIINWDVNMDIVSM

SEQ ID NO: 116358 - protein, 70 aa, Oryza sativa
  Clone ID: PAT_MRT4530_19868C.1.pep
KGNRKAFTDAHVSEHAKNIHAPPHNGELVVWVGDLPGNRMGGWVYFWGRAPGIILNFRYFIQAILTPFFN

SEQ ID NO: 116359 - protein, 184 aa, Oryza sativa
  Clone ID: PAT_MRT4530_19869C.1.pep
RARRPSWRKLGICRALQLGFQGLGCAFCAVACALLAKCPIGGIEIGTLMVLINERFLWRNSSIFVLGRSLLPLCRCSVVFAEACHLPERESSPTTGVVRPLNPNNRSRGREQGDRWSKLIKELTGTSSKTRSVFCLSASTTRPRATEQDIGEERRGEEVGETQADKRRRDGRDITITYVRRALV

SEQ ID NO: 116360 - protein, 128 aa, Oryza sativa
  unsure (1)..(128): unsure at all Xaa locations
  Clone ID: PAT_MRT4530_1986C.1.pep
KCNSNLPDQTFFPMTILVISDSTAQPKLANRRSVISSFHGQPLKDWRPIWSKRGLTNLKLSMQRLAXPHVRSPNHTRTTNRSDQNQQARANDPARACVNPMVQQTLVVACASAAATATTGFRTYPGGG

SEQ ID NO: 116361 - protein, 152 aa, Oryza sativa
  Clone ID: PAT_MRT4530_19870C.1.pep
VIFNSEPLHHLFQHTPFTKHHRPSGLCQVVTQCATHQSPSGSDIPSSQTCAHCSQQPNQRLAAMQPRHILDHTGQQDPPQTLECVGRFAESLCLSASVSPLHTQMCVHMSALGIQVARQFVCVACPHPGLPQHLFCPRHFCGCVYSSQFGKN

SEQ ID NO: 116362 - protein, 106 aa, Oryza sativa
  Clone ID: PAT_MRT4530_19871C.1.pep
GATALGGRASQGATASDGGMAPNQRRAPPGQPPPSTLQAARPSSVEDRRSSAMAPLSPPAPATVAPLSPPVPAVASPLSFPAPVAASPFRRRRNVPFRRRSTEAVR

SEQ ID NO: 116363 - protein, 106 aa, Oryza sativa
  Clone ID: PAT_MRT4530_19872C.1.pep
MFYFFLVGFRGDPKFTKIQPEGDLNFGGGMQYRLPNPMDQKNTRVGGRNSRMGAGGGSKRARGLVKRGLQGVTTPLKNDGEGGPKVSRDRPGAGARGGPYHEAGQT

SEQ ID NO: 116364 - protein, 1386 aa, Oryza sativa
  Clone ID: PAT_MRT4530_19873C.1.pep
MAKNKHPTRCRVPQALAQGTLEARTWKWNLKNHGYVFLKIRALLVVNELIAGAGVVSNWPSVLLSWWFFSFLSESLLTSLHLLHLFNSATVVDFTSLPLCTFICLVAVTMRPSKANQQDQNQPLLVREDSDDSSTDRFSNSGWWSCLTFQWLNPIFEKGHKVRLELDHIPSVPQSDTANQSYALLQETLHKQKPEPMPMRRAIICAVWTPLIANGVFAGLNTIASYMGPFLITYLVELLSDKNPDKGHGHGYMLACLFFASKTVESLSQRQWYFGARRIGFRVRAALMVSIYQKSLLMKNSSTASGKIVNFLDVDVEKVSEFFWYVHRIWLLPLQISLALAILYRSLGAMASLSAVLATVLVMVSNTPLAKSQENLNMKIMEAKDSRIKAMAEAMKSMRILKLHAWETAYFDKLLNLRDVERGWLRKYLYTCSAIAFLFWASPTLVSVVTFGVCILVEMPLSAGTVLSAVATFRILQDPIYNLPELVSMVTQTKVSLDRIEEFIKEEHQGKPSRSDNNTRTKDLSMTGAMEIEPGVYGWEIDNSLKKTKFMLKIDRKLSISKGQKVAVCGPVGSGKSSLLYSIMGEIPRINGAETTVFGSRAYVAQSAWIQTGTIQDNVLFGKDMDRSFYEEVLHGCALDRDLELWANGDMTMVGERGMNLSGGQKQRIQLARALYSDSDVYLLDDPFSAVDAHTGAHLFKECLLRLMSSKTVIYVTHQLEFLRDADLVLVMKDGRIVQSGKYDDLVADRNGELSMQMAAHNQSLSQVTPAKAHVLTKNKSHKRRQTELTEIELDHNVIGRECEEERESGRVKWDIYRKFVNSAYGGALVPVILACQVLFQGLQICSNYWIAWAAERQEQVSREKMIGIFVLLSAGSSVFILGRAIVLSTIAIETAHQFFLGMTRSIFRAPINFFDSTPSSRILNRASTDQSTVDTDIPYRLAGLIFALIQLLSIIFIMSQIAWPIFILFIIIIAISTWYQSYYICSARELARMVGIRKAPVLHHFSETVSGAATIRCFNQGEKFFRKSLALIDDYSRITFHNSATIEWLCVRINFLFNLVFFVTLVILVSMPRNTIDPSLAGLAATYGLNLNVLQAWVIWNLCNVENKMISVERILQFSNITSEAPLVIEDCRPRESWPWCGTIQIDSLQVRYNPDMPMVLKGISCTIPGERKIGVVGRTGSGKSTLIHALFRIVEPSEGRILIDDVDISLLGVHDLRSRLSVIPQEPTLFQGTVRTNLDPLQQHLDTEIWEVLHKCRLEEIVREDSRLLDAPVVEDGGNWSVGQRQLVCLARVLLMKKKILVLDEATASVDTATDNIIQKTIRQETNNCTVITIAHRIPTVIDSDLVLVLGEGKILEFDSPENLLRDESSAFSKLVMEFVGRSS

SEQ ID NO: 116365 - protein, 109 aa, Oryza sativa
  Clone ID: PAT_MRT4530_19874C.1.pep
MVAHEERAVVADREAKKEAFRKYLESSGVLDTLTKVLVALYEENDKPSSAVEFVQQKLGGPSISDYEKLKAEKLDLQLKYNELLETHKETCRQLDELKNSKNGSGNNTC

SEQ ID NO: 116366 - protein, 404 aa, Oryza sativa
  unsure (1)..(404): unsure at all Xaa locations
  Clone ID: PAT_MRT4530_19875C.1.pep
MAGAVSALFLLDIKGRVLVWRDYRGDVSALQAERFFTKLLDKEGDSEAHSPVVYDDAGVTYMFIQHNNVFLLTASRQNCNAASILLFLHRVVDVFKHYFEELEEESLRDNFVVVYELLDEMMDFGYPQYTEAKILSEFIKTDAYRMEVXFLDVVESVNILVNSNGQIVRSDVIGELKMRTFLSGMPECKLGLNDRVLLEAQGRTTKGKAIDLDDIKFHQCVRLARFENDRTISFIPPDGSFDLMTYRLSTQVKPLIWVEAQVEKHSRSRIQITVKTRSQFKERSTATNVEIEVPVPEDSTNPNIRTSMGSAAYAPERDAMVWKIKSFPGGKEYMCRAEFSLPSITAEEAVPEKKAPIRVKFEIPYFTVSGIQVRYLKIIEKSGYQALPWVRYITMAGEYELRLI

SEQ ID NO: 116367 - protein, 258 aa, Oryza sativa
  unsure (1)..(258): unsure at all Xaa locations
  Clone ID: PAT_MRT4530_19876C.1.pep
PRVRVSALFLLXIKGRVLVWRDYRGDVSALQAERFFTKLLDKESDAEVLSPVVHDDAGVSYMFIQHNNVFLLTASRQNCNAASILLFLHRVVDVFKHYFEELEEESLRDNFVVVYELLDEMMDFGYPQYTEAMILSEFIKTDAYRMEVTQRPPMAVTNAVSWRSEGIRYKKNEVFLDVVESVNILVNSNGQIVRSDVIGELKMRTFLSGMPECKLGLNDRVLLEAQGRTTKGKSIDLDDIKFHQCVXRLPRFENDRTI

SEQ ID NO: 116368 - protein, 613 aa, Oryza sativa
  unsure (1)..(613): unsure at all Xaa locations
  Clone ID: PAT_MRT4530_19877C.1.pep
MLDINLFRTEKGGDPELIRRSQRNRSASVELVDEVIALDDQWRQRQFELDKIRQELNKTSKEIGKLKAKKEDASALIQSTEEIKKRLAAKETEVQEAKGTLDAKLVTIGNIVHESVPVSDDEANNLIVRTWGERRLEGNLKNHVDLCKMLDIVALEKGADVAGGRGYYLKDERCPXLNLALINFGLAFLRKRGFKPMQTPFFMRKETMGKCAQLAQFDEELYKAIIIVKQSGNDTFSLIKCNFSGMRYAGYSTCFRKEAGSHGRDTAGIFRVHQFEKIEQFCVTSPNDNESWEMHEEMIKNSEDFYKEIGLPYQLVSIVSGALNDAAAKKYDLEAWFPASKTYRELVSCSNCTDFQARRLGIGYGQKKNDEQSKQFVHMLNSTLTATERTLCCILENFQKENGVEVPKALQPYMGGIDFLPFKLDSKQAGSKNWKMRDLCALLINPGAFAHSPREFERSHQRQENISWANGEAAGAALNQSISGSSSPVAGPQGLTKLEAELGNSALRLLPPPSIAAASAALSFIAIVVRPTPGGEERTGGDGHRERVWVTSCPSGAPHRGGGGGGGSRAGMEGGDSVLDAVLDEEALDYDGNDVEMADADDAVEEAQAQEDP

SEQ ID NO: 116369 - protein, 461 aa, Oryza sativa
  Clone ID: PAT_MRT4530_19878C.1.pep
MAGAVSALFLLDVRGRVLVWRDYRGDVSALQAERFFTKLLDKEGDSEAHSPVVYDDAGVTYMFIQHNNVFLLTASRQNCNAASILLFLHRVVDVFKHYFEELEEESLRDNFVVVYELLDEMMDFGYPQYTEAKILSEFIKTDAYRMEVSQRPPMAVTNAVSWRSEGIRYKKNEVFLDVVESVNILVNSNGQIVRSDVVGALKMRTYLSTATNVEIEVPVPSDATNPNIRTSMGSAAYAPERDAMVWKVKSFPGGKDYMCRAEFSLPSITAEEAAPEKKAPIRVKFEIPYFTVSGIQVRYLKIIEKSGYQALPWVRYITMAGRCAWVGCSRRRRAAAGGDWRRTARPVANGRPPPSPRPLDAHTDMEAVPEVTGVDPGDDEVSEDARGGGGGAVCGEATEAAGDSRRRPYGGGGALCRSWISATTPSTSLRPSGSRAAGVVEFLWRLSTTEVRVRLVEVARR

SEQ ID NO: 116370 - protein, 60 aa, Oryza sativa
  Clone ID: PAT_MRT4530_19879C.1.pep
VVDIVLNCILWIRSPVYCFRGCYASVRYIWISLHDNICTGEESGRLTRGRKPARTGDPIQ

SEQ ID NO: 116371 - protein, 1732 aa, Oryza sativa
  Clone ID: PAT_MRT4530_1987C.1.pep
MSSSFVDNRVNTNLNQGVPASTMLVWTQVGEIVFPVYTTVPISAGPSMIGSENAVASTQDDSMSKDPPAEAENGTSTISEPKKDPSAAKPCLFDKNHGPTRITSEVTSCKVFLSATKTPPPKVQQSRISLRDADKEQGATLISDRFVGVIDIDPHEPSVLHLLEDYGSSSTSTPREVLAIDGTSTSARANAEAENQVTTPAQHIRAVNAILRETLYDPILNDDLARWTERLRESVTNLSNAFEEAAAAAHPEQPPTGGANGENPEQRESPHRATPPPRGTGDLRDHLNGRREARRARDNRNRSRHRVSSRRHNNEERGGRSSEDEDRDNRHNHHDQNDRERRVPGHASRGRHHNDDNDGDQRRDNNGGRRQDSREPGRRPRNRTPEPDRHPRRMYDRRQPTAPCAGCRAFSRSLRDVRWPERFRPGAIEKYDGSTDPEEFLQVYSMVLYAAGADDNALVNYLPTALKGSTRSWLMHLPPYSISSWADLWQQFVANFQGTYKRHAIEDDLHALTQNPGESLRDYVQRFNECRNTIPEITDASAIRAFKSGNNKPKTRGEKKPAKDAPESSKKNNRKNGKRKAQAEVLAAEYADPPKRPDPQGSDAKKAWCPIHKSDRHSLEVCLVFKKSLAKHMASEKGKRVRVVEKDTEAATQESDSAYPDSDLHVSHIFGGSTAYSSKREYKKVEREVCSTWQGAAPKMKWSQQKIEFSEEDHPKTAVIPGRYPIVVEPTIRNINAATLDAMGIPRSDGDPTDQPFNRITPQSSSKPLDKITLPVTFGQANNFRTEQITFDVAEFDTAYNAIIGRTALAKFMATSHYAYQVLKMPGPKGTITIQGNAKLAVQCDKRSLDMVEHTPSPPATAEPPKKVSKPNKTPKPDGAIKIVPLSSANPDKTVKIGASLGENRNSRSSPSSATMLTCSLGSRPTCRGSLGREVLHPEWLANLVMVWKANGKWRMCVDFTDLNKACPKDHFPLPRIDQLVDSTAGCELLSFLDAYSGYHQISMVKEDEEKTAFITPFGVFCYVKMPFGLITAGNTFQRTVQGSISDQLGNNVEAYVDDIVVKTKTSDSLIDNLRETFDSLRRYRLMLNPEKCTFGVPLGKLLGFLVSGRGIEANPEKIKAINNMKSPTRLKEVQKLTGSMAALSRFVARMGERGQPFFALLKKQDKFVWTQEAEEAFIALKRYLANPPVLVAPQPNEELFLYIAATPYSVSTVIVVEREKVQWPVYYVSEALYDAKTRYPQIQKLLYAVIMTSRKLRHYFQAHRVTVVSSFPLGEVVRNKDVVGHIAKWVVELSQFHVHFVPRTTIKSQVLADFVADWTMPNNRATNNTAEYEGLLAGIRATAAHGVKQLVVKGDSELVAKQVHKDYKCSNPELSKYLAEVRKLEKRFDGIKIKFIGSEELPEDDAEAEKITRKAKIYYMIDNDLYKKAPNGVLLKCVSSDDGRHLLLDIHEGICGSHAAGRTLVEKAFRQGFFWPTALKDACDMVQRCKACQFHSKHTKLLAQALQTIPLTWPFSCWGLDMLGPFPRGQGGYRFLFVAIDKFTKWIEATPTGEIKADNAIKFIKGIFCRYGLPHRIITDNGSQFISADFQDYCIGLRVKICFASVSHPQSNGQVERANGIVLQGIKTRVYDRLMSHDKKWVEELPSVLWAVRTTPTTYNKETPFFLVYGSEAVLSTELRHQSTRVQKYSDEDQEEQRNDDVNLLEEHRERVAVRAASYQQALRRYHEKHI

SEQ ID NO: 116372 - protein, 77 aa, Oryza sativa
  unsure (1)..(77): unsure at all Xaa locations
  Clone ID: PAT_MRT4530_19880C.1.pep
PMHVQTPAWHTISMCSSNSLPRSHHVNRILLVQVQSSKXPPIVRLPHPYISATGALEFFIHVCKWRWLPLIICSHIA

SEQ ID NO: 116373 - protein, 176 aa, Oryza sativa
  Clone ID: PAT_MRT4530_19881C.1.pep
NCPNISFESVRLPMLVDLRLLSCEGITSASMAAIAYSRLLEALQLDNCSLLTSVSLDLPHLKNISLVHLRKFAELTLRSPVLSYIKVSRCSVLHRVSITSNALQKLVLQKQESLSSLSLLCNNLIDVDLSDCESLTNAVCEVFSDGGGCPLLRSLILDNCESLSTVELNSSFMVNL

SEQ ID NO: 116374 - protein, 851 aa, Oryza sativa
  unsure (1)..(851): unsure at all Xaa locations
  Clone ID: PAT_MRT4530_19882C.1.pep
NFVDICHRYRDGSYLNLSGVPHAELLVMEAITCLRHLKTLIMGKGQLGEAFFQLLSECPLLTTLTVSDASLGSGIQEVTVNHDGLRELQILKCRALXRISVRCSQLQILSLRRTGMCSCVTDETLQIANSCPNLSVLDASNCPNISFESVRLXMLVDLRLLSCEGITSASMAAIAYSRLLEALQLDNCSLLTSVSLDLPHLKNISLVHLRQLVELTLRSPVXLSDIKISSCYSFIVLLHLIVPSCAHQKLVVQKPVSLSXISLFCYFLIDVXGTDCCALRAAVSDVLSGQVGRPLSRALILDNCESLSTVELISISMVELSLAGXHSMTLLYLSCPNLQNVNLDGCDHLERASFCPVGLESLNLGICPKLSDLHIEAPKMSLLELKGCGVLSEGSINCPRLTSLDASFCRKLMDDSLSQTAEACPLIENLILSSCVSIDLNGLSSLHCLHKLALLDLSYTFLTNLKPVFDSCPQLKILKLSACKYLSDSSLDALYREGALPMLVELDLSYSSIGQTAIEELLSCCTNLVNVNLNGCTNLHQLVCGSDDCSSGDMPVDVCPPDSAPVRSEEISERSDRLLETDKSXLLACTMLQDEELESAISRCSALEILNVHSCPKININVLDFSRLRVARNRQTIRYPMYTRNQKTFRPKKNAPSGNKGVQLKKHIDATLGSGNLRDAVRLPPGEDLNEWLAVNTVDFFNQVNILYGTLMEFCTPTTCPTMSAGPKFEYRWADGIQIKKPIEVSAPKYVEYLMDWIEVQLDDESIFPQKLGTPFPQNFREVVKTIFKRLFRVYAHIYHTHFQKIVSLKEEAHLNTCFKHFTLFTWEFKLIDKAELAPLIDLIESIVSVC

SEQ ID NO: 116375 - protein, 95 aa, Oryza sativa
  Clone ID: PAT_MRT4530_19883C.1.pep
MNTPPGRIIDDAGAALFNNLGVANAWELRGCEAGMDSLSTTYGSAPNTEALMDQNKAQLAQACAQDVLETVGNKCSAKCVTKPASSFERKLEQLH

SEQ ID NO: 116376 - protein, 283 aa, Oryza sativa
  unsure (1)..(283): unsure at all Xaa locations
  Clone ID: PAT_MRT4530_19884C.1.pep
MSLRLGLSLGVAGGAADEPPPRRGAAPPLQQLCGWNSGVGLFSSSSSSDEYGWTDYVDVVRACMLQSXRLSFVHGSYKGRGRTAMMACHDIEMPFLPRIDVNRPAPVRGASCSKEDEEPGATSPNSKLSSRSDDEDFGGSALDDEDEAEEEDEAEDEAEEDDDVMKIHRVVIGADENVAPSWLTGAGTVKFYHRGDGDVEVLESPQAQPIHVIKFCTKPLVIFVFLIESTGDAHVRFDWSGGADAPLRKSYYGLVLVARNAMTSSPRASSAAPLIFAGCGSLI

SEQ ID NO: 116377 - protein, 86 aa, Oryza sativa
  Clone ID: PAT_MRT4530_19885C.1.pep
MAGGHGRGGSSGGGGGVAGGGNLRPWECSPKCAGRCSNTQYKKACLTFCNKCCAKCLCVPPGTYGNKGACPCYNNWKTKEGGPKCP

SEQ ID NO: 116378 - protein, 71 aa, Oryza sativa
  Clone ID: PAT_MRT4530_19886C.1.pep
VNLPPAKLEMSPSKMIFHRPLHKGARDHTASHGDRPLVLHDETATPNNGEIEDVRDSGVRPCGLEQPNRET

SEQ ID NO: 116379 - protein, 62 aa, Oryza sativa
  Clone ID: PAT_MRT4530_19887C.1.pep
NYYCSSLESHFKIAFPPLVLVIRERAIHRLLVDVQVVSVLVVVVSSSCDTDSVWNQISHLQS

SEQ ID NO: 116380 - protein, 253 aa, Oryza sativa
  Clone ID: PAT_MRT4530_19888C.1.pep
MADSGSDAPISNRPEEEVTVEKTPEMEAAAEEERLRYLEFVQQAAAQVLVLAAAAYAYAKQGAGPLRPGVDHVEGTVKAVVGPVYDRFHGVPLDLLKFLDRKVGESVQELDRRVPPVVKEAPGLARSAAAEVRQAGLVGTATGLAKSAIARAEPRARDLYTRYEPVAERKAAEAWAALNRLPLVPSVTRAVLPAAASLSARYNTAVADGAKRGSAVATYLPLVPTERLSRVFGYPLADAATSPAPEMQPIPSQ

SEQ ID NO: 116381 - protein, 72 aa, Oryza sativa
  Clone ID: PAT_MRT4530_19889C.1.pep
ILNQMNHPRFNCEQFLTQNVSNQSNHPGFRQYRAEKKDNMPLHSVGLDKMPPNTLQMIKCHSIYYFQDILPL

SEQ ID NO: 116382 - protein, 452 aa, Oryza sativa
  unsure (1)..(452): unsure at all Xaa locations
  Clone ID: PAT_MRT4530_1988C.1.pep
MAVDPMEASDWLRTVEKKLGLIQCTDQERQGDLTVAEYLHEFYRLAHYAPEDVETDEDKQEKFLQGLKDELAVQLLLEDYEDFEKLVDKAMQLESEHNRMTNCKRRMVNNPVFPGGNQRQRTEPLQITGSSVVYPEFLPQEDGRNADNNTSNTNNDDTTNNHGSCPISDHSNKACNVGSIRQDVNDSINVGTQNDNLSNFDTEKDSNGDSNDGTADANVSKXDCPQPKRNLRHHSGHYARRRQPPLPPRRSVVRPRRRLLQRRRHLLHPGLPSVSRGDPRSCLPAVALLFSPSRPPPAAPPASPVHPPAAPPPLPASQLPPLPRSALRFAGKAPETRPRRRPVASPPLLRLRPPLPPLHLVHSSVSPERHRREPLHPPRRSCSAARPSSPVHRSATPPPPPASQRQGRPRHHFPSIQTPPRSIIVVSDRSRRRRPVGRPARRLAAPPPSSSS

SEQ ID NO: 116383 - protein, 132 aa, Oryza sativa
  Clone ID: PAT_MRT4530_19890C.1.pep
SRAQHLPSIEKAIEWSVKGGPLRNTDSARVSIPSTLKYDESRECYTYRTPLEETEKHRKGWHEGPSEKLLPWPAQKAPLLAGTDRSDRALTIGQTQGKAQTAAGRHTGHAIQEDVPEELASHILNSTSRNKT

SEQ ID NO: 116384 - protein, 279 aa, Oryza sativa
  Clone ID: PAT_MRT4530_19891C.1.pep
MAGAVATVSVGLAWLGLMAAAASATQFRVGGGRGWSVPDANAEPYNSWAGRMRFQIGDQLLFVYPKEMDAVVVVDQGAYDACNTSSSVAGGGGGRYDDGNTVFTFDRSGPFFFISGNEANCRAGEKLVVVVMADRGGRHAPPPSPPAVPPPVAPVPMPSPASSPPSPAPAAATPSLAPSPVATTPSPSPSVSPMAPAPAPTTSTPSSPPAPAAMAPSPSTTPGGVAQPPPPPGTDGANATTPAAPAANDRSGAAAAAPVVAGVVVTSLGAYIGYAMLAI

SEQ ID NO: 116385 - protein, 94 aa, Oryza sativa
  unsure (1)..(94): unsure at all Xaa locations
  Clone ID: PAT_MRT4530_19892C.1.pep
MAKTMEQGQREPRDRTGTLPSQRPLGRRMQREEYMPKGDDFAKASSPPRGLKKPFRPIKPRGYWADDRPTAHQEPMNLNYTMYPCKXPFHKGNH

SEQ ID NO: 116386 - protein, 91 aa, Oryza sativa
  Clone ID: PAT_MRT4530_19893C.1.pep
MSSSPATLSSVYHAKIFVNLYIYPVPSSLRMELKAGGTYRFGEAAIQAIGPPTPSLVVTDDERATLLQSLTMIEPAAGSAVVADEHSRKGG

SEQ ID NO: 116387 - protein, 82 aa, Oryza sativa
  unsure (1)..(82): unsure at all Xaa locations
  Clone ID: PAT_MRT4530_19894C.1.pep
LAFNLVRNQVWLQVQLVXYQDIYIDIDIVQAIQLQLLVHLYFDRYLDRALALADVMVAFNDAFYSGFYGAPYGVTTLITTLG

SEQ ID NO: 116388 - protein, 75 aa, Oryza sativa
  Clone ID: PAT_MRT4530_19895C.1.pep
KQEGIGRRRPFFEKEDLLDKIKKSVFCPNFLEPFFGLPLAKTKTRCLKYLGLGPQSIHLVLSLTGKNRVFTCRSN

SEQ ID NO: 116389 - protein, 77 aa, Oryza sativa
  unsure (1)..(77): unsure at all Xaa locations
  Clone ID: PAT_MRT4530_19896C.1.pep
GAKNPRGVGVPRPSGPRGVRPDPLGGTKRRANASPSGPTXPRGHVCDCVCLKPQGKKLPRSLALPSRRPCRRRRRLH

SEQ ID NO: 116390 - protein, 244 aa, Oryza sativa
  unsure (1)..(244): unsure at all Xaa locations
  Clone ID: PAT_MRT4530_19897C.1.pep
LASVLIRSSHRLARSSSSRRRSWRPWWPSPRAHAPAATPRXNPRALPRGKPRGPPLGPHPPRAKRSPTRNTPPASATPLPGQAASTGSSPRPRPHALHAPHSLPPPPAPRGGAGPAPPAGPPRPRANLPHRLAPGPKAQALATAPCTPPHLPPAPGHPAGMAERRSRSAARHSPRNWPPPXRANAPQAGPLGGFLGFPGFXPSPPPPRKALPPTRARARTAPSAXSASHRATYRRRRLRPRAQA

SEQ ID NO: 116391 - protein, 133 aa, Oryza sativa
  Clone ID: PAT_MRT4530_19898C.1.pep
MVEAPIQGIVPSMGGEEASSIMRAAMASDAMRIPHGRAGVGCDELRPTGDGWAGELVQPLISHTNENMRSHRCQCKGLHSLPTSPSREGDRDASSELNLARACATTELLLAELPSTLPPLHSSDAAAASPSFV

SEQ ID NO: 116392 - protein, 67 aa, Oryza sativa
  Clone ID: PAT_MRT4530_19899C.1.pep
MAEIPVRRPLGTGSTNEDTHGRRWFWVTGCTGEETDSDRPRARSSIMEWRWREGRRGRQRLATVPFP

SEQ ID NO: 116393 - protein, 88 aa, Oryza sativa
  Clone ID: PAT_MRT4530_1989C.1.pep
QDLKERFWWASMKREIAEHVAVCDVCQRVKAEHQKPAGLLQPLKIPEWKWEEIGMDFIMYGRKCRTPLLWDQTGERQVFGMDILREAE

SEQ ID NO: 116394 - protein, 176 aa, Oryza sativa
  unsure (1)..(176): unsure at all Xaa locations
  Clone ID: PAT_MRT4530_198C.1.pep
MVPSPSLAAPPPTAAATRPFLVIPTGGHGTLVAXATVIKGISSQGASPPWTPASPRGRQLRGIGNRGAEGEAQRDERHGGRRSVAAAARVGDGAVAXDLAGGADDDDTGTAQPAGSETRGSTTTMQAQPGPPALRRGAQQRRRXQRSPACRLRDEGLDDDDTGTARPTGFEMRRLT

SEQ ID NO: 116395 - protein, 48 aa, Oryza sativa
  Clone ID: PAT_MRT4530_19900C.1.pep
LSAIMSPCSLQRSSVCGKSYCTVVFVASPSVLLSACGLLLPLFGSFWL

SEQ ID NO: 116396 - protein, 139 aa, Oryza sativa
  unsure (1)..(139): unsure at all Xaa locations
  Clone ID: PAT_MRT4530_19901C.1.pep
MAADHELRAALLEMVVAAALGMVSTSPAHVSAGAINTTCPIAEDILYKEMTSILAKSPELAGPVLRLFSVDCCVGGCEGYILLDSTAGXNKADEDSPLNNGAKGYEAADAIKAKLDAACPGIEYCADTLALAEPERMMQ

SEQ ID NO: 116397 - protein, 434 aa, Oryza sativa
  Clone ID: PAT_MRT4530_19902C.1.pep
MALPPPLLRFFIVAVLLSSVAAWVAAATTLHERDAAALRDVRAGLRDLPGSRFFESWDDATDPCDYAGVVCEPDEDDPAALRVSVLTLGTGLTDSPGLAGTLPASLASLTALTDFVLYPGRVAGAIPTDIGSGLRRLRLLSMSGNQLTGQIPESLAGLPDLHTLDLGNNHLDGSIPSGLLLPSSQSLKVLILANNGGLSGQIPDQFSSSQLFHVDLSRNSITGSLPPLAQTVRYFSVAANSMQGSLDGAFGNGSAPTDLAFLDLSMNNFSGSIPRELFALPSASSLLLSRNNFTGSLAVPAFASERAATPPWSVVDVSHNGITGEVPEELAAVESLYVNNNRMYGEVPEAVARSVFAGRMTTFYAQHNFLTGFPVPPLPLPDSAALCLSYNCMELPSASAANGCPTIGGPMESRPADQCRSSTAANAGSSGGDG

SEQ ID NO: 116398 - protein, 349 aa, Oryza sativa
  Clone ID: PAT_MRT4530_19903C.1.pep
MLDGGFIELKLRYEDLAAGDFVRSDDIYAGGHTWRVLCYPRGGGAMNSNGQRIGGEYLSIKLDLVTRSTNVRAIFAAFLVHLDGHPSPVHAKSFVAVYPLGAGGRGGGKAAAGWMYFASRSELEKKFVSGDGWVTVVCGVLIPSDSPQALSPPPPPPPSSGGGGGHIGRLLYGAADDTADVALVVGGETFRAHRAVLAARSPVFKAALFGSMAEATAPSVALRDMDPAAFRAVLHFIYTDALPDDIDELAGFSPVDMFQHLLAAAERYELGGLKLLSTKKLLDNVTPENVAGIIVCAETYGCPELKKKCLDYLAREDEHFRKAATTQGYLRLLQDFPSLMDEIRAVIER

SEQ ID NO: 116399 - protein, 103 aa, Oryza sativa
  unsure (1)..(103): unsure at all Xaa locations
  Clone ID: PAT_MRT4530_19904C.1.pep
NSSSVPGDPLESTCRSGNLYEVDSEDMNHEKFWNGSIIKLPQPSLSQLKGAPWFKSGEEKIPSATGGRAKQSRVEKFCXQVRYXKTRRKKSDKRRRPPNLSSC

SEQ ID NO: 116400 - protein, 267 aa, Oryza sativa
  Clone ID: PAT_MRT4530_19905C.1.pep
MMSSDDDLEPQLKAVENYYFVDDNDVPVSFDVLPFQFDAAEGVASFKKDVYLRGFTDGGLQKVYKQVVAWKLVLDGDSPEIAVLSTEGSWIALLKPRPSYEETIRSVLITVEMLHFVRRRPTDSEKDMWDHLYGVFERFVVRPLEDDFANHQNLIKLFAQRDPDLANSQVLQVFIKDKIMEKTNEVGSNNLDNKREPDIKQEPDIKQEPVAAGDEMEEIVEEGIPDAPSNDDDDDEEDEEDGDLFDSVCAICDNGGELLWYALFYFP

SEQ ID NO: 116401 - protein, 220 aa, Oryza sativa
  unsure (1)..(220): unsure at all Xaa locations
  Clone ID: PAT_MRT4530_19906C.1.pep
MEGPMQRMPLHRPEYLFGVEGFVRELRMVAFAIGFKTAPLYAQIPHDRNEEKCRVKVTLTSDXEDIPSVMFEAGRRRCAHACQXVARVTIGEFRDLYIEELVNTEYRYHPRKTHDRVQASYVDPEGIEDDATLCHVVEEAAPVRVDPPVIILSGDEEEDPKENHTHLEVKWGATQDDDGEPSGSRSNNNGENPTLAQVLAXQTQLMNKTKGTILLLLRTS

SEQ ID NO: 116402 - protein, 112 aa, Oryza sativa
  Clone ID: PAT_MRT4530_19907C.1.pep
WWRIVVTTLLRTSLRRRRSTTSMTPTTSSPTASKRRDPVVATSSSPATTMVRRTTLTTLTLTYSSTAKSALSPVATSTLMPPSLSPPPVGTRTSTLPAPPLTGIHHLVCTRR

SEQ ID NO: 116403 - protein, 68 aa, Oryza sativa
  Clone ID: PAT_MRT4530_19908C.1.pep
MDREERLTPSHLPMPVEPAFVSPVLSLEGLRPGEGEGSPAPVRPKIAPEEEGRRLPAAPTAWSGDGAG

SEQ ID NO: 116404 - protein, 172 aa, Oryza sativa
  unsure (1)..(172): unsure at all Xaa locations
  Clone ID: PAT_MRT4530_19909C.1.pep
CQGVIXGSTSLDGRATXRRXMRRAHSXPGXTXXRGRAAPPCGXAPSWXGRRPRTRQQGSXNRRGRWXXRRRGAVLGTQPXARVSTSAAIXLRXRGERGRRASCPGVSSPSRAQXRRRTSQRRXPLPARRRDTAITIGDVARGXVSCSIXSTRRXLLFAXVDLTRPWPPAPRF

SEQ ID NO: 116405 - protein, 66 aa, Oryza sativa
  Clone ID: PAT_MRT4530_1990C.1.pep
DDQKSIFDKGNSCLMANIIRGERGGTPYKNQGPSLPLKRHKKIQVKKGGKKTPNTYPRGPTPPKGG

SEQ ID NO: 116406 - protein, 52 aa, Oryza sativa
  Clone ID: PAT_MRT4530_19910C.1.pep
KIKSLEPGGHRFLALFSKDLNYNLYRPFKKYLVKGNAKIKCKPVYTLTSQTL

SEQ ID NO: 116407 - protein, 85 aa, Oryza sativa
  Clone ID: PAT_MRT4530_19911C.1.pep
SRAWCSSLACRVFSVPFGSMGLSVCSPDPGARPPGRCIGRAYLAFLLLPFFFLCVPFFFFFSSFFFFVCLFFFVSIFVVFFFYQF

SEQ ID NO: 116408 - protein, 525 aa, Oryza sativa
  Clone ID: PAT_MRT4530_19912C.1.pep
MLPNFQSLLGRLTPATSTVEQASSTISNMVVANGNVDTEEGTLEIGMEYRTVSGVAGPLVILDKVKGPKYQEIVNIRLGDGTTRRGQVLEVDGEKAVVQVFEGTSGIDNKYTTVQFTGEVLKTPVSLDMLGRVFNGSGKPIDNGPPILPEAYLDISDFDIGFAGAGSSINPSERTYPEEMIQTGISTIDVMNSIARGQKIPLFSAAGLPHNEIAAQICRQAGLVKRLEKSDNILESSEDENFAIVFAAMGVNMETAQFFKRDFEENGSMERVTLFLNLANDPTIERIITPRIALTTAEYLAYECGKHVLVILTDMSSYADALREVSAAREEVPGRRGYPGYMYTDLATIYERAGRIEGRKGSITQIPILTMPNDDITHPTPDLTGYITEGQIYIDRQLHNRQIYPPINVLPSLSRLMKSAIGEGMTRRDHSDVSNQLYANYAIGKDVQAMKAVVGEEALSSEDLLYLEFLDKFERKFVTQGAYDTRNIFQSLDLAWSLLRIFPRELLHRIPAKTLDQYYSRDASH

SEQ ID NO: 116409 - protein, 206 aa, Oryza sativa
  Clone ID: PAT_MRT4530_19913C.1.pep
MAVVFRYVDSFGIVKERFVGLVHVKETTSSYLKTVIDSLFTKFKLSMSQVRGQGYDGASNMRSVVRKHKGVSNFFSMISTLLNVVGGSSKRRDMIRDINNEEVAKSLGCGLIQTGSGLTQEQCLKRLGDTRWSSHYKTLKSLVDMFPTIVKVLEYASNDERDGSHRDQANGLLVYFQSFDFAFYLHLMLTTLMITNTLSLAMQRKD

SEQ ID NO: 116410 - protein, 57 aa, Oryza sativa
  Clone ID: PAT_MRT4530_19914C.1.pep
MALLLVVDVVAIRDWSWHPALSGRRVIEMHHDEYGAAVKKEKVEPEIDLEEAADCGA

SEQ ID NO: 116411 - protein, 1042 aa, Oryza sativa
  Clone ID: PAT_MRT4530_19915C.1.pep
MRTAPPPDVLQAIALAEAEAKKAKKDPRRSHKGAAALATPVANAKVRERKAAPATAPPKFSKAARRFYNENIKEHEPQRLAKVLAAAGVASRRTCEELIFQGKVTVNGSVCTAPQTKVDISKDSIYVNGNRISKKLPPKLYFAVNKPKGYICSCGEPKSIISLFDDYLKGWNKIQPGVPKPRLFTVGRLDVATSGLIIITNDGEFAQKLSHPSSNIMKEYVVTIDGPVHRNHLIAISEGTKIDGVKCIPDLVEPLDVQSNTKRTRIRIAVHEGRNHEVRELVQNAGLEVYALKRVRIGRFRLPPDLRLRVSDRGYTLSIYMVVEMGYCQVEGRVEMNFLYRTSQPVAPELPRIPEQDQQRDSLQKPVTTLEGLIADDPYHPSPEDEDTDNGDVDIGGDSADADSKNSVPTGKHTDVLDDEGWITIPNKELPDNWNDLSDMLQLQPLDRPFLFPENGDSNVKNGENGSQVVEDDMQSVELNSEMSPMTQDDMQNVELDNEMSPSKQDDMQNVELNNEISPSKQDILETESLLRLEDHKQQIESMLQRFKMSNFFVRIAESDEPLWSNKKLAVSKVPKEQSYSDNQENNKGSRSNAYNTISDKGVFDGSTSGGIARGTARCYALQNGDIVVVLQVNVGVNKMEAPVLEVLQFEKSSSSNYITKNLVNGLSSASSTQPPNIRPPPISESQEFVPEKPAKTPDIINDGQLSFRGVPLEPERYSNISPQHVKDIVVLVDAITIVFEEASKGGAPLSLPIASIEVGHGHSLPNLALRRGEEHSFILKPATMSFRDRRTNNDAPLTLSLPKMNGTATNVSLAKVGETIGSLMDQYAVLVSYRCNYTESKLFFKQATSWRPCVASDLMISVSSELSLRNPISSARVPQLPVQVLTLEATNMTSENLTVTVLAPEASGSSSVVSLNSAPTTPNSSYDNLNESVRRSGLGKHRAGFRRMNSVLAGSPKESDNGGNRISTSGGCTHLWLQSAVPLGCIPARSSTTVKLELLPLTDGIITLDTLQITIREKGLTYIPEHSLEIYASAANSTGSS

SEQ ID NO: 116412 - protein, 214 aa, Oryza sativa
  Clone ID: PAT_MRT4530_19916C.1.pep
MGLQDVADDGEGGWHKQRLHDAVGGQTGASDGGRGQRGSMRWSAAPSARELGSCRRWHGRAGDRGRAGWRWGAGAVEFELAEVVQVAVLGGGGSRCGVEVYRVWCEELPALAGGVHVFFCFSWLQPLKAPAARSGLFHAHNGLLHAAAVEARDPRPRPTTTTRAGAMSSANEEEEEVAIAGSGSAAADFRTPRCVRATHLLAKTGFDRTRKSFS

SEQ ID NO: 116413 - protein, 103 aa, Oryza sativa
  Clone ID: PAT_MRT4530_19917C.1.pep
SAPRNPPPFLFNFPPPLGPPRFTPIPSGPQFYPLLSPSPFPQRTPFSPNFPPLFSFPQLAALFPLPPPSQISSFNPFFFSSFFFLKFLSSLFPPFFFPFFFFF

SEQ ID NO: 116414 - protein, 65 aa, Oryza sativa
  Clone ID: PAT_MRT4530_19918C.1.pep
NPLSLGWVNIKKAAPDRLSLPYLILYMEREPPLSCAIKFSGVGGLLTPCPILFPGPYPPLLSFTS

SEQ ID NO: 116415 - protein, 870 aa, Oryza sativa
  unsure (1)..(870): unsure at all Xaa locations
  Clone ID: PAT_MRT4530_19919C.1.pep
SPPAAASGTRLLHGDLDLTIHEARGLPNMDFLSTLLRRLCLCLRPPARRPSPGQSRGSVPADEDGRRQPHGHHLLPTSDPYAAVVVAGNTLARTHVVRDSEDPEWSTHVLLHLAHHATGVAFHVKDADPFGSDLIGVAILPAADVLAAAAAPIVRRELPLYRPDGRGRPKPSSAIVITASFVPAGEHQSIYDAEHGGVPAAYFPARRGCEVKLYQDAHVAGGELDGVRRRGVFEPGRCWEDMCLAVLGAQHLVYVAGWSVNTKVRLVREAMSPEMAGMSLGALLKYKSQEGVRVCLLVWDDKTSHDTFFLKTGGLMQTHDEETKKFFKDSSVICLLSPRYPSSKLSMAKQKARYNXLLTSVQIVGTMYTQHQKCLLVDTPASGSTRRITAFLGGLDLAAGRYDTPSHRLFADLGTVFSGDVYNPAIPPAGNKGGAGEEGPRQPWHDMHCRVDGPAAYDVLENFEQRWRKATKLFRRAKAHWKDDALLKLERISWILSPSDSGAGDGDGGDSHLYALPDGHPDCWNAQVFRSVDSGSVKGLPRCWETKEAKHLVCDKNVTVEQSIHTAYVRAIRSAKRFIYIENQYFIGSSFAWPSYKHQGAGNLVPMEIALKVASKIAAGERFAVYIVIPMWPEGVPTSGPIQEILFWQRQTMQAMYEVIAAAIRAAGMEGAAHPRDYLNFYCLGKREAAAAAAAGSPEQEHNPAASSARRHRRFMIYVHSKGMIVDDEYVIVGSANINQRSLAGSRDTEIAVGAYQPNLRAGAGAGDGQVFGFRMLLWEEHLGSSEWRELRSPESPECVKRVNEIAAENWRRYAADDDDVAMQGHLMRYPVDVGDDGKISELRGHEFFPDVGGRILGSTNNNYWDYLTM

SEQ ID NO: 116416 - protein, 1239 aa, Oryza sativa
  Clone ID: PAT_MRT4530_1991C.1.pep
MPISAEPSMTRNENAVAITQDDSTSKGPPAEAENRTSTISELEKDSNAAKPCRSDKKHKPTRITSEATGSWCPIHKTRKHTLQACWVFLNARAEIRACKERGIQRVSPTRGVYCPIHKTKNHDLSSCKVFLSVTNMSSPKVLAIDGTNTSARANTEAENQTTTPAQHIRTLNAILRETPYDPVLNDDLAQWTERLWESVTNLSNAFEEAVAASHPEQQPTGGINVLYAAGADDNALANYLPTALKGSARSWLMHLPPYSISSWADLWQQFVANFQGTYKRHAIEDDLHALTQNSGESLREYVGHFNECRNTIPEITDASVIRAFKSSVRDRYTTQELATRHITTTRRLFEIVERCAHVDDALRRKNDKPKTGGEKKPATETPESSKKKNRKNAKRKAQAEVLAAEYANPPKRPDPQAYNAIIGRTALAKFMAASHYADQVLKMPGPKGTITIQGNAKLAVQCDKRSLDMVEQTPSPPATTEPPKKMSKTNKTPKPNGAIKTVPLSSANPDKTPSDMPGVPREVIEHKLMVRPDAKPVKQRLQRFAPDRRQAIREELDKLLKAGFIREVLHPEWLANPVMVQKANGKWRMCVDFTDLNKACPKDHFPLPRIDQLVDSTAGCELLSFLDAYSGYHQISMAREDEEKTAFITPFGVFCYVKMPFGLITAGNTFQRTVQGALSNQLGNNVEAYVDDIVVKTKKSDSLIDDLRETFDNLRQYRLMLNPQKCTFGVPSGKLLGFLVSGRGIEANPEKIKAIENMKSPARLKEEAEEEFIALKRYLSNPHVLVAPQPNEELFLYIAVTPYSVSTVIVVEREKVQRLVYYVSEALHDAKTRYPQFQKLLYAVIMTSRTLCHYFQAYRVTVVSSFPLGEVVRNKDVVGRIAKWVVELSQFDVHFVPRTTIKSQVLADFVADWTMPDNQSGNQIDNETWIMAFDGALNSQGAGTGFILTSPSGDQFKHAIHLNFRATNNTAEYEGLLAGIRAAAELGVKRLIVKWDSELVANQVHKDYKCSNPELSKYLVYRKNNIEPDDLARHASRREPLEPGTFLDILTKPSVKEAISEINIAAPDISSEVTEAERATADIETTDDWRTPLIKFINSEELPEDDAEAEKITCKAKIYCMIGNDLYKKAPNRVLLKCVSSDDGRHLLLDIHEGIYGSHAAGRTLVGKAFRQGFFWPTALKDTCDMVQRCEACQFHSKHTKLPAQALQTDKALSDSVETKDHVRPGRVRVLPLRINQAA

SEQ ID NO: 116417 - protein, 94 aa, Oryza sativa
  unsure (1)..(94): unsure at all Xaa locations
  Clone ID: PAT_MRT4530_19920C.1.pep
DVHLKQKLFLHRLQDESVIDHLSTLKEIIVDLEPLEVKYDEEDLGIILLCSLPTSYANFEDTILXYSPDIVSLQEVYDALXSKEKMKNMVPSED

SEQ ID NO: 116418 - protein, 95 aa, Oryza sativa
  Clone ID: PAT_MRT4530_19921C.1.pep
WPEGKKGGDFGGFPGGKKGGPFQDVAFSPPVGGIRAPFKLTQGAPFFLCEGRKNCSVCFRWEKKPPRLNKKQIPWVFVNLKNPEKGGSQFYVYPF

SEQ ID NO: 116419 - protein, 120 aa, Oryza sativa
  Clone ID: PAT_MRT4530_19922C.1.pep
LKFESHLYLTVRLLKLVQFSLNSFVATDPIELVHTLKKTGLNSWRNRGEKFRLTDLNCSFTGRINFEVNVLASDWQEDRRSDQEDRTEGVLTSWKLQSRDGNSISSAASWLVKILRLLVY

SEQ ID NO: 116420 - protein, 75 aa, Oryza sativa
  unsure (1)..(75): unsure at all Xaa locations
  Clone ID: PAT_MRT4530_19923C.1.pep
WLRIKPLHVLRVGQGGGPALGEPRVQELVRVMGAACRKLGRKRRWTGHRNRLPPVRVLPPPHHPPXFLSFPFPFF

SEQ ID NO: 116421 - protein, 188 aa, Oryza sativa
  Clone ID: PAT_MRT4530_19924C.1.pep
MGIDLVAGGRNKKTKRTAPRSDDVYLKLLVKLYRFLVRRTKSNFNAVILKRLFMSKTNRPPLSLRRLAKFMEGKEENNIAVIVGTVTDDKRIQEIPKMKVTALRFTETARARIVNAGGECLTFDQLALRAPLGENTVLLRGPKNAREAVRHFGKAPGVPHSHTKPYVRSKGRKFEKARGRRNSRGFKV

SEQ ID NO: 116422 - protein, 119 aa, Oryza sativa
  Clone ID: PAT_MRT4530_19925C.1.pep
SFLVLNLWPSPFQGEEIVRTPLGCPWGDPIVNPCQGPTHQRGGFQKAPPGEFQPTTSSGFRGLGPGGGLVRLTLADLNFFFTLWGSFSRPFLKASFTFFPPIFFLFFGFVLNSFVFETN

SEQ ID NO: 116423 - protein, 227 aa, Oryza sativa
  Clone ID: PAT_MRT4530_19926C.1.pep
MALDMKSHLYESFEVTLARANTWLYASQASGVPIKLMSVQSDDLLTKISRVGDATSATVNSGLLPDLSNATLEDYQGYNTEVVKAARLWYSSIGGEMPLEITPKVGDTKLGFAISRTEEGFIYISSVLQDDNDSETPSTRSGMHNLFNRAREASKLLVISRVSNEKVLPWMISSSGAIRCFDTLSISQKLSLSRYPLCSFQLHLLMWEKPIHPAERSIHRPKMPFFF

SEQ ID NO: 116424 - protein, 50 aa, Oryza sativa
  Clone ID: PAT_MRT4530_19927C.1.pep
TVSWRSEGIRYKKNEVFLDVVESVNILVNSNGQIVRSDVVGALKMRTYLR

SEQ ID NO: 116425 - protein, 85 aa, Oryza sativa
  unsure (1)..(85): unsure at all Xaa locations
  Clone ID: PAT_MRT4530_19928C.1.pep
KGLPAVWPSXDLLDSRAPEPPYPFHVQQDISAGDVLPELIGSVFDKVECILCYPCCNRCASEQNWSTATHSISAKINQLCASHAS

SEQ ID NO: 116426 - protein, 51 aa, Oryza sativa
  unsure (1)..(51): unsure at all Xaa locations
  Clone ID: PAT_MRT4530_19929C.1.pep
KRGMEKVRNPVGNPFAGIDPEKIVERGSXTNLFSSXITRNFKGRPPPFFFI

SEQ ID NO: 116427 - protein, 121 aa, Oryza sativa
  Clone ID: PAT_MRT4530_1992C.1.pep
MASLTLPPAPTNPRQDAIDLHKAFKGFGCDSTTVINILTHRDSMQRALIQQEYRTMYSEDLSRRISSELSGHHKKAMLLWILDPAGRDATVLREALSGDTIDLRAATEIICSRTPSQLQIM

SEQ ID NO: 116428 - protein, 171 aa, Oryza sativa
  unsure (1)..(171): unsure at all Xaa locations
  Clone ID: PAT_MRT4530_19930C.1.pep
WGGLFGGGXPPLFFPGXKKXXKGPXXXXGXXGXPPPPGXAQXXKKXPXXKXXXXAFXXXXXNXXPPXXXLXPFXVLWGXXXTTXXNPFPPPGXGGXXNLGFLPNXPLXXPPPPXXVLGXNPKXXSXLGPFPPXXXXPXXGXKXPXXPXPLGXXXXKXRVFLGPLXGFPXFX

SEQ ID NO: 116429 - protein, 341 aa, Oryza sativa
  Clone ID: PAT_MRT4530_19931C.1.pep
MGKLAAVVRSVLRLTNESMRIVMVTIIGVLLGFFIGISFPSVSITKLHFPSSFVSYIEDRNSGLTTQALLNHAWTSARNARENSSEPSSNTTLKIYVPTNPKGAERLAPAIVVPETDFHLRRLWGEPSEDLPFKPKYLVTFTVGYAQKENINRAVKKFSDNFAILLFHYDGRVLNFEGYLLKIYLCTYIYIKLVKKYHLEISQPGLEPDRGLTWQMTKRRGDREVHNFVEIMAPVFSRDAWRCVWHMIQNDLVHGWGLDFALRKCVEPAHEKIGVVDSQWIVHQVVPSLGNQGKSENGRPAWEGVRARCRKEWGMFQTRMAEAEKAYYKMMGITPPNSTLV

SEQ ID NO: 116430 - protein, 200 aa, Oryza sativa
  unsure (1)..(200): unsure at all Xaa locations
  Clone ID: PAT_MRT4530_19932C.1.pep
PRVRDIVAAYEYIFIWDEDLGVEHFNAEEYIKLVKKYHLEISQPGLEPDRGLTWQMTKRRGDREVHKVTEERPGWCSDPHLPPCAAFVEIMAPVFSRDAWRCVWHMIQNDLVHGWGLDFALRKCVEPAHEKIGVVDSQWIVHQVVPSLGNQGKSENGRPAWEGVKARCXKEWGMFQTRMAEAEKAYYKMMGITPSNSTLV

SEQ ID NO: 116431 - protein, 91 aa, Oryza sativa
  unsure (1)..(91): unsure at all Xaa locations
  Clone ID: PAT_MRT4530_19933C.1.pep
SHFSITFSCNDPTKVYLIVSYVSSQAYKNIVSIDLSHLFIFQLSYSIRFPXPLSVFFHTYCTFKIPYKYILKNFKVNLYFMPFIIIIKPYL

SEQ ID NO: 116432 - protein, 91 aa, Oryza sativa
  Clone ID: PAT_MRT4530_19934C.1.pep
GLVAHNPSHKSVSTAIHGVGVTNFGLSTPAAAASSLVRPVAGAGRVVFPRVGRGGFAAVRASGPATPSDISDKMSESIYKANEACAEDTAI

SEQ ID NO: 116433 - protein, 441 aa, Oryza sativa
  unsure (1)..(441): unsure at all Xaa locations
  Clone ID: PAT_MRT4530_19935C.1.pep
RRRRRRFCLRLRRRPPPGGSACTSLPYVGRGGEGEAPHPQGRDDVVLPRQFEQLHPGGQYLVRASCAMQFLEFSAIFPRLCLFFGEKFRRIGSRQFQKWWRXPMIKDTVEGLISTGWLELMNGAMCMHAEAAVHCYINMIYIPTMXYDLAQVHQGVVGGQIPRIGWQIDPISHSAIQDYCLGAHAGIDDFFXRVDYQDSDTRKGNRRTRGCERGSKTLGSSADLFADIFPKIYEPSPSEFYFEVDDNYLVFQLDALFFCYNVEQWVNDFVAALAQVANIMTTNHAMITMDTDFKIQLXIYHYGXSWFRMMDKLIHYVNLIGHANALYSMSSIYTDAKYAXNEPWPLKTNDFYLYADNPNAWTGSFTRRPSLKQXVRAMIGGFTASWLLEFFXGESKLNLTTDTLADALALAQHHDAVTGTEKQHITNDYAMRLSIGYTQVS

SEQ ID NO: 116434 - protein, 397 aa, Oryza sativa
  Clone ID: PAT_MRT4530_19936C.1.pep
MAAASIKLSSSAKPLAPAPVSHLLPLRAHHARPLPARLPPPPRVAVQHTAARASDASPRTASFDKVLETLIGGDHFSEEEAEATLRLLLEEENEARIAAFLVLLRAKGETYEEIVGLAKAMIGCCVRVDGLDDAVDIVGTGGDGADTVNISTGSTILAAAAGAKVAKQGSRASSSACGSADVLEAFGVNIELGPEGIKRCVNEVGVGFMMSANYHPAMKIVKPVRKKLKIKTVFNILGPLLNPARVPYAVIGVYHENIVTKMAKAAQKFGMKRALVVHSKGLDEISPLGPGYILDVTPRKIEKMLFDPLDFGIPRCTLEDLKGGDPAFNAKVLQDVLAGQRGSIADALVLNAAASLLVSGKVNTLHDGVALAQETQRSGEAINTLESWIKISNSCRD

SEQ ID NO: 116435 - protein, 109 aa, Oryza sativa
  Clone ID: PAT_MRT4530_19937C.1.pep
GKRAILFHKLLNFQNLKGGFRFFFARPAREKKNRGFNPEKKFLGSPTTFCRRSFSNALFFNGARLITGFSKNLGRLLKCPPPLEAPGFKKKYPACWGGGLFFGENYFLS

SEQ ID NO: 116436 - protein, 142 aa, Oryza sativa
  Clone ID: PAT_MRT4530_19938C.1.pep
MEWTTVELGEARSVIARVSNAYNSGASSSNSTGDTKHCRIMRELQARFPSRTMVEVIDLYINLTVETTAQLQDAGATAAAVVHPTFGLANDNLGMPVVNNNNGMVFGGAPMKEGVVAMNSGDGEVVNQDIGFCHFAQAQKTQ

SEQ ID NO: 116437 - protein, 99 aa, Oryza sativa
  Clone ID: PAT_MRT4530_19939C.1.pep
EIKIPGVFFFWGERPPPPREKKNLDLNYHPPGGGGKKTFLTSPGFRGRPLTPPILTMGGGNLAIHPTGWGGLPPTIPLGSPGFVKVWPKKKITSRGGNF

SEQ ID NO: 116438 - protein, 117 aa, Oryza sativa
  unsure (1)..(117): unsure at all Xaa locations
  Clone ID: PAT_MRT4530_1993C.1.pep
PTTGPPPLPPRSPPPPATXPPPPPPPATAAAAVSSPAGADPSSNPHGQPRAARESRSPPRSARRRRRRRRPPGPGSARRRHLPTRRCAPDPIPSPYPPHSGATLCPDGVSTPPPTSP

SEQ ID NO: 116439 - protein, 303 aa, Oryza sativa
  Clone ID: PAT_MRT4530_19940C.1.pep
MARSPHESSFSFSRRHFKWPVLGKSSSHGASNAGEDDFIKAEDDEEATMAFSSTCPSFHSEDFVSPPPCKPLKQQQQQQPQQQRRKGRTAVSRLRTALAAALAGRHRQVGLGARLTGTLYGHRRGHVHLAFQVDPRACPALLLELAAPTASLVREMASGLVRIALECERAKGGGACAFPTAAAAPSSSSSSSSSSSAGGRKLVEETVWRAYCNGRSCGYAVRRECGAADWRVLRALEPVSMGAGVIPAACGGGEGDVMYMRARFERVVGSRDSEAFYMMNPDCGGSGSNNNGGPELSVYLLRV

SEQ ID NO: 116440 - protein, 247 aa, Oryza sativa
  unsure (1)..(247): unsure at all Xaa locations
  Clone ID: PAT_MRT4530_19941C.1.pep
MNMLISSIYSMLTMHELHRKNKSGVIFKINFKKAYDKVKWPFVQQTLRMKXFTPKWCQWIASFIQGGHVGIKVNDQIGNNFQTLKGLRQGDPLSPILFNLVVDMLALLIKRAKDASFINGVIPYLVDDGLSILQYTDDTIIFLEHDLQQAKNLKLILSVFEKLSGLKINFHKKSLVTKTGKLLKKELRKNLVVKKVIFRATYWLXYWAQLQKFEEDREFIKFTCCKLETTIMQLFVNYSWRFTNRLQ

SEQ ID NO: 116441 - protein, 77 aa, Oryza sativa
  unsure (1)..(77): unsure at all Xaa locations
  Clone ID: PAT_MRT4530_19942C.1.pep
RNRGRKNVFNSCSXRKQKFNQSIXXQHNQSTFYSMVMFDIPXXSSSQLVHGLVKSHLFSMARIVDEDIIMYACGRLQ

SEQ ID NO: 116442 - protein, 46 aa, Oryza sativa
  Clone ID: PAT_MRT4530_19943C.1.pep
LPLRLEGRLQQRLFYVCSFTFIHLPIIAFHVHVRSLVHVLGVAGAG

SEQ ID NO: 116443 - protein, 285 aa, Oryza sativa
  Clone ID: PAT_MRT4530_19944C.1.pep
MAVESGGSGGLRIARIRVPQTHGGRIRLLYSDDGSGGVSQRWRTRRRPREAEGKEEEAEAELAARGGGRGGGGGDATATEVEAAARGGGGGGARRLRREREREGRARRERGGHAGKKEDNGDKKTKENKPKNTFKGKKIKETLKKAFDQVYAAFEPLSDVDGESEDEDKGKNIFGVCFMARGELDSECEDNEALVAMKENVWIVDSGCSRHMTGDKNWFSLKQASKTELIIFGDASTSIVLATGLVKGEDGCIFEDESDDDNDEVGSAVRLGARSVRRCGQTGQN

SEQ ID NO: 116444 - protein, 47 aa, Oryza sativa
  unsure (1)..(47): unsure at all Xaa locations
  Clone ID: PAT_MRT4530_19945C.1.pep
MLLLPVLHMHPDAGHAYTPXSRPGVAAAITISRRRCSLPAACWPASA

SEQ ID NO: 116445 - protein, 178 aa, Oryza sativa
  Clone ID: PAT_MRT4530_19946C.1.pep
MASKYIGIQVQNDGNKVPVTAPLNGPQMQSIKSLLEPPRKTSTRRSRRNTFPSSSRILRDGSFSQAARISWIRVHTHAVPELFASRLAVVTHARQKREQTNSPSPYFSIPRHEEDILVVCRVVELPPPEYTMQGSPNSSCRILLMARLAGSPRRRRPQAAGAGSAAAANGQQEVSCRP

SEQ ID NO: 116446 - protein, 169 aa, Oryza sativa
  Clone ID: PAT_MRT4530_19947C.1.pep
MDLGKSSSTGATLKNLQEDGALPGREDMEREVGGTDPQPLLGRMVAIEDYVFCGFLPPSSEFLLLMLNFYGLSLLHLNPNSIPFLSIFVHLCEAEPFLDLFCFYYEPVFVVPEDQPDKIPAWTAKPPLTPSLQSFIDIIDDLRERGLSGYEVAADFVGRRIQPLQARAH

SEQ ID NO: 116447 - protein, 256 aa, Oryza sativa
  unsure (1)..(256): unsure at all Xaa locations
  Clone ID: PAT_MRT4530_19948C.1.pep
MDLDKSSSTGTTLKNLQEDGALPSRGDMEREVGGTDPQPLLGRIVAIEDYVLCGFLPPPSEFLLLVLNFYGLSLLHLNPNSITFLSIFVHLCXAYIGVEPFLDLFRFYYELRWMESNRVSGCVRFRLCDGMKSRYIPFQCPSSRSKWRNRWFYLEIKDSNPVFVVPEDQPDKIPTWKAKPPLTPSLQSFIDIIDDLRERGLSGYEVAADFVGRRIQPLQARAHPAYNYFGSDDATRVSPRGLSSEAVEQRVGQVMI

SEQ ID NO: 116448 - protein, 95 aa, Oryza sativa
  Clone ID: PAT_MRT4530_19949C.1.pep
MARGSDRPAAEGGGVAGGDRRRRPWRSSPARGADGVPALNPDGGGVDGTARTTAQTTTSMARLGTAASSGGGSGDEGDGARAIEGTGAGDCKTKK

SEQ ID NO: 116449 - protein, 53 aa, Oryza sativa
  Clone ID: PAT_MRT4530_1994C.1.pep
MEKIDTTTTMRRCLLLSHAPLPYAVVCHLQQGGNLFAIAIDRRCAAVSDRFHP

SEQ ID NO: 116450 - protein, 246 aa, Oryza sativa
  Clone ID: PAT_MRT4530_19950C.1.pep
MAIAGVLFLLFLARQASAAGYGGWQSAHATFYGGGDASGTMGGACGYGNLYSQGYGTNTAALSTALFNDGAACGSCYELRCDNAGSSCLPGSITVTATNFCPPNYGLPSDDGGWCNPPRPHFDMAEPAFLHIAQYRAGIVPVSFRRVPCVKKGGVRFTVNGHSYFNLVLVTNVAGAGDVRSVSIKGSRTGWQPMSRNWGQNWQSNAFLDGQSLSFQVTASDGRTVTSNNVAHPGWQFGQTFEGGQF

SEQ ID NO: 116451 - protein, 168 aa, Oryza sativa
  Clone ID: PAT_MRT4530_19951C.1.pep
MVIAGVLFLLFLARQASAAGYGGWQSAHATFYGGGDASGTMGGACGYGNLYSQGYGTNTAALSTALFNDGAACGSCYELRCDNAGSSCLPGSITVTATNFCPPNYGLPSDDGGWCNPPRPHFDMAEPAFLHIAQYRAGIVPVSFRRSHSLRLHRLSAGFYRSSRIEQV

SEQ ID NO: 116452 - protein, 96 aa, Oryza sativa
  Clone ID: PAT_MRT4530_19952C.1.pep
MGGANCRVPNGKPVCQRIKERPNPRERRLCIGRLIRFLAQENKGPEDESGGPIKAPQGAENGFPKSGRHPENTRPKAPKRRNTKERAVGVTKGRPP

SEQ ID NO: 116453 - protein, 59 aa, Oryza sativa
  Clone ID: PAT_MRT4530_19953C.1.pep
MRQRSPRFTKFPLHADVMVVYREVSLHVASSHRPTRPVEAPAALERRLCPWEGNLARRR

SEQ ID NO: 116454 - protein, 1365 aa, Oryza sativa
  Clone ID: PAT_MRT4530_19954C.1.pep
MEDDAELEEGEACGDETAFVDPDVALSYIDEKIQDVLGHFQKDFEGAVSAENLAPSVSKHNGSMVPLSDDSSKKEVHQSTKVERASSTQDSLNGLSKSSDHNRFKVRIKVGSDNGLARNNAAIYSGLGLDISSPSSIEDSPDGCGSLSPEFNNVPIESPRTILQIMTCFSVPGGFLLSPLRDDLVQLTQKVVPTSKKWETNANTENVQERYEGYAAKRVKSDAKKKKAVDTKRSKSRNDVSAVMKNEIDIETPAGQKIVLEALNIPLLSNPRTMEAKDGSQFEEDPMRDTLVENKDARLKERTINSDLMAIKYENVKAEAAECLENSGPGSSGMDFSAVKGEVKFKAEKAEIHVEDRNTTSEKDFQSDRKQERKIKTESKCNATGVNFEGNKVMNERTPVVGRSIGKVSSKETLLNDINEENVSKSESRRSQKEQNMNASSSSDFLEDDRGVLSSGAVKERKNDSQSKSSHPGRKPKAKSHRDVREHLPEGSYGGKDDTLENGSGLGELRPKKIWKNDSERDSDMPGTSKREISSSLKNDRHTPAEEQRMHVPPSVSAPTANAAPMLPAPVVIEEHWVCCDICQKWRLLPYKMNPSLLPKKWKCSMLQWLPGMNRCEVSEDETTNALNALYVSPAPGNGVASKRSKSKNHGSSSDGGHLVERSKKHSKVKSKREMDHDEYRTSKKIKKEERRQRQSGIDSNPGYDLASGDVPDEAKALPSKSMALQGSSERSDVPPSKYKSVSKYNSSEKSKRSKDGDVFLPEDKNKEHSYPSDAQKPDLSSKKRIVKEWEESQHNSTPPVSKMSIVNQSSSSKETCKDQNLKETKSKLTKSEEPGMSEPPENRSSEQALDLAEPASSDLAYFQTTAVTSSSSKASGSQRRKQNFHVAKTSPIESVSSSPPRISNNDKNTEVIVDNVRQARKSHESMLASEPVMNGFSQGNSDKDNELPQLTQGHASNGIISGRSLDDDLQHASGRKDSSLKSSNAARSHNHLHYANKNNLLTDGSSIQHRMAVLDTKGDSMVHENKRSVTSLQDRNGSTHYPPDGNPQSEVSFGKEKSHPKSNKHDMQNSKAQMLPSPLKESKVESHSAPLRSNASKLTAQLKRGNVENGGQHGITKQAISNPADTSSPVRKDNNSTGYALKEARDLKHKANRLKEEGKEQESTRLYFESALKYLHVASTLEPPPSIDGFKQCDAAQNLYSDTAKLCNFVGHAYEKSKKMAAAALAYKCVEVAYLKAAYYKYPTASKDRQMLQAIVQNPPGESPSSSASDIDNLNNNGLSKGPSSKDANSPQVTGNNLLLAYTNDVNCAFDATRKSQMAIASAASNQENGIDGLSSVKTVLDFNFQSVNDLLRLVRLSMESISC

SEQ ID NO: 116455 - protein, 133 aa, Oryza sativa
  unsure (1)..(133): unsure at all Xaa locations
  Clone ID: PAT_MRT4530_19955C.1.pep
MWDPRAVAQGEGRGTGPLWTGTTRVVHRWSTGPTVRIGREADRMARAAARACAVTGGDRRRGETAATGAKAAAAAEDDGARAEGGGAREREERKEERGFLTEAMTTTGAGRDERRXALPTTADGVGHNLGKAM

SEQ ID NO: 116456 - protein, 83 aa, Oryza sativa
  Clone ID: PAT_MRT4530_19956C.1.pep
IKEWKGEMPVSDTAKDNSARNNRKLKNRITQACECRVSILTHQWHLSRFNICVDIIEISCQWDNLLAYFTSLFNPRPLCGRSA

SEQ ID NO: 116457 - protein, 347 aa, Oryza sativa
  Clone ID: PAT_MRT4530_19957C.1.pep
CLSSGAIHADCLYRTTGGANAGHTIYNSEGKKFSLHLVPSGILNEKTMCVVGNGAVVHLPGFFKEIDGLESNGISCEGRILVSDRAHLLFDFHQTVDGLRECKTLKEEVEKYEKFAERLGPYITDTVHFMNQSILQNKKILVEGGQATMLDIDFGTYPFVTSSSPSAGGICTGLGIAPRSIGDLIGVVKAYTPRVGLGPFPTELLGKTGDLLRAFGMKFGTTTGRPRRCGWLDIVALKYCCQINGFSSLNLTKLDVLTGLKEVKLGIAYCTEDGKEIESFPADLDLLEKIKVKYEVLPGWEDDISSVRNYSDLPETARLYVERIEELVGIPVHYIGVGPGRDALIYK

SEQ ID NO: 116458 - protein, 142 aa, Oryza sativa
  Clone ID: PAT_MRT4530_19958C.1.pep
MACMSRRWAERGRGVCGLPEDNNNDPSAILCARPCVNGVEMSARVAVRRYLPSLFHHRAHGAQRIDDRGWLETVEGRGGAGAGEDDGGGTGAVEAGGGGTGSGGGRRRRWRQRWRTTEAAPAWWRRRPRGWGCGAMGMGDWD

SEQ ID NO: 116459 - protein, 116 aa, Oryza sativa
  unsure (1)..(116): unsure at all Xaa locations
  Clone ID: PAT_MRT4530_19959C.1.pep
DADVTSSHTRNNPPTVIXKPITRARARQLNLKVSSFLCSSLYEFENILLINDFIVIRNNGGDKETLGEGLRVMEDHRGRASPSGGPNQVNSESSXIYTKTDAQIIYVLGLGRSLYG

SEQ ID NO: 116460 - protein, 129 aa, Oryza sativa
  unsure (1)..(129): unsure at all Xaa locations
  Clone ID: PAT_MRT4530_1995C.1.pep
EEKNSRTYCNCRKSETLRHAPGTVGDIAXTYLFTVTSPERTDVHGYGTMLLELATGQCAMDFXRWEVEDNLLFLDHVMXLQCESQFGSIVARSLNQNYDDEDVYMMMHIGLLCTQASTEDPPCMSEVVR

SEQ ID NO: 116461 - protein, 489 aa, Oryza sativa
  unsure (1)..(489): unsure at all Xaa locations
  Clone ID: PAT_MRT4530_19960C.1.pep
MEARRPKGRRSPPDLVHGWIILDRFVHSSDGDVDAADVVTASEIALTCSGRRVRASLRVADPPXRLPPPHPPPRPXWPDAYILRHAQVVAAHRGSILFWARVPFADDEFVVPGYFPVDYFVYTAGASGAASSSLTRLPPCFIGGAAPDDEDHYFKPYRKQHQRIMLDENVGFLSGDSDGEFTVADITIVDCTSLTYASSTNHHERSPSPVQWRMHRLEMQADAPQALQMGTSLIPLPEEAMMHGCRHYEEDDPDPARCASATCAGSITLVCIYNGSGRKKNKSASPATFIIKSWTLIDIHKCIWLHDFTMEADEFWSICARENERRLPLVTPSFPVVSLVDLHAISFLLKDGDNGLYWLVEVDMRNKAMISPAALYINEEEEEDAAVTTRSGSLLMAITSSPAGSPLICTRIPSRVQLVELFICRQLSQMMQKTKYERTMHKIARKVRCDRKWGTRQNDAGEETREGNIAQEMNGGRVDNFEIGLYAGG

SEQ ID NO: 116462 - protein, 141 aa, Oryza sativa
  Clone ID: PAT_MRT4530_19961C.1.pep
METDEPATKAAGGEPKPSPATKAAGEQEEDDEEESSGGGGTEPENRVFLWTNFELVKEHAAVFVASGDSGPSFFRRKDTGFRVFRETVAHPSSVEKAPVSEYSLFRIKFQASYLGSLFASSAIVRCFDLTRAISSCHLRRL

SEQ ID NO: 116463 - protein, 132 aa, Oryza sativa
  Clone ID: PAT_MRT4530_19962C.1.pep
MAASPDGASAAAGAAAAAKGSSMALTTHDGHGCRHIDCQEEHLLKKEYCRTGGGRHPRPLPSLSTILLGHHRQQAGKKSLAVAPRHGSQAESERMTGSCGLPSSDPFQFQHTTRPSLSFYTPRCLLRHRPPA

SEQ ID NO: 116464 - protein, 135 aa, Oryza sativa
  Clone ID: PAT_MRT4530_19963C.1.pep
FAQDNIKNESMLALPKHVLAYICLVQIPASRSLSHMLRCFSFRHHRRHPRPNRRRSLSRASVRTGCSCCSTHRVQSSNVRLVGGWPPRRSPRRRAGGGERGRSPVAPAGEPWRRSEGSTGRRSLPGVRESFRTRG

SEQ ID NO: 116465 - protein, 263 aa, Oryza sativa
  unsure (1)..(263): unsure at all Xaa locations
  Clone ID: PAT_MRT4530_19964C.1.pep
TRDRPSQTPAKWRSSRWSSRSSSPPPPXQQPPTQSPPAPNAPPSNTPPPTPPSPTTPPPAPPAPTTPPPAPTTPPPAPTTPPPAPTTPPPSPPATPPPAPTTPPPSPPSQPPPAPATPPPSPPATPPPAPATPPPSPPLAPPPATPPPPATPPPAXRPRPPRPPPRRSPPPRRRPSPRSAPRRPPPPRPHPRRRSPPPPPRRPTTPAPRRPRARPASPRSWHWRAPSCFEPSRWRLGDGESLEGSSHPPSSRMICEMEMRRGR

SEQ ID NO: 116466 - protein, 110 aa, Oryza sativa
  unsure (1)..(110): unsure at all Xaa locations
  Clone ID: PAT_MRT4530_19965C.1.pep
GKLTGMASRVPTVDVSDGDFTVRPDKHPSYDQITAALKGESEAKLKGVLGHVEEDLVFTDCHGDNRSSICYAKATIGLTDIFAXLVYCFDNGWXACSRVVDLIRHMHNTD

SEQ ID NO: 116467 - protein, 80 aa, Oryza sativa
  Clone ID: PAT_MRT4530_19966C.1.pep
RKTKLNVTPMDESQASKEGRYSGTNGGGTDLNSNLGLKDPDGDNDIDTEEQEGENHTHTENRLKRKFVAPDLAMRTLPAA

SEQ ID NO: 116468 - protein, 72 aa, Oryza sativa
  Clone ID: PAT_MRT4530_19967C.1.pep
INFWGKPSCWGGPQGEHPGHSGVHPALCPTRGRGRAHPPGNPLGALPGNPRVALGPRCPEMARLVPSGAPSW

SEQ ID NO: 116469 - protein, 489 aa, Oryza sativa
  Clone ID: PAT_MRT4530_19968C.1.pep
MAAWTAAAGMLGSAAYTRMRAENPSEFMPRRVLLSHAGLENEIDRGNSFWVKAALVYESVTGDHVDDHTRHLSRDLLLNLAAYCCPHVHPDPSPRRPQALSEGIDNKRKKTVVVKSIILESLFEKDKKKAEDDQLAKRTQHPDEGTEENKQVIDAIFLVVGFLPRLTKAAATGGGKGAAAAAARRDAVDESFKATHMQDIVTDVIKLENQLPIKHLLAVADLAEAAVHAAAGDIPGLKDDVAKALREYKLGFARANFDGVIRSFCSYYSPFFSKDEQAKKPDDAAISGELTLLDCLHASLVPPSSEAGGGAGGVKGGKTSRIPTAKELRRSGVRLEAGVEDGRAVVQFKEDAATLRLPALVFDFKLATVARNLLARELEEQSKPVTRYFQLMNELVEEVADVRILRRAGVVRGGSRGAGEVHELIKKIDGYATYPSVFMAMDVQVEKVKVFHEKRMNNFFVRYRPAIVAASSVVAASVVAIVATRKKRG

SEQ ID NO: 116470 - protein, 42 aa, Oryza sativa
  Clone ID: PAT_MRT4530_19969C.1.pep
TLGAAQGHFSIVFSVSKSSWKSYQQVHQTECLGRICAFIVSK

SEQ ID NO: 116471 - protein, 108 aa, Oryza sativa
  unsure (1)..(108): unsure at all Xaa locations
  Clone ID: PAT_MRT4530_1996C.1.pep
GSFLKTPKSFQKVPKKFGSFSEYIGGQFTPRPRVGRYNPHKYFPFGTPKXEAVSKALVPRGFPLVGPVMVYSFMQASGMVIDHLVDCFRFPECLHLADRSWGITNVAA

SEQ ID NO: 116472 - protein, 181 aa, Oryza sativa
  Clone ID: PAT_MRT4530_19970C.1.pep
MVIENIGTTENQTEVKNHLFEIDLVAMKAEFKLSLNAYLSDLLYSPVRSLADVIAFNNAHPVEERLKDFGQSFLTDSQKTNGIGPREKTVLKILKEISTDVLEKLMKKHQLDAIVTPNSDASTIFAIGGMPAIAVPAGYDNQGVPFAICFGGLKGYEPRLIEMAYAFEQATKVRRMPRYKH

SEQ ID NO: 116473 - protein, 69 aa, Oryza sativa
  Clone ID: PAT_MRT4530_19971C.1.pep
AVTESSSAAAAPASVEDGIEVLQAYSKEVSRRLLELAKSRAAPSPAAAAPAEGAASESEAAAAPAPAEE

SEQ ID NO: 116474 - protein, 260 aa, Oryza sativa
  Clone ID: PAT_MRT4530_19972C.1.pep
MWRRPGQLRLHLAAAAGAAGRGARRRNPLPPVPTVPSSSSSSSASTTTTRDLAAFARGSSSSSRSLSDRAGGGECWSCGASGAFLSCGSCGSVQPVDPAVDYFRIFGLEREYTIKDNNLEGKYKDWQKKLHPDLVHSKSEVAPAFAAEQSALVIDAYRTLSKPLSRALYLLQLEGIPIDEEKTITDPELLMEMMEIREAVNDANDSQTLEKIQSQIKRKLETWSHSFQEAFERRDFDRAVKATQRMRYYERAVEETIKKL

SEQ ID NO: 116475 - protein, 290 aa, Oryza sativa
  Clone ID: PAT_MRT4530_19973C.1.pep
RAAGIGTRLLLSALLLLLPLQTSYAVAQPNNKASKKLYIAYLGEKQHEDPQKTTASHQDMLTRILGSKEAALESIIYSYKHAFSGFAAMLTESQAQTIAELPEVHSIKPSRVHPLHTTHSQDFLGLDYTKPTGLLHDAKYGDGIIIGIIDTGIWPESASFSDHGLSPIPSKWKGQCQAGEAFRSNQCNRKIIGARWYDKHLSAEDLKGEYRSARDAHGHGTHVASTAAGALVPNISFHGLAAGYARGVAPHARLAVYKACWGLGASCHDAGIIKALDGAMRDGVDVLSLS

SEQ ID NO: 116476 - protein, 218 aa, Oryza sativa
  Clone ID: PAT_MRT4530_19974C.1.pep
MDYSGGVYQQLKAPKSLKNAMRHPKEATMVHSSPRQRSDRVDSFGLQCMKTQMSSFGDVQDTRSMENLQVELFDVWSIDYMEPFPKFKIARVRPAMVEAMSCHAADAKHACKMFHEVIFPLFDIPWMIICVPLFQVNNALRPSHANGGVVTPVAAPNGNENNPCPSMDTSSYLLDSPPPKRPLCPLPKRPLCFVEASTPVGHGKVLIPSLSPCEKLKV

SEQ ID NO: 116477 - protein, 78 aa, Oryza sativa
  Clone ID: PAT_MRT4530_19975C.1.pep
MGRAPCCDKKGLKKGAWTPEEDKLLVDYIQVNGHGSWRLLPKLAGTGWLLCSCEAMLCFCHVFVFACRTSAELLISTF

SEQ ID NO: 116478 - protein, 121 aa, Oryza sativa
  unsure (1)..(121): unsure at all Xaa locations
  Clone ID: PAT_MRT4530_19976C.1.pep
MTSIGGAKVFFTVCFFLLCNGSLAQQLLGHITTQWQSSHSRNPRRYRFDTFQAFEGGGSLTSQPXTTDFFNVSNEPIQCTGISQVPRAIEPTGLLLPHHTNGASLLYIIPPTRITRATHKG

SEQ ID NO: 116479 - protein, 523 aa, Oryza sativa
  unsure (1)..(523): unsure at all Xaa locations
  Clone ID: PAT_MRT4530_19977C.1.pep
MDMAEDGGGDRDQQNQQQQQEEAAAPAAAAAGVGGGEEQGNGRGEESVKLFVGQVPKQMTEDELAAMFAAVAVVDEVTLIRDKATKASRGCCFLICPSREEADKAVNAYHNKRTLPGASSPLQVKYADGELERLEHKLFIGMLPKNVTDAEMTDLFSQYGNIKDLQILRGSQQTSXAGCAFLKYETKEQALAAIEALNGKHKIEGSSVPLVVKWADTEKERQARKAQKAQFHPSNMSNPNAMQQSSLFGAMQMGYVPQYNGYGYQPQGTYGLMQYPLSPMQNQAAFPNMVQSVNQGSSIRGVNSELSPNSAPRSFNSMQLGSPYSPVPSMQYPGSYPGPPGANLFIYHIPQEFGDQDLAGAFQGFGRVLSAKVFVDKATGLSKCFGFISYDSPASAQTAISMMNGYQLGERFAQGTKFTQKTAARNSQEKTDRASPVQQQKGPATSLALTTTHSDIQYMRHLEVVEQTVEIYIWVVQQENVQVQETDTNAFFLHDYGGGDGGGGGDGDVDDDCDGLVEARVLD

SEQ ID NO: 116480 - protein, 64 aa, Oryza sativa
  unsure (1)..(64): unsure at all Xaa locations
  Clone ID: PAT_MRT4530_19978C.1.pep
RVGSRLGPFVLSLTKQFLLLRTLVAXKILSANINTYVSDSKLALEHXSMHTSCRSMIDKLEKNL

SEQ ID NO: 116481 - protein, 115 aa, Oryza sativa
  Clone ID: PAT_MRT4530_19979C.1.pep
HTTAARQPAQRPLPLPHHDLPPRRYSGVAAPPIRPVLTPRTECQTHANNQIPTRYPTPPLPPPPQSPTNASARTHADPRKQAAATSGTDTPRNPPCVSRRGPKLAQGPNDRRDAS

SEQ ID NO: 116482 - protein, 446 aa, Oryza sativa
  Clone ID: PAT_MRT4530_1997C.1.pep
MSNYHEDHIEEMEDDYDMDDTADDMGEENYERGMRDSDSEDEEHGQSNDKIPDTSSVDARKGKDIQGIPWEKLAITRDKYRQTRLDQYKNYENMPNSGEAAAKECKPTEKGGMYYEFRRNTRSVKSTILHFQLRNLVWATSKHDVYLMSHFSVLHWSALSGLDTELMNVQGHVAPREKHPGSLLEGFSGTQVSTLSVKDNLLVAGGFQGELICKHLDREGISFCCRTTYDENAITNAVEIFNTTSGAVHFMASNNDSGVRDYDMERFQLYKHFQFEWPVNHTALSPDRKLAVIVGDDPNGLLIDANSGKTLHSLKGHFDYSFASAWSPDGRTFATGNQDKTCRIWDARNLSKSLHVLRGNLGAIRSIRFTSDGQFMSMAEPADFVHVFDVGSDYTRRQELDFFGEISGMSFSPDTDMLFVGVWDRTYGSLLQFGRLYNHSYLDSLC

SEQ ID NO: 116483 - protein, 117 aa, Oryza sativa
  unsure (1)..(117): unsure at all Xaa locations
  Clone ID: PAT_MRT4530_19980C.1.pep
MWATRHGAAQAWPCLGRGLXGRHGPTDAPGRAVPAHSLYFVCRAWPAGPSRRAGPTVPGQPSMPAGRPRHSGKLPPGRHGPDPSXGRAKKSCHGPGLRASGLMAIYSIDTIIYGVLF

SEQ ID NO: 116484 - protein, 147 aa, Oryza sativa
  unsure (1)..(147): unsure at all Xaa locations
  Clone ID: PAT_MRT4530_19981C.1.pep
MAMWATRHGAAQAWPCLGRGLXGRHGPTDAPGRAVPAHVPHSRPRHSPTRLGPCCAGLKARWAMSLYFVCRAWPAGPSRRAGPTVPGQPSMPAGRPRHSGKLPPGRHGPDPSXGRAKKSCHGPGLRASGLMAIYSIDTIIYGVNQFF

SEQ ID NO: 116485 - protein, 92 aa, Oryza sativa
  Clone ID: PAT_MRT4530_19982C.1.pep
FFMDVFCGHILPFSVNPTVILTATRMNRGCDHFVSEDALSSGVIHLYSRWELQMQALVEIFVFMLENLTVCRRCPSAKIGNIPIWPTLFITQ

SEQ ID NO: 116486 - protein, 1670 aa, Oryza sativa
  Clone ID: PAT_MRT4530_19983C.1.pep
MKEDEVEDDNILDFAQYIGFEGNQTGEEERDADGNDVADDLGQMLQDAKEDCESEKGAHKLDKMLEDHRMSLYPGCEQGHKKLDTTLEFLQWKVKNGVSDKAFGDLLKLVKNILPEENKLPETTYETKKIVCPLGLEVQKIHTCPNDCILYRGEEYENLEACPVCKALRYKIRRDDLGEVDGQLTKKRIPTKVMWYFPIIPRLRRLFRNKGNARMMRWHAEEHQQDGMLRHPADGSQWRNIDRKFKEFEKDARNIRFGPKQPGNDIDVYLRPLVEDLKLLWKKEGVPVWDEDKQEEFNLRALLFVTINDWPALSNLSGQSNKGYKACTHCMDETESMYLKHCRQVVYMGHSRFLTANHPVRKKGKHFEHKADHCTKPKHHIGKTVFAMVKDLKVVFGKGPESQPIESEDGHAAMWKKNSIFWELPYWEFLDVRHAIDVMHLTKNLCVNLLGFLGVYGKSKDTLEARNDLKHMEQRGDLYLEPKEKGSQYLSPASTLSKAEKESMFECLESIQVPSGYSTNIKRIISMKEKKFTNLKSHDCHVLMTQLLPVVIRGILPDNVRATITKLCAFRNAISHKVIDLDRLEALQNDVVQCLVSFELIFPPSFFNIMTHLLCHLVKEISILGPVYLHNMFPFERYMGVLKKYVRNRARPEASIAKGYGTERVPESCHEGRLRGKGTLRRKAIMTGYEINGYTFYTRAQDMNSTNQNSVVRVDTMGHDGRTGTYYGAIENIWELDYGPLKVPLFRCQWVRLTGGGVMIDDSGMTTVDLNKMADRDEEQILYDTIAEGSSQYWNEEEGNEDPNQYLNEEGNVERDTEGNQEGHVERDVEGNQEEEASGSQPSVGQKRARGQRGVAKKLEGQHIITEVDEDSRPSAPAEDAKNYVRHSGWVVRDNVPISTVYWRRTRARGDHESFVPYSEKEMLWTTMLETFTLPAGTEDKVKRWTLKKMAEQFQSFKGDLYQKYILKGQTPNFDTFPKLRDHWDEFVTYKTGEQGQAMMERNKENTTKKKYHHHLGSGGYSVAMPKWEEMEASLLDRGIEPATANWPERSKFWYYAHGRTLNPADGSLVFGDQIREAARRLTDAVEASSQGTFRPDKEKDELSLALQTLEHPGRTRGKGVIPWKIGFKEDIHTYRSRMRSKRDTEAKIADLEFRVSSYELSMQEEVARKVDERMAAHRSHDPQPTIPPAMVASGMAIPADPSGTYHCRPIPVGYSKVDVELVEGAYEDLELDYPGGDGSSTVSSSGSSTVSSSCSSTVSTSSSSTDSSLGSCTDSSSGSCTDSSSGSYTDSSASSSSSTFQVKGPQALPPAPTRAMKKAKVDAAKNKDPGGMSAPAKEAIKLSDYERTLKKASSGKSKPVPQLGEQPNQEIKLLVTGEDFGIQEFINDTGLTTDQLLGDAPVEKAEVKYMYKLGKPLVKPELLQSLPTQMYKFHQLYMEMSATGREMIGARIRDTDFLQGDDILWINFKGIYELYQLDALDVSIMSCWILMEIQRAWRWGVFDTGFIDPQKVNIAMLNQYPQATKDNLVHLLKAQHYKTFILLPYNTEFHWVLLLFDLEACTVNVYDLVDKKESTFDEVFELIDRAWYRFRHLVRGKWRERLRRKFKFPFIRMRDNLITHKEFIAAVQEQLMGFINEQILDPKGEFYYDGNTIHRSLASELATTTTSKS

SEQ ID NO: 116487 - protein, 577 aa, Oryza sativa
  Clone ID: PAT_MRT4530_19984C.1.pep
MKRKYIMMPIIIQGPKQPGNDIDVYLRPLVKDLKMLWKKEGVPVCDEDKQEEFNIRALLFVTINDWPALSNLSGQSNKGYKACTHCMDETESTYLKHCRKVVYMGHRRFLAANHPVRKKGKHFEHKADHRTKPKHRNGKTVFAMVKDLKVVFGKGPGSQSIESEDGHAAMWKKNSIFWELPYWEFLDVRHAIDVMHLTKNLCVNLLGFLGVHGKSKDTLEARNDLKHMEQRGDLHLEPKEKGSHYLSPASYTLSKAEKEKASIAKGYETEEVIEFCVEFIEDLRPIGVPESRHEGRLQGKGTLGRKAIMTVDNNLFRKAHFTVLQQSSLVAPYIEEHLALVRARNIDTFPAWIRQHLMGNESINQQLAFLARGPSRSIATFQGYEINGYTFYTRAQDMKSTNQNSAVRVDAMGHDGTTGTYYGAIEDIWELDYGPLKVPLFWCQWVKLTGGGVMIDDSGMTTVDLNNVGYSDEPFVLANDVTQVFFVKDMYSKGKKGRGPDEPKRHVVLPGKRKIVGVEDKTDEDYDQLDGQPPFTVTIDPSILLSNEDTPYSRSDHNEGTIVRRKYVRSTVTADVL

SEQ ID NO: 116488 - protein, 506 aa, Oryza sativa
  unsure (1)..(506): unsure at all Xaa locations
  Clone ID: PAT_MRT4530_19985C.1.pep
MADRDEEQILYDTIAEGSSQYWNEEEGNEDPNQYLNEEGNVERDAEGNQQGHVERDVEGNQEEEASGSQPSVGQKRARGQRDHESFVPDSEKEMLWTTMLETFTLPAGTEDKVKRWTLKKMAEQFQSFKGDLYQKYILKGQTPNFDTFPKLRDHWDEFVAYKTGEQGQAMMERNKENAAKKKYHHHLGSGGYSVAMPKWEQMEASLIERGIEPATANWLERSKFWYYAHGGTLNPADGSLXTLKKASSGKSKPVPQLGEQPNQEIEPLVXRGIYELYQLDALDVSIMSCWILMEIQRARRRRVFDTGFIDPRKVNVAMLDQYPQETEDNLVHLLKAQHYKTFILLPYNTEFHWVLLLIDLEACTVNVYDSMDKKESTFDKVFELIDRAWYRFRLLVRGKWRERLRRKFKFPCAKQKQGTNLCGYYVCEYCHCLADQIITTRELDFIRMRDNLTTHKEFIAAVQEQLMGFINEEILDPKGKFYYDGNTIHRSLASELAASTLRRNRS

SEQ ID NO: 116489 - protein, 867 aa, Oryza sativa
  Clone ID: PAT_MRT4530_19986C.1.pep
MADHDEEQILYDTIAEGSSQYWNEEEGNEDPNQYLNEEGNVERDAEGNQEGHVERDVEGNQEEEASGSQPSVGQKRARGQRGATKKLEGRHIITEVEEDGRPSAPAEATKNYVRHSGWVVRDNVPVITVYWRRTRARGDHESFVPDLEKEMLWTTMLETFTLPAGTEDKVKRWTLKKMAEQFQSFKGDLYQKYILKGQTPNFDTFPKLRDHWDEFVAYKTGQQGQAMMERNKENAAKKKYHHHWGSGGYSVAMPKWEEMEASLLERGIEPATVKWPDRSKFRYYAHGGTLNPVDGSLVFSDQIREAARRLTDAVEASSQGTFRPDREKDELSLALQTLEHPGRTRGKGVIPWKIGFKEDIHTYRSRMSSKRDTDAKITDLEYRVSSYELSMQEEVARKVDERMAAHRSHDPQPTILPAMVSPSGNRSSCASTGQVASGMAIPTDPLGTYHCRPIPAGYSKVEVELVEGAYEDLELDYPGGDAPRPAPSKSRAPQAPPPAPTRATKKAKVDAAKNKDPGYDCTQKELDAYVASEVRRQLKPRSLENKIPIYSSARNLFRCMFAPAKEAIKLSDYERTLKKASSGKSKPVPQLGEQPNQEIESLVTGVDFGIQEFINDTGLTMDQLLRGAPIEKAEVKYMYELGKPLVKPEQLQSLPTQMYKFHQLYMEMSATGREMIGARIRDTDFLQGDDILWINFKGIYELYQLDALDVSIMSCWILMEIQRARRRGVFDTGFIDPWKVNVAMLVQYPQATEDNLVHLLKAQHYKTFILLPYNTEFHWILLLFDLEACTVNVYDSMDKKESTFDKFIRMRDNLITHKEFIAAVQEQLMGFINEQILDPKGEFYYDGNTIHRSLASEITTTTTSNRS

SEQ ID NO: 116490 - protein, 70 aa, Oryza sativa
  Clone ID: PAT_MRT4530_19987C.1.pep
RFVPLGVGRPSCPGFILALPIIGITLGRLVKSFNLLPPPGMAKVDPPEKPGQLSNQILKHAPVVCKPIKA

SEQ ID NO: 116491 - protein, 610 aa, Oryza sativa
  Clone ID: PAT_MRT4530_19988C.1.pep
MELQYIFVFPKSVRCNSFTGMLFCYGAMNHPQQTMPPRASANGFPHRKLDREGSGRHDNKTQLLRSSSGGFSGAENGGKLGHGSPSRDRLIYVLTQLIGQHVDVHVKNGSIISGILHATNSDKDLGVIMKMAQVIKDGSARGQKSAADVVKKPETMIIPGRELVQILAKDVALGGDELPKGPSQEKRKDLMIDSAISRSHYPEERELERWAPDEGDSECIELEKYDRKGNRSWDQFETNAALFGVKSTFNEELYTTKLERGPHMRELEKHASRIAREIEGEDTKDMHLAEERGLYLDDDFDHDEEIKYSAVRRDTDNTKFKSSTNVLSNTNQVDSLTRAGNTNPKALLSTADEESSSHLFGTDLPVTNNVSQLVSQSQLNKLLPIDESRLDDKLTKDSSGNRDTSNLQTENIISEGGRSSISEDLEVPSSSSHASEPSSSGQAKKSSESLPADSSLSRKVPSSGEYVNSSQGPGSSTSSTSERIAASSVACAPGLSPSSSMGSLSSEKSSLNPNAKEFKLNPNAKSFTPSTSVRPPQPPASDGPYYYANNMPTAPLGPPMFPPAYGGQPMVYNAQPGPSPQGYMHPAGPQLQYGQQMMMGQTRPVYYYAP

SEQ ID NO: 116492 - protein, 1352 aa, Oryza sativa
  Clone ID: PAT_MRT4530_19989C.1.pep
MPSYNCWTSHGEQGVEMEEDEVEDDNIPDFAQYVGFEGNQTGEEEIAADGNDVADDLCQMLQDAREDCESEKEAHKLDKMLEDHRTSLYPGCEQGHKKLDTTLELLQWKAKNGVSDKAFGDLLKLVKNILPGRNKLPETTYEAKKIVCPLGLEVHKIHACPNDCILYRGEEYENLEACPVCKALRYKIRRDDPGEVDGQLTKKRIPAKVMWYFPIIPRLRRLFRNKGNARMLRWHAEERQQDGMLRHPADGSQWRNIDRKFKEFGKDARNIRFGLSTDGMNPFGEMSSGHSTWPVTMCIYNLPPWLCMKRKYIMMPIIIQGPKQPGNDIDVYLRPLVEDLKQLWKKGGVPVWDEDKQEEFNLRALLFVTINDWPALSNLSGQSNKGYKACTHCMDETESTYLKHCRKVVYMGHHRFLAANHPVRKKGKHFEHKADHRTKPKHRSGKTVFAMVKDLKVVFGKGPGSQHIESEDGHAAMWKKNSIFWELPYWEFLDVRHAIDVMHLTKNLCSSPRTFSRFGAAFFGFAATSPTSSTSPFRSPTAGPCRAAAFLCSGRRSRRRRRPGRPSGRGCAASRRLCRRGRLRARPSAAMWGPAVSRPRPRVRLTHGTHGAGRCEPGVYGKSKDTLEARNDMKHMEQRGDLHPEPKEKGSHYLSPASYTLSKAEKESIFECLESIKVLSGYSTNIKRIISTKEKKFTNLKSHDCHVLMTQLLPVVIRGILPDNVRATITKICAFMNAISQKVIDPDRLEALQNEVVQCLVSFELIFPPSFFNIMTHLLCHLVKEIRILGPMYLHNMFPFERYMGVLKKYVRNRARPEASIAKGYGTEEVIEFCVEFIEDLRPIGVPESRHEGRLRGKGTLGRKAITTVDNNLFRKAHFTVLQHSSLVAPYIEEHLALVRTRNIGKSDAWITRHHIDTFPAWLRQHLMGNESINQQLAFLERGPSGSIATFQGYEINGYTFYTRAQDMKSTNQNSAVRVDAMGHDGTTATYYGAIEDIWELDYGPLKFSLFRCQWVRLTGGGVMIDDSGMKTVDLNKVGYSDEPFVLANDVTQVFFVKDMSSKGKKGRGPDEPKRQVVLPGKRKIIGVEDKTDEDYDQLDGQPPFTVTIDPSILLSNEDTPYSRSDHKEGTIGKSPRRRRRISPSSRARRPRRRLRLLRCRRISGTPRHDDDAPRRRLRRRATPPPHANATPPPPSPRRRRHRRRARNAAAATPRRRRHATPRHRRHATPPPPRPHNATPPPPSPRRRANRRPDAATPPLTNENENDRTNESENEHVNVRCRDNVNENENDRTNESENENDRTKTSENEGTNVNENERTNVNENERMNVNENERTNVNELGNVNERTNEDER

SEQ ID NO: 116493 - protein, 304 aa, Oryza sativa
  unsure (1)..(304): unsure at all Xaa locations
  Clone ID: PAT_MRT4530_1998C.1.pep
LFLKRKRGLLRQRLGFTVDRVHRNGLRNGRSRSTLSTTNGRDRSRPRRSTRHGDDDVGDDVITGDGSGXHARRRTTARRRERRAPTGRGRRGDPYRGMNGGGRRPDGDGYEEEAAMTVGLTTTVVXGDDGGADEIGDGLATTAVTSXRAVTTSGATAAHGWTNGGDGGARAHEARVLQAAAGKGEGGGEGXGAAAKAHGGRRREGKSRVRGRKSNPVRSQIRRFPNEISRRFQKGKDRVDRGDHFPSIDSAGDGKERWGPPVSGRERGERWLGCGPAWAGEERERVLGRLSAQSQKRILKPFSI

SEQ ID NO: 116494 - protein, 2044 aa, Oryza sativa
  Clone ID: PAT_MRT4530_19990C.1.pep
MDRQWMYADRRSEKFIDGVHYFLRVAEANKQKGFICCPCNKCKNQKEYSASRTIHFHLFESGFMPSYNCWTSHGEQGVEMEEDEVEDDNIPDFAQYAGFEGNQTGEEDKDADYNDVADDLGQMLQDAKEDCESEKGAHKLDKMLEDHITSLYPGCEQGHKKLDTTLEFLQWKAKNGVSDKALGDLLKLVKNILPEGNKLPETTYEAKKIVCPLGLEVQKIHACPNDCILYHGEEYENVEACPVCKALRYKIRRDDPGEVDGQLTKKRIPAKVMWYFPIIPRLRRLFRNKGNARMMRRQAEERQQDGMLRHPADGSQWRNIDRKFKDFGKDARNIRFGLSTDGMNPFGEMSSGHSTWPVTMCIYNLPPWLCMKRKYIMMPIIIQGPKQPGNDTDVFLRPLVEDLKLLWKKEGVPVWDEDKQEEFNLRALLFVTINDWPALTNKGYKACTHCMDETESTYLKHCRKVVYMGHRRFLAANHPVRKKGKHFEHTADHRTKPKHRSGKTVFAMVKDLKVVFGKGPGSQPIESEDVIIRGILLDNVRATITKLCSFMNAISQKVIDPDRLEALQNDVVQCLVSFELIFPPSFFNIMTHLLCHLVKEIGILGPVFLHNMFPFERYMGVLKKYVRNHARPEASIAKGYGTEEVIEFCVEFIEDLHPIGVPESRHEGRLRGKGTLGRKAIMTVDNNLFRKAHFTVLQQSSLVAPYIEEHLALVRARNIGKSDAWITRHHIDTFPAWLRQHLMGNETINQQLAFLARGPSGSIATFQGYEINGYTFYTRAQDMKSTNQNSAVRIDAMGHDGTTGTYYGSIKEIWELDYGPLKVPLFRCQWVRLTGGGVTIDDSGMTTVDLNKVGYLDEPFVLANDVTQVFYMKDMSSKGKKGKGPDEPKRHVVLPGKRKIIGVEDKTDEDYDQFDGQPPFTVTVDPSILLSNENTPYSRSDHKEGTTVRRKEDVVVVVPQAKVMADRDEEQILYDTIAPGSSQYWNEEEGNEDPNQYLNEEGNAERDAEGNEEGNVERDAEGNEEEASGSHPSAGQKRAHGQRGAAKKIEGRHIITEVDADGRPSAPAQAAKNFVHHSGWVVRDNVPVSKVYWRRTRARGDDDSFVPESEKEMPWTTMLETFTLPAGTKKIVKQWTLKKMAEQFQIFKGDLYWKYILKGQTPNFNVFPKLRDHWDEFVAYKTGQQGQAMMERNKENAAKKKYHHHLGSGGYSVAMPKWEEMEASLLERGIEPATAKWPDRSKFWYYAHGGILNPVDGSLVFSDQIREAANRLTNAVEASSQGTFRADREKDELSLALQTPEYPGRTRGKGVIPWKMGFKEDIHTYRSRMRSKRDTEAKIADLEYRVSSYELSMQEEVARKVDERMAAHRSNDPQPYIPPPMVSPSGNRSSYASTGQVVSHSMDAMQTKDETTCPVDEITHRTPCELHIPFKNLSIKVASGMAIPTDISGTYHCRPIPAGYSRVEVELVEAVYEDLELDYPGGDGETHLRDTSHAIILWRKRYIILPGRQAASRAPSPPAPPSPPAPSPPAPPPPPPAPSPPAPPAPPPPPPPCPPAPPKTRSRQAPPPASTRATKKAKVETTKNKEPPYGCSQEELDAYVAGEVKRQLKPRSPEKKIPIDPSVKNFFKGMSTANKEALKLSDYDRTLRKAYYKKSKPLVGGAPILKAEVAYKFELSKPLVRPEQLQSLPTQMYKFHERYMEMSANGREMFGARIRNPDFLQGEDVLWIHFNDVFDLYHRDALDVSLLSAWILMEIQRARRRRVYNTGFIDPRKINTEMLDKYEKDTEDNLVHLLTQQHYKTFIVLPYNTEAWDRFRQLVRGTWKEKLRRMFHFPYAKQDKGTNLCGYYVCEFAHCLSNQIYTTRELDRIHMREKLPHKDFITAVQEQLMRFINEEVLNPDGRTSIRDKTIYLENSAVEVEVFVLPPLVLSPGAPPFPLAPGAGPFPPAPGGPLPEKAIALQKNRWMQRKQSHRDAPRKLDRPPTRVGTQADGVLEACSSCHPCAQVDRTGEAIASARTEEDLSARGGEQRLENCVFVCLGGSLL

SEQ ID NO: 116495 - protein, 313 aa, Oryza sativa
  Clone ID: PAT_MRT4530_19991C.1.pep
MDRQWMYADRRSKEFIDGVHYFLRVAEANRQRGFICCLCNKCKNQKEYSASRTIHFHLFESGFMPSYNCWTSHGEQGVEMEEDEVEDDNIPDFAQYVGFEGNQTGEEEIAADGNDVADDLGQMLQDAREDCESEKEAHKLDKMLEDHRTSLYPGCEQGHKKLDTTLELLQWKAKNGVSDKAFGDLLKLVKNILPGGNKLPETTYEAKKIVCPLGLEVHKIHACPNDCILYRGEEYENLEACPVCKALRYKIRRDDPGEVDGQLTKKRIPAKVMWYFPIIPRLRRLFRNKGNARMLRWHAEERQQSGIIFSPGS

SEQ ID NO: 116496 - protein, 1250 aa, Oryza sativa
  unsure (1)..(1250): unsure at all Xaa locations
  Clone ID: PAT_MRT4530_19992C.1.pep
MQQQSEEFQAQKQLQQQQFEKQRDAVQKAGRKRLPTSAPRXKLSLQVEQRHSTTSAGEGAPWYLAQQISFRPEDAEGVLFLHQDPLVISAEVAGFEVRWILVDGGSSADVIFAEAYARMGLPTLALTQAPTSFHGFGSEAVQVLGQVQLAVAFGTNKNRREEQILFDVVDIPYNYNAIFGCATLNKFEAISHHNYLKLMMPGPTGVIVVKRLQPSAASKGDLAATNRAVHNVEAEPHDRAKHMLKPAPHGKVVKVQIDDAXPHILEVLKMNIDIFAWSPDEVGGVSTDLIMHHLAVKPNAKPRKQKLRKMSADCQELLKAGVIQEIDHPEWLANPVLVRMSNAKWRMCVDFIDLNKLCPKEDFPQPRIDXLVDSTADCELMSFLDAYSGNHKIHMNPADIPKTAFIMLFGTFCHLRMPFGLRNARATFARLVYKVLYKQLGRNVEAYVDDIVVKSHKAFHHASDLQETFDNLRVAGMKLNPEKYVFGVRTGKLLGFLVSKRGIEANPEKIDAIQQMKPPSSVREVQNLVGRIAALGRFLSKEAERGFPFFKTLQGAGKFCWTPECQAAFDELKQYLQSPPTLDSLAPGSELLLYLAASPVVVSAALVQETESGQKPVYFISKALQGAKIRYIEMEKLTCALVMASRKLKHYFQAHKVTLPSEYPLGEVLRGKEIAGRLSKWAAELSPFDLHFVARTAIKSQVLADFVAEWTLLDTINNTAEYEAVLLGLRKVKPLGVRHLLIRTDSKLVASYVDKSFEAKEGMKRYLEAVRSMEKCFAGIMVEHLPRGQXGQNEKADALVKSAACGGPHSLGIFFEILYAPSVPTESLDIMAIDQAELGEDPEDWRTPFAKYLKNGWHPEDEAEAXRLQLRATRYKLVSGQLYRSRVLQPLLRCISFAEGEEMAKEIHQGLCGVHQTTRTVASKVFRQGVYWPTVLKVGVEQAKKCESCQRHGRSQAAPXYELQPIAPFWPFARWGLDIIGPFPXARNGYKFAIVAIEYFSRWIEAKPLGAITXAAVQKFVWKNIVCRFGVPKEFITDNGKQFDSDQFREMCEGLNLEIRFASVAHPXSNGAAERTNGKILAALKKRLEGXVKGQWLDEMLSVLWALWTTPTRPTKFSPFMLLYGDEAMTPTELGANSSRVMFSGGKDGREVSLKLLEEVRVEALEHMREYAKSTSVTYNRKVRATELLPGHLVLWKKANPVAVGKLESKWEGLYLIKHRSRMGSFCLATLEGEEFDHSWNAASLKRFYV

SEQ ID NO: 116497 - protein, 204 aa, Oryza sativa
  unsure (1)..(204): unsure at all Xaa locations
  Clone ID: PAT_MRT4530_19993C.1.pep
PLNADVYGNAKDWVKKNVKRFDFDGGVTIKYVAVGNEPFLKAYNGSFINITLPALQNVQNALNDAGIGDRIKATVPLNIYPFLSLYLDEHFPINFAFFDGGSTPVNDGGIMYTNVFDANFDTLVAALKAVGHGDMPIIVGEVXGWPTDGDKNARVDLAQRFYAGLLKRLAANVGTPARPNQYIEMYXFGLVDEDMKSVAPGSFE

SEQ ID NO: 116498 - protein, 1587 aa, Oryza sativa
  unsure (1)..(1587): unsure at all Xaa locations
  Clone ID: PAT_MRT4530_19994C.1.pep
MTTPGANPPSPTPARIQEEANPATETVTEGHPSTTAVEQPEIHESPQEQHTSMSGGTSASRSSRNPRSQNIWPTTMQVIREVDASGRPTAPRTVIGRWSNCCGLAARENFRILHKDIGKVTEAEKERAWTAMEKWFTFPAEAKDRLKRKAFHKMGKAWKNWKSKLFTEFVNPPGNYTPFDEYPQITKAVWEEFCSLKNTQEFRESSEAHRLLQQRNEHPHRLGTAGRPTELTPPKSKLSIEAPRRPALSVPHSPDGANMDLADIAQSWAPIKTTRKADSSPPLVKGQKHERGKGKVGELAPEPKRGKAAMSMLASKAGKVVRAQAQFELGMPLVEDNVLAVMGISCRELHKQYMELSNAKQKMRESSIVGHHDHQPFLSSPAYITVTGLYFWGHHRLAETNTSDGLIVTCPSEMDRQWMYADRRSKEFIEGVHYFLRVAEANKRNGFICCPCNKCKNQKEYFASKTIHFHLFESGFIPSYNCWTSHGEQGVEMEEDEAEDENIPDWAQYTGFEGNQMGEVDKDAGDNDAADNLGQMLQDAKEDYESEKEAHKLEQMLEDHGTSLYPGCEQGHKKLDTTLEFLQWKAKNGVSDKAFGDLLKLVKNILPKGNKLPETTYDAKKIVCPLGLEVQKIHACSNYCILYRGEEYENLETCPVCKALRYKIRREDPGEVDGNMGNARMMCWHAEERQQDGMLRHPADGSQWRNIDRKFKDFGKDARNIRFGLSTDGMNPFGEMSSGHSTWPVTMCIYNLPPWLCMKRKYIMMPIIIQGPKQPGNDFDVYLRPLVEDLKLLWKKEGVPMWDEDKQEEFNLRVLLFITINDWLALSNLSGQSNKGYKACTHCMDETKSTYLKHCRKVVYMGHRRFLAANHPVWKKGKHFEHKADHRTKPKHRSGKTMFAMVKDLKVVFGKGPGSQLIESEDGHAAMWKNXIFWELPYWEFLDVRHAIDVXYGKSKDTLEARNDLKHMEQRGDLLPEPKEKGSHYLSPASYTLSKAEKESMFECLESIKVPFGYSTNIKRIISTKEKKFTNLKSHDCHVLMTQLLPVVIRGILPDNVRATITKLCAFMNAISQKVIVPDRLEAHQNDVVQCLVSFELIFLPSFFNIMTHLLRHLVKEIGILGPVYLHNMFPFERYMGILKKYVRNRARPEATIAKGYGIEEVIEFCVEFIEDLRPIGVPESHHEGRLREKGTLGRKAIMMVDNNLFRKVHFTVLQQSSLVAPYIEEHLALVCTRNIGWIQVFYVKDMSSKGKMGKGPDEPKHHVVLPGKRKIVGVENKTDEDYDQLDGQPPFTVTIDPSILLSNEDTPYSRSDHKEGTIVRRKKDVVVVPQARVMADRDEEQILYDTIAEGSSQYWNKEEGNEDPNQYMNEEGNVERDAEGNEEGNDNVPVSTVYWRRTRARGDHESFVPDSEKEMLWTTLLETFTLPAGTENIVKRWTLKKMVEQFQSFKGDLYQKYILKGQTPNFNTFPKLRDHWDEFVAYKTGQQGQAMMERNKENAAKKKYHHHLGSGGYSVAMPKWEEMEASLIERGIEPATAKWPDRSKFWYYAHGGTLNPVDGSLVFSDQIREVASRLTDAVEASSQGMF

SEQ ID NO: 116499 - protein, 896 aa, Oryza sativa
  Clone ID: PAT_MRT4530_19995C.1.pep
MTYRLSNYFLYEQMADRDEEQILYDTIAEGSSQYWNEEEGNEDPNQYLNEEGNVKKDAEGNQEGNVERDVEGNQEEEASGSQQGQTMMERNKENAAKKKYHHHLGSGGYSVAMPKWEEMEASLLERGIEPATAKWPDRLKFWYYAHGETLNPVDGSLVFSDQIREAARRLTDAVEASSQGTFRPDREKDELSLALQTLEHPGRTRGKGVIPWKIGFKEDIHTYRSRMRSKRDTETKIADLEYRVSSYELSMQEEVARKVDERMATHRSHDPQPTIPPAMVSPSGSRSSCASTGQVGSQSMDAMQTQDETTCPVDDITQRTPCELHIPFNNLSIKVASGMAIPMDPSGTYHCRPIPAGYSKVEVELVEGAYEDLELDYPGGDGETHLRDTSHAIILWRKRYIILPGRQAASHAPSPPAPPSPPQAPAPSPPHAPAPSPPQAPAPTPPQAPAPTPPQAPRLAPSKSRAPQAPSPAPTRATKKAKVDAAKNKDPGYDCTQEELDAYVASEVRRQLKPRSPEKKIPIDPSVRNFFRGMSARAKEAIKLSDYERTLKKASSGKSKLVPQLGEQPNQEIEPLVTGEDFGIEKFITDTGLTTDQLLRGAPIEKAEVKYMYELGKPLVKLEQLQSLPTQMYKFHQLYMEMSATGREMIGARIRDTDFLQGDDILWINFKGIYELYQLDALDASIMSCWILMEIQRVRRRGVFDIGFIDPRKVNVAMLDQYLQATEDNLVHLLKAQHYKTFILLPYNTEFHWVLLLFDLEACTVNVYDSMDKKESTFDKVFELIDRAWYRFRHLVRGKWRERLRRKFNFPCAKQKQGTNLCGYYVCEYCHCLANQIITTRELDFIRMRDNLITHKEFIAAVQEQLMGFINEQILDPKGEFYYNGNTIHRSLALLR

SEQ ID NO: 116500 - protein, 92 aa, Oryza sativa
  Clone ID: PAT_MRT4530_19996C.1.pep
MWAPLLSGRQRISNTFGLGGFSGNRIHEQIVLRMCLGHGVFPATHICAANHAPGYSDGSRCSSTRDGNGAGQGRIGRKQPCPRPQPQLEMQG

SEQ ID NO: 116501 - protein, 769 aa, Oryza sativa
  unsure (1)..(769): unsure at all Xaa locations
  Clone ID: PAT_MRT4530_19997C.1.pep
LNSKKKILIPKLNQPEQLKDFRPISLYNVIYKVVSKCLVNRFRPILKDIISPTQSAFIPXRMITDNALIAFEGIHAIQKMTSARKQFCAYKLDLSKAYDRGDWEFLEKALIKIGFCEQWVHWVMICVTTVQYSVYFNGTLLEPFSPSRGXATGRSAFSLPLSVCCERFVLHPEPRASAHCPDDTLDEIKAILQIQTSTFEAKYLGLPTPEGRMSADRFKSISERLAKRMNSWSEKFMSSGAKEVLIKSVAQAIPTYMMGVFKLPASTCDVYTKMIRDFWWGDDENKRKVHWIAWENLVLPKGLGGLGFRDLRLFNQALLGRQAWRLIQYLESLCARILKAKYYPNSELIDAVFPVDSSPSWKGIEHGLHLLKKGLVWRIGDGSKVNIWRDQWIPKESAFKPMGRSRCRLRWVSQLMVPREKCWDEELIRHVCYPHDAEDILKIKIMQFPVEDFPAWHYERTGVYSVRSAYRIALSCQASSTAGSSSSSPSGERRIWRNIWNLQAPPKVKIFAWRLARDCLATQRNRKSRKLVSDSTCRTCGGEEEDGFHAVISCTRAKALRKEMREYWRLPADEELTNYGPDWLLLILEKLGTEERAQFVLVLWRSWFLRNDSLFGSGKASVRASVIFLQNFWDTLFQIKHGTTVDIKGKAPCQSEADQAVSCRDGIRLLVEWVKMPMILETDCANIGRAMVNTGDDRSIPXWQVIREARAALSLIPEYRLQVARREANKAAHGLAQYARRTNQTVVWREHAPEFGLRLLRYELVIDLI

SEQ ID NO: 116502 - protein, 116 aa, Oryza sativa
  Clone ID: PAT_MRT4530_19998C.1.pep
RRSAHRRPPLRPQPLPPPTAGRRSHRPPPATRHRSTHRPQSLRPPPAAAAPLSLRPPPAAASFHAAAAPLPPAARRRSVHRPLPRRFAPSPLALLSWQSDIWVPLFLLFFRDKIAT

SEQ ID NO: 116503 - protein, 315 aa, Oryza sativa
  Clone ID: PAT_MRT4530_19999C.1.pep
RGMGLTNIRHFLKAMAVSCRWQDWKHPTKPWVCLETPCDETDKLLFAAATKITVGDGNTARFWDSAWLDGQRPKGIMPLVYAISKKRGKSLREGIENDTWIEDLKLNGNTTFTVDVIRQLVSLWSATQGILLNQDEPDHITWKLSNHGEYSASSAYKAQLLGNVGTNYNSLIWKSWAPAKCKFYLWLVIQNKVWTSDWLAARGWQNNGLCPLCRETNETACHLVAFCRYTRRIWRLTASWVAYQQLDPNHWDPCQSIQEWWDMLNNKKEVPKKGLRSLTLLIVWEIWKERNQRIFEHKETTAPNLMAKIKEEART

SEQ ID NO: 116504 - protein, 48 aa, Oryza sativa
  Clone ID: PAT_MRT4530_1999C.1.pep
YNYFLLYLLLMYPSPNFTNSNIIMTKNKFIYDKSGGLKSKLILERRST

SEQ ID NO: 116505 - protein, 150 aa, Oryza sativa
  unsure (1)..(150): unsure at all Xaa locations
  Clone ID: PAT_MRT4530_199C.1.pep
MVPSPSLAAPPPTAAATRPFLVIPTGGHGTLAGMLYSIILKKWTPASPRGRQLRGIGNRGAEGEAQRDERHGGRRSVAAAARVGDDDAVVGRVAISMGAVAXDLAGGADDDDXGTDQPAGSETRGSTTTMQAQPGPPALRRGAQQRRHAA

SEQ ID NO: 116506 - protein, 93 aa, Oryza sativa
  Clone ID: PAT_MRT4530_19C.1.pep
QEQNLAIQHEGRCTYAFGTAEPTTAASATSSYLILHSLGISAWPSVWPQPHPYCCYPGIFHLGLQIKLHLNLLRDVVNIGAQRPTKKVVILAK

SEQ ID NO: 116507 - protein, 392 aa, Oryza sativa
  Clone ID: PAT_MRT4530_1C.1.pep
MGSAASSCCGGSKKVEQGCVSASMSSNTWRIFSYKELHAATNGFSEENKLGEGGFGSVYWGKTSDGLQIAVKKLKATNTSKAEMEFAVEVEVLARVRHKNLLGLRGYCAGGAAGDQRMIVYDYMPNLSLLSHLHGQFAADVRLDWARRMAVAVGAAEGLVHLHHEATPHIIHRDIKASNVLLDSGFAPLVADFGVKGTLGYLAPEYAMWGKVSGACDVYSFGILLLELVSGRKPIERLPSGAKRTVTEWAEPLIARGRLADLVDPRLRGAFDAAQLARAVEAAALCVQAEPERRPDMRAVVRILRGDADAKPVRMKSIKYADHLMEMDKSSVYYGEDGGGDGEEDMDDEEVEEYSLMEDKSSVNFGVFGAMPVQTMHDPYVRRFGGGDGIKI

SEQ ID NO: 116508 - protein, 118 aa, Oryza sativa
  Clone ID: PAT_MRT4530_20000C.1.pep
LLTEVWNCWTKGTALQLADQSLDGYSDSKVLRCIHIGLLCVQESPIDRPSISSVILMLTRRRIKLQQPRQPAFFFGGDFSSVYQQQHRHRNYMYDKSGVIVEDKFSVNDVTNTDPYPR

SEQ ID NO: 116509 - protein, 133 aa, Oryza sativa
  unsure (1)..(133): unsure at all Xaa locations
  Clone ID: PAT_MRT4530_20001C.1.pep
LSYLGHHMRTPTKAAISILSITSHRHVTATGGEDLRCSFMARFDCAPTIENSXTNAVVAPSTTACHPTTVLNRSPPPMPLSXQDRKHQSKTTRWINQKSKSRGIDEGEGEERRRACPAGPCIKGRDKKERGLG

SEQ ID NO: 116510 - protein, 97 aa, Oryza sativa
  unsure (1)..(97): unsure at all Xaa locations
  Clone ID: PAT_MRT4530_20002C.1.pep
SLACVLIANKGFIGVSADFMISDHQPMYALTFRSXLLYLVSSQLVSTRLYCYYIXTADCIYIIIYIGHIADCLNPITIGWYRXGWNHYIGLSADRLF

SEQ ID NO: 116511 - protein, 75 aa, Oryza sativa
  Clone ID: PAT_MRT4530_20003C.1.pep
MAAAAEKNMITLKSSHGEELQVDEAAATDAQTTRHMIEDDCASYCIRLSNADSKMLSQVMVYWNKDLLPVHAIED

SEQ ID NO: 116512 - protein, 123 aa, Oryza sativa
  unsure (1)..(123): unsure at all Xaa locations
  Clone ID: PAT_MRT4530_20004C.1.pep
MRRRCLAPRSTRWRRRRGRAFSSRELAAAMINRVALRVGSLAMAVGSVCXGCRFLTMVLVVNIVQLKLVRLGCSRGAGGGSPSCRSSITLVPTAMLIYIGICTFLHLHPLHQQAQHCCRHGDM

SEQ ID NO: 116513 - protein, 50 aa, Oryza sativa
  Clone ID: PAT_MRT4530_20005C.1.pep
HLELHLAAQGRLDVNFGLRRRSGHEQCASSCLLAGVYGSDIDSICSSSNV

SEQ ID NO: 116514 - protein, 150 aa, Oryza sativa
  Clone ID: PAT_MRT4530_20006C.1.pep
MAARREEFTVVEKVSRGIWSLRKYLAAVPAAAGGEAAAAGGDGKRDGSDGRSAATAGGALPSARSSGRGGCVGGPAVEVDAAAAGRWREGRRRWSDGPVAAPSPPPDLAGGMVVAAARCWLSGGWWQQRLPRQRQHSGGALLLSIQQWRW

SEQ ID NO: 116515 - protein, 41 aa, Oryza sativa
  Clone ID: PAT_MRT4530_20007C.1.pep
GANACAGLQKQNTRLPKAQTNSSLNVQPNHNYETGLIIPSY

SEQ ID NO: 116516 - protein, 172 aa, Oryza sativa
  unsure (1)..(172): unsure at all Xaa locations
  Clone ID: PAT_MRT4530_20008C.1.pep
RVRDGAPCGAHVAPTRRTRGGHMAATRAAGLDGPDLPSRRERVAGAHGRLMPAWWPWRTAAXTRHSGGARRRPXAAEGGGVAATRMVIAAAKRLGGGAAAKRXGEREKGEEVPHRRRLTTASDGGRXRQRDELRNHRRTVRSGFRRWIPTEEGWTGXSTRRRTRRRRRRDSA

SEQ ID NO: 116517 - protein, 48 aa, Oryza sativa
  Clone ID: PAT_MRT4530_20009C.1.pep
GCVHSRSLNSQNIYPSPRTCHSVSSRSQIATTTSGSYMALDVGHATRT

SEQ ID NO: 116518 - protein, 131 aa, Oryza sativa
  unsure (1)..(131): unsure at all Xaa locations
  Clone ID: PAT_MRT4530_2000C.1.pep
AEAQFGYINQKNSPLGLPMGTSRSKYKTYQIILWVIATLILISGXHHWIHIGTERVQCQRTLFLVPLPELCTYFKVELQHAKQLLHQLNTCVFTFAVNDECLYFDDKYFSRNAHFLEERKRSQCGYNEMLW

SEQ ID NO: 116519 - protein, 114 aa, Oryza sativa
  Clone ID: PAT_MRT4530_20010C.1.pep
LLYACSLPRSMHLTLKLSLSPPEVECLGSSSHRRRILHFSARPRWWGSPTQDRSCFFFSTIPFPSPKYLLWLFLPAAVSFYFCSPKASGRFYNNLLNKRRDPHKLIHSTSSPTK

SEQ ID NO: 116520 - protein, 177 aa, Oryza sativa
  unsure (1)..(177): unsure at all Xaa locations
  Clone ID: PAT_MRT4530_20011C.1.pep
MAXRPARQCAWKRGLXYXTRKIPLKKEGDGKGPLWVVVLQHATVPSGGTPSSRIEAAVKAVECGSKATRALPSTTTSTYIHIRQRLQLHPIPMPRSGRPLPISLPLDPLPLPDLAGGEWSVKTKEGGGGDDAVEEEDEGKARWRKGRRALDPSGGGDLLDPLVNNSETGQQAAEQKP

SEQ ID NO: 116521 - protein, 243 aa, Oryza sativa
  unsure (1)..(243): unsure at all Xaa locations
  Clone ID: PAT_MRT4530_20012C.1.pep
MEDLPIQDMNEPPPDPPFASRNRAPLLAHHTAAARRIQSSPPFPPPCLPFILFLHRVITSSPFLCLHRPLPSSQIWERERVQREGDGEGSAAAGHRDGVELKPLPDVDVGRGRCGWQSSRGLGSALHRLDLSSLRALASDLTAAEHGSRLDPPAHRRLDPATRCAAAGHRCMLEHHHPELGEVGGGIENGERERELGEDGPLYISLPLEWERWEEGSRVERVSWERTGPFPSPSFLSGIFLVX

SEQ ID NO: 116522 - protein, 55 aa, Oryza sativa
  Clone ID: PAT_MRT4530_20013C.1.pep
MELSEHGEQNGMGAMWVLLARAEKRRDEAVRTAEMERGSCGLASHEGGDFGTCCA

SEQ ID NO: 116523 - protein, 53 aa, Oryza sativa
  Clone ID: PAT_MRT4530_20014C.1.pep
MDVYNLGKNNGETKCECHLILIARYARLQNDYVALQHEVFELICSICPKCLSA

SEQ ID NO: 116524 - protein, 239 aa, Oryza sativa
  Clone ID: PAT_MRT4530_20015C.1.pep
TRLLTARGATATATGNALPPEPKPARWPDVFHARLFTNLTNHSAASTGPPLRVADLYYDWSRRRNLNLIRYQLAAADDPLYDVEWDNGTTFYFDSRSCRTERFPVGVLRPGWLADGGGVVYLGRWRTGGIECDVWDKLGFVVYYQEVATGRPVRWNFLDKTGIQQFVMSFEVGVTLEDDSQWQAPAHCFPAAAADEDEEEEEDEEQDEMIKSSYDHIEGVDDGLDAARLLRMLAGAAAF

SEQ ID NO: 116525 - protein, 76 aa, Oryza sativa
  Clone ID: PAT_MRT4530_20016C.1.pep
MGQFSVWRAISRAQIEVRPRWENRAPNNASSQTKNYEIMLGKKKEMMTCGATCQHRHVSATSAKPPSKTTKGVKLH

SEQ ID NO: 116526 - protein, 103 aa, Oryza sativa
  Clone ID: PAT_MRT4530_20017C.1.pep
MDEAGRELETELASAWRRRCSGRLRARKPELELTGAWRWRHWERRSSILPTSLMGSGVMAGRLRFLRHVWGKLRILINGGRKEEEVGEGRSGGFGSTVLFVTG

SEQ ID NO: 116527 - protein, 721 aa, Oryza sativa
  Clone ID: PAT_MRT4530_20018C.1.pep
MEPEMEVEVEVEMSPAAAKAAVFSPYSSPSTALLLQRRVVSWAKETGSPATVSVHVGDRSFNLHKDPLVSRCGYLRQAILRCGDGDGEVVELPASFPGGSEAFEVIGLYCYGDAVALDPFNVAAVRCAAEFLDVSGLGARCDLYINQVVLQSWDDALIVLQRCQPLLPVAEELLVVSRCVESLAFMACMEILDPDGDEQRRERDQPGLLAAAAARGLAGRRWDAELVKELAARDLWIKDLVALPFEFFRRIVLALRRQGMKEKYVSPVVLFYANKWVLSKKTHKFMASTDTGDGETDANRRATAILQGVIDLLPLESSAATGGAIPVSFYFALLARSITLELSDESQTRLRELVASNLQFARVDDLPLPEPEQDAGGQSIAGSPEVRAMESIVASHVSMQRRGAEAVAELWDRYIAQIVGDPKLRPDRLAELIGVVPAGDRKSHDHLYEAIDTYIVEHPGLSGDEKASLCGHLECRKLSHEACIQAVQNDRMPLRLIVQALFVQQLHTHRAFTECSDSFRCMHSGELLVPVSGGAAAATAYTPSPGCTTAVPTSQPLSTSSPYTDTAHATRDGRKLVRARAGDDDDDAASGYETASFRIQALEQEILSLKQTLQRHNTVKKSSSRKEASFRMDTAATPAAAAAVRRRAPVSSSSCIGSMRWGSQRRCASRILRIFARLAVFGRGSRSSSSSSTSRGKQSKCRASAEQLSSVACRTKHAARD

SEQ ID NO: 116528 - protein, 70 aa, Oryza sativa
  Clone ID: PAT_MRT4530_20019C.1.pep
TRESPERPTKLAPPGGGRPRGSRRSSRDAAVAGEEDGELGTFKNVQRHRVNIEKFRFSSATVDQSSQTAH

SEQ ID NO: 116529 - protein, 116 aa, Oryza sativa
  Clone ID: PAT_MRT4530_2001C.1.pep
QSLYDKLQNMPQVGVIHMALQNDSTGSILSWQNDVFVVAEPGELADRFLQCVKTSLSAMLHGCKRKGAYSLSKISCLSELVAEWPSFEIGGIHHRYIGRQTQVMEDNQEIGAYMFR

SEQ ID NO: 116530 - protein, 52 aa, Oryza sativa
  Clone ID: PAT_MRT4530_20020C.1.pep
KVTWFVQVKSRKIYAQIRSARPKMQNGLAPNGEALNSKSTLTSTQECVKRVG

SEQ ID NO: 116531 - protein, 596 aa, Oryza sativa
  Clone ID: PAT_MRT4530_20021C.1.pep
MILRFCLTCPATLLLLLTLSNLTTSVRILVRQAQKAVAAKRKPQAWEKYAKKRPRVLRINDDDLLITAMVKNRDLGYAKKFTKFKSSKKCGRLLARMSGKGGSNLLGGKRVSLARKTVLCWLIATGFLTVKDVIQYQNLKSNEVVKDGQVTWEGILCNCCTKTFSISDFKVHGGCSLPKSSLGLFLQSGKSYTLCQVEAWSAEFLSRKCDASGRKVEAMDENDDTCGFCGDGGELLCCDNCPSTYHQTCLSDQELPEGSWYCHNCTCRSCGNPLSEKEVSTFSAILKCLQCGDSYHDTCIDQEMLPCGDKQSNIWFCGRYCKEIFIGLHNHVGIENFLDNELSWSILKCNTDGQKLHSSKKIAHMTECNTKLAVALTILEECFVRMVDPRTGVDMIPHVLYNTRSNFARLDYQGFYTVILEKGDEILCVASIRVHGTKAAELPFIATSVDYRRQGMCRRLMDTIEMMLRSFHVETLVLSAIPELVNTWVSGFGFKPIEDNEKKQLRNVNLMLFPGTSLLTKRLDGITAANAGEVRNPEQIKINGRREELGLAAGVARGEGDGEEVLGLGDGAGAAELDDVCHNHLVSCTRHCTRLA

SEQ ID NO: 116532 - protein, 40 aa, Oryza sativa
  Clone ID: PAT_MRT4530_20022C.1.pep
MMRCCGQQGGPAVQRRERGVVGEEEASGRGGEDEVPTRKG

SEQ ID NO: 116533 - protein, 1077 aa, Oryza sativa
  Clone ID: PAT_MRT4530_20023C.1.pep
MAAAAALWQPQEEGLREICTLLDAHISPNSDQARIWQQLQHYSQFPDFNNYLVFLLARGEGKSFEARQAAGLLLKNNLRATFSSMPPASQQYVKSELLPCIGATNKAIRSTVGTVISVLFQIVRVAGWIELFQALHQCLDSNDLDHMEGAMDAIYKICEDVPEELDVDVPGLPERPINVFMPRLLQFFQSTHAILRKLALGCINQYIVVMPAALYMSMDQYLQGLFNLAKDPSADVRKLVCSAWVQLIEVRPSILEIFQLLISCVMLDLTLDSKLQPHLKNVTELMLQANKDSDDEVALEACEFWSAYCDVSMPPEGLREFLPRLIPTLLSNMSYSDDDESLADAEVEDESFPDRDQDLKPRFHASRLHGSETGEDDDDDDAVNVWNLRKCSAAGLDVLSNVFGDDILPTLMPLIQQNLARTDDDAWKEREAAVLSIGAIAEGCITGLYPHLPQIVAFLIPLLDDKFPLIRSITCWTLSRYSKFIVQSLEHPNGREQFDKILLGLLRRVLDTNKRVQEAACSAFATLEEEAAEELVPHLGIILQHLMCAYGKYQRRNLRILYDALGTLADAVGAELNQAKYLDIFMPPLITKWQQLANSDKDLFPLLECFTSIAQALGPGFSQFAEPVFQRCINLIQSQHLAKVDPAAAGALYDKEFIVCALDLLSGLAEGLGAGIESLVSQSSLRDILLQCCMDEAADVRQSALALLGDLSRVCPIHLHPRLQEFLNVAAKQLNPQCVKEAVSVANNACWAIGELAIKIGKEISPVVITVVSCLVPILKSPEGLNKSLLENSAITLGRLCWVCPDIVAPHMDHFMQAWCNALCMIRDDFEKEDAFHGLCAMVAANPTGAVGSLTFICQACASWNEIKSEGLLSESIMCVVLSTSECSQPIMLGCPTGNLIPYPSIRLSFFLSFHGWRGSQGYDSKEERALKMLLTTPFVSSPVRVQGNGGSGASPWAGAATALRIQAAKQLTGRVVTTKADKTVGVEVVRLAPHPKYKRRERIKKKYQAHDPDNQFKVGDVVELRRSRPISKTKHFLAVPLPPRDTRRKSQLLPPLQSQSQSQDQDQPPTPPPSSD

SEQ ID NO: 116534 - protein, 86 aa, Oryza sativa
  Clone ID: PAT_MRT4530_20024C.1.pep
PSFPFPTSTYPPPPPPESASSQYPPPLPRSAPCCDRSVDRALPSYMSPRPPPPGAPCYPPPAAWLPDQEAAGAPYSLYPQPGTRYL

SEQ ID NO: 116535 - protein, 1087 aa, Oryza sativa
  Clone ID: PAT_MRT4530_20025C.1.pep
MAAAAALWQPQEEGLREICTLLDAHISPNSDQARIWQQLQHYSQFPDFNNYLVFLLARGEGKSFEARQAAGLLLKNNLRATFSSMPPASQQYVKSELLPCIGATNKAIRSTVGTVISVLFQIVRVAGWIELFQALHQCLDSNDLDHMEGAMDAIYKICEDVPEELDVDVPGLPERPINVFMPRLLQFFQSTHAILRKLALGCINQYIVVMPAALYMSMDQYLQGLFNLAKDPSADVRKLVCSAWVQLIEVRPSILEIFQLLISCVMLDLTLDSKLQPHLKNVTELMLQANKDSDDEVALEACEFWSAYCDVSMPPEGLREFLPRLIPTLLSNMSYSDDDESLADAEVEDESFPDRDQDLKPRFHASRLHGSETGEDDDDDDAVNVWNLRKCSAAGLDVLSNVFGDDILPTLMPLIQQNLARTDDDAWKEREAAVLSIGAIAEGCITGLYPHLPQIVAFLIPLLDDKFPLIRSITCWTLSRYSKFIVQSLEHPNGREQFDKILLGLLRRVLDTNKRVQEAACSAFATLEEEAAEELVPHLGIILQHLMCAYGKYQRRNLRILYDALGTLADAVGAELNQAKYLDIFMPPLITKWQQLANSDKDLFPLLECFTSIAQALGPGFSQFAEPVFQRCINLIQSQHLAKVDPAAAGALYDKEFIVCALDLLSGLAEGLGAGIESLVSQSSLRDILLQCCMDEAADVRQSALALLGDLSRVCPIHLHPRLQEFLNVAAKQLNPQCVKEAVSVANNACWAIGELAIKIGKEISPVVITVVSCLVPILKSPEGLNKSLLENSAITLGRLCWVCPDIVAPHMDHFMQAWCNALCMIRDDFEKEDAFHGLCAMVAANPTGAVGSLTFICQACASWNEIKSEGLHNEVCQILNGYKQDCCLRASCALSSAQPIMLGCPTGNLIPYPSIRLSFFLSFHGWRGSQGYDSKEERALKMLLTTPFVSSPVRVQGNGASGASPWAGAATALRIQAAKQLTGRVVTTKADKTVGVEVVRLAPHPKYKRRERIKKKYQAHDPDNQFKVGDVVELRRSRPISKTKHFLAVPLPPRDTRRKSQLLPPLQSQSQSQDQDQPPTPPPSSD

SEQ ID NO: 116536 - protein, 86 aa, Oryza sativa
  Clone ID: PAT_MRT4530_20026C.1.pep
SPNLIFSVAPSRFFPISPTSPEPPIAPAPCNLLPPLFPLLRPPLAAARVAAAPRRLRRRVRKAKLHPGRPFPVEFRRRNSPPLALR

SEQ ID NO: 116537 - protein, 75 aa, Oryza sativa
  Clone ID: PAT_MRT4530_20027C.1.pep
HPSCRHAAPDPVEAAPSVTASTLRCRNYASPRGAHSAVRPCRLRCCCHREKAISGRRSNIEGNPLIPDYFEQLPL

SEQ ID NO: 116538 - protein, 162 aa, Oryza sativa
  unsure (1)..(162): unsure at all Xaa locations
  Clone ID: PAT_MRT4530_20028C.1.pep
MGYNRRRGRGSSSSSSSRRTKQEAAWDDGPGTSLPRQEDTEEEPKGPKIQLAMWDFGQCDVKRCTGRKLSRFGLLKELRVTNGFGXGVVLSPVGTQCVSKEDRHIVQRKGLAVVDCSWARLSDVPFVKLRCGAPRLLPWVVAANPVNYGRPCELSCVEALSA

SEQ ID NO: 116539 - protein, 641 aa, Oryza sativa
  Clone ID: PAT_MRT4530_20029C.1.pep
MALHLTRPFLRPSPPPPRPTRRSSRAHCLAPSASARGPSFRRPYTSVLVVPTGVGAAVGGFAGDALPVARALGAVADCVISHPNVLNAAMLYWPMPNTLYVEGYALDRFAEGSWALQPVHQNKVGLVLDSGIEEELRLRHLQVADAARASLGLPVVEYIVTDTPLEIKTWFDPKCGKSTGSVGNSDSLLRAVEALVNRSDVNAVAVVARFPDDDPEDSDCYREGKGVDLLAGVEAIISHLIVKKFKIPAAHAPAVLPPVLSLSVSPRSAAEEIGHTFLPCVLAGLSNAPQYVMRRNGNMDNGCIVASDVDSVILPKDACGGDGTIAFARTATKNKPLIITVQENETVLDDTPDKFNIEALNVQNYWEAIGVIAAHKAANARAYASTVLVQLAPDLLLIYCSFLSGAPLEISISRMLTYQLVWVKNSGKIVFGYLKFQKFEAGIWNPHRIALCSIRILVFSASLQVSSQPPPRLISEHLPAGDPPSPLSRSRKRRSFSEEEDELLLKLHALLGNRWSLIAGRLPGRTDKEVMNHWNSKLMDSTIEHPPSLHDDEHRRRRRRLRSEAHDERGAKHPGHNSSSSSKDVNGDECTVADDASSCNHQDDNRAVAELNLELTLSTPCIYLLLGQDREDGSKSNQGLI

SEQ ID NO: 116540 - protein, 47 aa, Oryza sativa
  Clone ID: PAT_MRT4530_2002C.1.pep
HLNGASTAARSAARTVTGGVIRGIYDFNQQYAVPGANRAPRGDSFAN

SEQ ID NO: 116541 - protein, 49 aa, Oryza sativa
  unsure (1)..(49): unsure at all Xaa locations
  Clone ID: PAT_MRT4530_20030C.1.pep
SPTYRQSSDRSSLIYLMQLNQIRSNLIMIIQSAAEVXVDDDASMGRPGC

SEQ ID NO: 116542 - protein, 50 aa, Oryza sativa
  Clone ID: PAT_MRT4530_20031C.1.pep
MDASSISACFLLMEIIKGLGNWAFKEWQLTKLIIPSEKSQLSFKIDPEDH

SEQ ID NO: 116543 - protein, 109 aa, Oryza sativa
  unsure (1)..(109): unsure at all Xaa locations
  Clone ID: PAT_MRT4530_20032C.1.pep
LGAXXGSSGDPGQRSRCRRRAASPAPSSTTPSSSGGSGWSPTRRTTWKARSRTRCAAASSGSRLELELAPPGRHPSCSWCVWVTVDTFLLPALHTFIRFVTPSCFLLGF

SEQ ID NO: 116544 - protein, 85 aa, Oryza sativa
  Clone ID: PAT_MRT4530_20033C.1.pep
RRTRTGTEGPTQATRSFGRAAGRLPARADQDDAGDQALHQLGQGGAHGAGQGSAECRTATTHRRPSSSASAAPPAPGRSSTTSWA

SEQ ID NO: 116545 - protein, 211 aa, Oryza sativa
  unsure (1)..(211): unsure at all Xaa locations
  Clone ID: PAT_MRT4530_20034C.1.pep
GASIVRKKNRVKKNRAEKTKFVRSKNRTKKKVRSKKKVKKKKKNRAKKKEKSDKKTWGKKTGRKKNKYVRQKKRKKKEKIPKRIRLHRRGKKSLKKXKKKTVLFQRKMNYMYRGKKIDRAKKEKNSPIRKKQEKKKWAKKKFSDKKTGRKKNKSVLSKKSQKGEKSKRIRLRRRGENRAKKFQSKGRKKKKKLKRRKKARRKKVKFIFVVF

SEQ ID NO: 116546 - protein, 258 aa, Oryza sativa
  unsure (1)..(258): unsure at all Xaa locations
  Clone ID: PAT_MRT4530_20035C.1.pep
KPSLSDKKTGRKKKSDQKKSEKKTGRKKHPSLAKKTPDPLKREKKKKTERKKKKSPIKKPXKKNRAEKKQICPTKKKAKKGKKSKRIRLHRRGKKSXKNKKKTVLFQRKRNYIYRGKKIDRAKKEKNSPIRKKQEKKKWAKKKFVRXKEKEKAEKNLTPSTRXKKGEKKLSDKEKGIICDAVKKIKKPGEKKDKSPIKKRGEKKTNLSYTKKAKKGKNKNEXRLRRRGENRAKKFQKKKLKGRKKARRKKVKFIFVVF

SEQ ID NO: 116547 - protein, 287 aa, Oryza sativa
  unsure (1)..(287): unsure at all Xaa locations
  Clone ID: PAT_MRT4530_20036C.1.pep
NQVCPIKKPDEKKSPIQKKVKFSRCFCRPSKNRAKKEKNRAKKKEKSDKKTWRKKTGRKKNKYVRQKKRKKGEKIPKRIRLHRRGKKSLKKXKENCPIPKKNELYVSWSKKKKKKSPIKKPGRKKTGWKKNKSVRQKRKQKKEKNRKKKSTGRKKEKNSPIRKKQEKKKWAKKKFVRXKEKEKAEKNLTPSTRXKKGEKKLSDKEKGIICDAVKKNKKTRRKKXKSPIKKRGEKKNKSVLSKKSQKGEKSKRIRLRRRGENRAKKFQSKGRKKNQNESDSVDAVKKG

SEQ ID NO: 116548 - protein, 89 aa, Oryza sativa
  Clone ID: PAT_MRT4530_20037C.1.pep
MARGRRPGRGGRASPVPNHLATGSAPVAIAIAATTAVVWRGGEGKSAGVAAVAVAGPPLSRARLAAGSIVCDPAVVGSTVPAPISGGDS

SEQ ID NO: 116549 - protein, 272 aa, Oryza sativa
  unsure (1)..(272): unsure at all Xaa locations
  Clone ID: PAT_MRT4530_20038C.1.pep
VLLSSVKKREKKTERKKKKSPIKKPGEKKPGGKKTNMSDKKKGKKKEKIPKRIRLHRRGKKSLKKXKENCPIPKKNELYVSWSKKKKKSPIKKPGRKKTGWKKNKSVRQKRKQKKXKKSKRIRLHRRGKKSXKNKKKTVLFQRKRNYIYRGKKIDRAKKEKNSPIRKKQEKKKWAKKKFVRXKEKEKAEKNLTPSTRXKKGEKKLSDKEKGIICDAVKKIKKPGEKKDKSPIKKRGEKKTNLSYPKKAKKGKNQNESDSVDVVKTGRKNSKV

SEQ ID NO: 116550 - protein, 184 aa, Oryza sativa
  Clone ID: PAT_MRT4530_20039C.1.pep
MTRCNDKLGATMTRRRLGTARRRRRLGTGCRGDAVLVPRWSPTPSGSLPLSSIDNDDKTTAVRVSINFIQVFPSVSAEAVEDQAASVVHYNPVAGRITKPVVGEPEIDSTGEGVWFIGAEVSYTACVDSVLTTDGTVEIEGERLPFSPPTPSSLPPPLAPPRPHQPPPLPPLPAYSARCAPLLL

SEQ ID NO: 116551 - protein, 72 aa, Oryza sativa
  Clone ID: PAT_MRT4530_2003C.1.pep
NPHKNVAPYSIPIIYLMHFQPNIYLKLQILRLQPPKRPKKPTAFQPIPNKSCPCILMPRPCLKLSLLIDQII

SEQ ID NO: 116552 - protein, 210 aa, Oryza sativa
  unsure (1)..(210): unsure at all Xaa locations
  Clone ID: PAT_MRT4530_20040C.1.pep
SDQKNRTKKKVRSKKKVKKKPGEKNTRPWQKNTRSLKKGKKSPRDKPFNEXKKRKKKKKNRAKKKEKSDKKTWRKKTGRKKNKYVRQKKGKKRKQKKKKKKSPIKKPGRKKTGWKKNKSVRQKRKQKKXKKSKRIRLHRRGKKSLKKIKRKLSYSKEKGIIYIVVKKSTGRKKKKIVRSEKNRRKKMGKKKICPIKEKEKAEKNLTPSTR

SEQ ID NO: 116553 - protein, 262 aa, Oryza sativa
  Clone ID: PAT_MRT4530_20041C.1.pep
MVPSERGDVATAIRPAAADKLVHGPISDKKCRKKVPRKVHKSEREKLKRGHLNDLFGELGNMLASDQIQQPSAEADRQSNGKACILTDTTRILRDLLSQVKSLRQENSTLQNESNYVTMERNELQDENGALRSEISDLQNELRMRATGSPGWGHGATGSPLPVPPSPGTVFPSQQPMQPSPMTTSTVFPLQQPLPQPTVIEPSARQPLELKLFLEAPPAEDPEPSEDQEAPNNVARPQPRYPTEASSWPISLGLPRMEDEQM

SEQ ID NO: 116554 - protein, 260 aa, Oryza sativa
  unsure (1)..(260): unsure at all Xaa locations
  Clone ID: PAT_MRT4530_20042C.1.pep
SDQKNRTKKKSDPKKKVKKKPGEKNTRPWQKNTRSLKKGKKSPRDKPFNEXKKRKKRKKREKKTERKKKEKSDKKTWRKKTGRKKNKYVRQKKGKKRKKYRKKKKKKSPIKKLGRKKTGWKKNKSVRQKRKQKKEKNRKKKSTGRKKKKIVRSEKNRRKKKWAKKKFVRXKEKEKAEKNLTPSTRXKKGEKKLSDKEKGIICDAVKKIKKSGEKKDKSPIKKRGEKKTNLSYPKKAKKGKNQNESDSVDVVKTGRKNSKV

SEQ ID NO: 116555 - protein, 253 aa, Oryza sativa
  unsure (1)..(253): unsure at all Xaa locations
  Clone ID: PAT_MRT4530_20043C.1.pep
SIVRQKNRVEKNRAEKTKFVRSKKPDEKKSPIQKKSEKKNRAKKTPVPGKKTPDPLKREKKVRETNRLMNKKXRKKKKKNRAKKKEKSDKKTWRKKTGRKKNKYVRQKKRKKKEKIPKRIRLHRRGKKSXKDKKKTVLFQRKMNYMYRGEKKKKSPIKKPGRKKTGWKKNKSVRQKRKQKKXKKSKRIRLHRRGKKSXKNKKKTIIFQRKRNYIYRGKKIDRAKKEKNSPIRKKQEKKNGRKKNLSDKRKGKS

SEQ ID NO: 116556 - protein, 257 aa, Oryza sativa
  unsure (1)..(257): unsure at all Xaa locations
  Clone ID: PAT_MRT4530_20044C.1.pep
NQVCLIKKTGRKKKSDPKKKXKKKPGEKNTRPWQKNTRSLKKEKKVRETNRLMNKKSEKKKKNRAKKKEKSDKKTWRKKTGRKKNKYVRQKKREKRKKYRNKKKKKSPIKKPGRKKTGWKKNKSVRQKRKQKKEKNRKKRNYIYRGKKIDRAKKEKNSPIRKKQEKKNGRKKKFVRXKEKEKAEKNLTPSTRXKKGEKKLSDKEKGIICDAVKKIKKPGEKKDKSPIKKRGEKKTNLSYQKKPKRGKIKTNPTPSTW

SEQ ID NO: 116557 - protein, 246 aa, Oryza sativa
  unsure (1)..(246): unsure at all Xaa locations
  Clone ID: PAT_MRT4530_20045C.1.pep
ILVCCKKQKKKKKKKKKKKKKKKKKNSLGASXSVKKREKKTERKKKEKSDKKTWRKKTGRKKNKYVRQKKKGKKRKKXKRIRLHRRGKKSLKKXKENCPIPKKNELYVSWSKKKKKSPIKKPGRKKTGWKKNKSVRQKRKQKKEKNRKKSTGRKKKKIVRSEKNRRKKNGRKKNLRKKRXKSDKKTGRKKNKSVLSKKSQKGEKSKRIRLRRRGENRAKKFQSKKKKLKGRKKARRKKVKFIFVVF

SEQ ID NO: 116558 - protein, 235 aa, Oryza sativa
  Clone ID: PAT_MRT4530_20046C.1.pep
LAIPSPYKAQVNVSVWRDDDYRRMVMACLIEAVYLLELERQERRDAAAVAQQWWKPFRYRLAHELVDERDGSVFGAIFERDHQPAAAVDGEAPRAVIAFRGTLLRGPTIRRDVEDELRLLARNSLRGSARLAGALQALRATIERFGSENVCLCGHSLGAGFARQVARMLASSSASLEFHLFNAPYLSLPMGVRSVVKTADCLLKAVRTGVAAVGRWHGKALKNVAYANCILGYTI

SEQ ID NO: 116559 - protein, 157 aa, Oryza sativa
  unsure (1)..(157): unsure at all Xaa locations
  Clone ID: PAT_MRT4530_20047C.1.pep
LLPEEANKPRFAQLYIYDTENEVANRISVSGCSDKTPVDPSIVTDLQNMIDENNILAKSFRMARDRFKEEDYHDVTLRLISDRDKPPTSEVAALVVKDPTEESEGRDIIVEYKDMVPKRISEIHPKFMAMQYPLLXPYGEDGFTLKIPYNKKEGASC

SEQ ID NO: 116560 - protein, 58 aa, Oryza sativa
  unsure (1)..(58): unsure at all Xaa locations
  Clone ID: PAT_MRT4530_20048C.1.pep
KPRLTRQELLRLPAKVXQDDNVAVVTAKAAHGRPYYWSDRYYRALVGGQYCRSNDLLN

SEQ ID NO: 116561 - protein, 38 aa, Oryza sativa
  Clone ID: PAT_MRT4530_20049C.1.pep
QPSIISLLVKVLPSVRQRGPKQCLHLNRRWPPLVGHRH

SEQ ID NO: 116562 - protein, 78 aa, Oryza sativa
  unsure (1)..(78): unsure at all Xaa locations
  Clone ID: PAT_MRT4530_2004C.1.pep
RDGLIDAWVRVKTVGISSISSETMLDRSVIEHIYHLNYSISTLIRHRKKLEKTKFXNSQKRYGRKRYPLNRNSARSIG

SEQ ID NO: 116563 - protein, 226 aa, Oryza sativa
  Clone ID: PAT_MRT4530_20050C.1.pep
LISPKVCIAMPLPHGKPLLPRLPRCEPEPPSSLLSLSSSTTNSTMMPSMTVLSQPRHHSPTLPTPPPSPPRPMASSRPPLSSGRQVGPQPPANSSQSSRPPWPPTPPPRAHVATPCRRSLPPKIRPIPAVSKLPEPSHLPPPPAGAFQPPVTAAPSHRRLPPASVASPGHVAATHSAATPHRTPSTLRPTPHCVVASLGSARTRRPSATAQLASQPLESILGIHFP

SEQ ID NO: 116564 - protein, 129 aa, Oryza sativa
  Clone ID: PAT_MRT4530_20051C.1.pep
GGPRGFRVSPGDGCQVRPPRRVTRGRWLRPALLDRKGPPCVCSGPPQVLRLHARRGGGLRFGPRLIKWGPVANPWLFVVGGLGAQRVRGLGVGQMGFVASRLFPGGFCVPLCHAGVLNGCAFMYFFGSL

SEQ ID NO: 116565 - protein, 404 aa, Oryza sativa
  unsure (1)..(404): unsure at all Xaa locations
  Clone ID: PAT_MRT4530_20052C.1.pep
FSFVPLGPFSVQALLPLPGQAARLLLSGWPSSLPATSKFVPPPSNRPPLSSGRQVGPQPPANSSQSSRPPWPPTPLQNPPPPVPRARVXPPCPETTPLPSHLPPPPAGAFQPPXSPPPXPRRIVTPPPPASPPEXQDRPPLPLPKPPLKPRRHHQPEPPPPPAXRASPRPAMSPPPTAPPRPTXTPSTAPLPQSISETPPPRSPXSPPPSPTTAAPRHLSGRPRTASSPPLVLQGRGDPRPPPSSPRPDRPPRARASPRLAAAPLDSSSPXPPIVPPRAHAKNAPHVSLCSRTPSPFFLGGAGPPPPPPPPPPPRPPPAPPPPPRPSPPTPHPPGGGGGAAGRAGAPRPPGPARAGRGARGRGPRGGGGGRAAGRRGARRAPGRAGGGRAPGPPRAAARRARGR

SEQ ID NO: 116566 - protein, 74 aa, Oryza sativa
  Clone ID: PAT_MRT4530_20053C.1.pep
LHESARSVSQLTIGSGFWNIYKWVEHTNQDMGVDTLDAEFTRPLWVFGISSYGYLRESRSHCFQLQAFIALRYF

SEQ ID NO: 116567 - protein, 310 aa, Oryza sativa
  Clone ID: PAT_MRT4530_20054C.1.pep
MAERQVAELGAGAACVGWNHCGRRLAAGAVDGFVSVYDSQSQPSPSSKWQSREVELVIVLEIIRRCCTEGNGTAHKHAILNIVWLPPDYGDAIACVCADGTLSLWEEVTAYSDGQVKVYELLDSLELDKWQLQAEFQNITDPVSRSGKPACTSASIAWSPRRGESQQASFAIGFNSDSPNFNSCKIWEFEEAHQRWLPLVELGSPQDKGDIVHAVAWAPNIGRPYEIIAVATCKGIAIWHIGLSAESDGSLSTENVAVLSGHDGEVLQLEWDMGGMTLASTGGDGMVKLWQANLNGVWHEQAVLDCNVSH

SEQ ID NO: 116568 - protein, 153 aa, Oryza sativa
  Clone ID: PAT_MRT4530_20055C.1.pep
MAAGGGGGDAAMRGGVAVAAGGGGRPPCAAPLGSGGGTGALGVAEDAEVDVDVVRGHGHGFPVRIRRAPQKRWHGERRRSYGGGGVNGGKGKRKLLAPNVVRLISEFWMAIALRNGMEDTHLPLTTILRVVTQANNAMPAFKLLQKEADKLAT

SEQ ID NO: 116569 - protein, 82 aa, Oryza sativa
  unsure (1)..(82): unsure at all Xaa locations
  Clone ID: PAT_MRT4530_20056C.1.pep
VSCSKFCPPTITGRHSSTGLHIVGVQVNLGPADRVPXQVQHLRHQVACLRGRXVEAEKLYAELLTIVRSSENEVMFLECLTH

SEQ ID NO: 116570 - protein, 102 aa, Oryza sativa
  unsure (1)..(102): unsure at all Xaa locations
  Clone ID: PAT_MRT4530_20057C.1.pep
RGQRLFRLQAGRAHLHLVAFIGHRLPSQTNTSLXCKLCPHSCAPGKIFPVGHPSQIAPGQVRLTSEFFRDRLPEKKLQLVDMSILLILLSPGLGCHTSASIW

SEQ ID NO: 116571 - protein, 50 aa, Oryza sativa
  Clone ID: PAT_MRT4530_20058C.1.pep
SKALNFALHLDTQLHNVGKRLAFCSDALVIAVVVPCQCVRVSINVAWIPT

SEQ ID NO: 116572 - protein, 183 aa, Oryza sativa
  Clone ID: PAT_MRT4530_20059C.1.pep
GGRHARSAVRRRRPRRAERGGGQPEERRARRPRRGVRPRRPPARVRQGARRPPLASPASRLRHRPPLHGRQPPPPLAPRRGALAGRARRRPLAGAATVDGVPRAALPGRLPPAPRPQNGCAAVAVAASRRERPARDGRHPRAGLHRLRRRPALRAPGGGRGGEGARRAPLRRALRSGVRRRRL

SEQ ID NO: 116573 - protein, 203 aa, Oryza sativa
  Clone ID: PAT_MRT4530_20060C.1.pep
ELCISSSATKLTTGLLSALSNLRKLKYLKLIADQLEEFIIKDNALPSLLSLCFVLNRPTFPVIKGNALRFLKSLQLLCKNLVGLSEININCLKRLEEVVLHPCVNKATKVTWERAAKEHPNRPKVLVLEKVDLADGHEEDSDSTPTEIVTNKESTVAGNGADIDKQNYIDKQNYPTSNMSRAMVSPALTEPCSAGNGVESSCA

SEQ ID NO: 116574 - protein, 58 aa, Oryza sativa
  Clone ID: PAT_MRT4530_20061C.1.pep
PTYQLKLAEGSVLKSATQSPISPWSSQNGIRNMRTRMYFSCPMILILIPMDQNMGDRV

SEQ ID NO: 116575 - protein, 70 aa, Oryza sativa
  Clone ID: PAT_MRT4530_20062C.1.pep
RRYKAEGGCSACTTIRSTAGQQQARTVDASSESPAHQQVESVTESLPNIKYNINLHHNCVLVQTIRSYRS

SEQ ID NO: 116576 - protein, 64 aa, Oryza sativa
  Clone ID: PAT_MRT4530_20063C.1.pep
MVKGGPLAIIGVCYVLSPAGNGIIFSLFDLVFFFFEREIKHSTSPPTFLYSVTVKQHKQPSGLL

SEQ ID NO: 116577 - protein, 91 aa, Oryza sativa
  Clone ID: PAT_MRT4530_20064C.1.pep
MTVGTAVRIRFATKPFPSRPRVTSCHIEGSNPHEPGLSDPAPAFPTIGMRGAIDQRVTCLAQGLHEASRIFEKTRDRRKSDNRNYSKQSKT

SEQ ID NO: 116578 - protein, 310 aa, Oryza sativa
  Clone ID: PAT_MRT4530_20065C.1.pep
MFRSTALRLLRETKRAVGPWMTTMTSTSPESLIAGGFSTAASSHQRLAGKVAVITGAASGIGKATAAEFIRNGAKVIITDVNDDLGHAAAAELGPDATYARCDVADEAQVAAAVDLAVARHGRLDVMHNNAAIPGRFPQDDMASVDLADFDAMMAVNARASLAGIKHAARVMAPRRAGVILCTASAVGVLPLPAVATHSITKATIIAIVRAAAEPLARHGLRVNAISPGAVRTPVLQGKVSVMSASSPTMSDELKQMIDVDANDMMMGPEEVAMAAVYLASDEARYVTGHNLVVDGGYTVHKGADTPAAR

SEQ ID NO: 116579 - protein, 380 aa, Oryza sativa
  Clone ID: PAT_MRT4530_20066C.1.pep
MRACVAKALRYARRLCGYSRRAMVDLGACRVSYHDVGRVELEIQASLAVRIFDERENGETVEGEEPRPIGCHRWEVQFRRYTDTPYNVGDWRVRTDKYADTEINVGSDLYSSTVKPGEAFPCRYPISPSPCVVEGKGRGSPFAYLRFDGMLLRQEREYDDAVEQGMEDAINQGATPIVTPQSGTAVQCRLTGACRRNNGANRFLRNRDLTQDSLRIQPKTQTRKHQQQQQQRNQWLILVTIPTPQQLFTKHRQSNLRNGNHLTSAHDHTGRCQRLATKPFPSRPRVTSCHIEGSNPHEPGLSDPAPAFPTIGMRGFTNPFPKFSTINGVCGIFGMRAQRARIPKYHKGGATRNQGAIDQRVTCLAQSLHEASRIFEKTRG

SEQ ID NO: 116580 - protein, 201 aa, Oryza sativa
  unsure (1)..(201): unsure at all Xaa locations
  Clone ID: PAT_MRT4530_20067C.1.pep
DQPTCICKIKXVFDSYSVMNNWYLXLLILIFVSVSVSGFGDSLVSKYDFFVXSCVGDSMPRDILRLELMHVVGEDSIWHTMEVLCAYGMRSRIWKESKFDMIGYVKFVSYTRRFPRWFRASSMSLVRGFRLPTSCINRGGASDRRNRTGQTNGGAAVRPAEASTSXATSRRLDRXSTPVIPVAQARSDRRVNLGQTDLHRI

SEQ ID NO: 116581 - protein, 67 aa, Oryza sativa
  unsure (1)..(67): unsure at all Xaa locations
  Clone ID: PAT_MRT4530_20068C.1.pep
FSRLQSFPQLKKLMNAYXPRQSVEMNAIAFPFNGRRLRGEQTPVELQMKNGGEINPLLPQIGGCLPP

SEQ ID NO: 116582 - protein, 42 aa, Oryza sativa
  Clone ID: PAT_MRT4530_20069C.1.pep
IRSTSFHSTARPPLLFLLSMLPLYLHVTVVYAPIKSRVVRPK

SEQ ID NO: 116583 - protein, 57 aa, Oryza sativa
  Clone ID: PAT_MRT4530_2006C.1.pep
WEDDLSQDDRWHMRVEKMRSSVMQGERPEDSKTYLQTHDSRSPAVHFVEACQPDYLI

SEQ ID NO: 116584 - protein, 237 aa, Oryza sativa
  Clone ID: PAT_MRT4530_20070C.1.pep
MRHISDFFLRLPMLMFLQRRPIGGRKQERDENSGACRGQNVKFLVPPPAAGGARSGQRPPAVSRSRRSPSLPLLYHLARCTMNRSEMQHAVDQVKFTWIATEKSRNGAEEFREGRTQRQSSPPAAPLAAGARRRLTGQRKSHGLLWRDGDGNVVFAVAGGGRAAQYNSLVGRPKMPLPAHPRTGADQPGGAADLRRAAGDGTADNRATVVTLPPPDSVATPVAPTRRLLFSLNCIFH

SEQ ID NO: 116585 - protein, 55 aa, Oryza sativa
  Clone ID: PAT_MRT4530_20071C.1.pep
SFLKIILFLFVFWYFLGVHQKRQPFKLDLNYPRAKALFISLPWNFWAELPFRTGN

SEQ ID NO: 116586 - protein, 141 aa, Oryza sativa
  Clone ID: PAT_MRT4530_20072C.1.pep
TTTSTTTRRMKAETAQLPNPRRRSNPRRDGDRMEAAVRIQVDGWCGPSCSRWQGRRRCWAKGQHQWSVAELLLHQLVLQGATASRDLGTALTTGAEATNAARPSALPLGHVAPEQRKSEWKVVGPADGKRMASGVGWAQVW

SEQ ID NO: 116587 - protein, 54 aa, Oryza sativa
  unsure (1)..(54): unsure at all Xaa locations
  Clone ID: PAT_MRT4530_20073C.1.pep
SIFRALPNDVLANAYRISREXAQRLKHNIGDEFGAFTPIRYKSYQDVYNASESS

SEQ ID NO: 116588 - protein, 127 aa, Oryza sativa
  Clone ID: PAT_MRT4530_20074C.1.pep
PTRSKGAKSPVEAPPRGGETQFPPSQIDGWAVVCLFLDGKMGPGGGSPAPLGPLRFEKGSVAGPNEPPGPGPPFTWDFPVWPVSGRPPKKPFSGVDSRIFGVANAPNWSGFDGVPRVNPLVPLPWFF

SEQ ID NO: 116589 - protein, 50 aa, Oryza sativa
  Clone ID: PAT_MRT4530_20075C.1.pep
QFVPLNLQLKSIKVPNINFSLFHNKIHNLFSFSTLKLGKIKKWVSLGGPI

SEQ ID NO: 116590 - protein, 88 aa, Oryza sativa
  Clone ID: PAT_MRT4530_20076C.1.pep
QEGLKTDTGVDLNQFFTKYQLGFRGQSSKRFELRATATHAHHEITDLMSDTRGVSCLKTSVFPCLCQHIGSHGLQWNFQSLFCDISIW

SEQ ID NO: 116591 - protein, 84 aa, Oryza sativa
  Clone ID: PAT_MRT4530_20077C.1.pep
WHEGFVSRENPRSPGYYDGRYWPMWKLPMFGCPDPPQVLKELEEAKKGSPDAFVRIIGFDNVRQVQFISFFAYKPPGFKEFGGK

SEQ ID NO: 116592 - protein, 113 aa, Oryza sativa
  Clone ID: PAT_MRT4530_20078C.1.pep
SYRPPFTVEALLKQIESLFRSKWVPCLEFSKVGFVSRETPRSPGYYDGRYWPMWNLPMLGCPHPPQVLKELEEAKKGSPDALVRIIGFDNVRQVQFISFFAYKPPGCEEFGGN

SEQ ID NO: 116593 - protein, 172 aa, Oryza sativa
  Clone ID: PAT_MRT4530_20079C.1.pep
MWFHMGLQGSYQESHNIPKTCIWERPKPFSPIMLTNHLELTGGPTHAAAAATCLLLLTIATCLLLLRELSAGEIELELHHPLLECLQKSDSSDSRRPFSPIMLTNHLELTGGPTHAAAAATCLLLLTIATCLLLLRELSAGEIELELHHPLLECLQKSDSSDSRRVAMRLGS

SEQ ID NO: 116594 - protein, 592 aa, Oryza sativa
  Clone ID: PAT_MRT4530_2007C.1.pep
MRISGSGLRPLLYSFLIARVGVVLFFLLFVLVRDVSAVAETEVGVVRVVQEAPDRKLEGAGGQDGFKSGKVPVSTVAWSTLAMAAATGLGALPFFFLELEAQWAGLCNGLAAGVMLAASFDLVQEGQMYGSGSWVVFGILSGGFFIWLCKKFLEQYGEVSMLDIKGADASKVILVVGIMTLHSFGEGSGVGVSFAGSKGFSQGLLVTIAIAVHNIPEGLAVSMLLSSRGVSPQKAMIWSIITSLPQPIVAVPAFLCADAFQKVLPFCTGFAAGCMIWIVIAEVLPDAFKEAAPSQVASAGTLAVAFMETLGTVLQGFTDGHNSEDTAGFLVSLVFGLGPLFGGIVLVAFSLTFSMPHPLLTGVASGIAFRLAAWRPLQLLMSSKMGLFTTLFLLIGGSLIYHVATSNILQLVNRKKSSVNVITSSSGLSLSVLTLQSLLACGSVFLHAYAEGLQLGVAARKAYGLGRYMVLPVSLHGLPRGAAVASCIYGATDSWRAALAAAALTGFAGPSAAISAILAKIDYSGLDYWMVIACGALIPSFGRVFKRSLRLDMRKSICGLLIGFAFASVCLMSTRFICLHTPYCNSAPEAVT

SEQ ID NO: 116595 - protein, 82 aa, Oryza sativa
  unsure (1)..(82): unsure at all Xaa locations
  Clone ID: PAT_MRT4530_20080C.1.pep
HELXPXXXXSAXXTIGDNLHXREGNXRIXTXXPXITSQLXXXWGLXRQPVMFXYXXPPXXXXLIPHCSXPLAXXIXGAKPSX

SEQ ID NO: 116596 - protein, 158 aa, Oryza sativa
  Clone ID: PAT_MRT4530_20081C.1.pep
MASQAFPSCCPVAANVGAGAHRIPPPELLHRPPLERMVVLAGDEHHPTLPLPSVVGEKLKNSGARSSPFDAARRLHCQCRPEHGHRACHTTPLTNVAGGARIRPSATAAPPSAAAVAAPAPADDAAAACAAWRQGAEMKLNERLGMRRKRIRWGKVGP

SEQ ID NO: 116597 - protein, 108 aa, Oryza sativa
  unsure (1)..(108): unsure at all Xaa locations
  Clone ID: PAT_MRT4530_20082C.1.pep
GYDVLTATDHLIRMKFETGILDDDDMNHMKNKRIRLVADMPHHQFGRALDRLQHAVQITIHGVFIHQSKLXHTLVTPTSTLILLIXTYETFFGTYPLSQVFCSPNPYL

SEQ ID NO: 116598 - protein, 167 aa, Oryza sativa
  Clone ID: PAT_MRT4530_20083C.1.pep
LSWPFLEPVEGVILTIPDYFDIIKNPMDLGTIKQNLESGSYTTVNQWIADVRLVWSNAMLYNPPGNEFNTMAKTLSDTFEKKLAQMVHKLSYSSSQKRDQLRSTLETLVAQYKNYESELGMLTKQAEDEAREHPDLSPPIKPSSALLRSPLNFNEKMKLYHNINSLD

SEQ ID NO: 116599 - protein, 33 aa, Oryza sativa
  Clone ID: PAT_MRT4530_20084C.1.pep
MRVFTRKDILTVCYVRDPQRYIHCVLCKKKKKK

SEQ ID NO: 116600 - protein, 37 aa, Oryza sativa
  Clone ID: PAT_MRT4530_20085C.1.pep
MPRWASADWDWLIESSGPSPSTRRSDHLPVPAGTFFE

SEQ ID NO: 116601 - protein, 187 aa, Oryza sativa
  Clone ID: PAT_MRT4530_20086C.1.pep
MKTLELLHFFFSNKKLGQIAPNAEQLQHMFKAALRAPDHGKLKPYHFVVIEKQSMSMLKACLVDAAIEFEMDEKNALKADKIAEQAPLMIGIVAKIDHQSEKVPAWEQMISAGCATYAMQLAANALGFDTVWISNQWVEGKMLRQAFGCQTGDKIIGLLLVGSPKEARDGISLARETENTEGFVSYL

SEQ ID NO: 116602 - protein, 83 aa, Oryza sativa
  Clone ID: PAT_MRT4530_20087C.1.pep
FPGVAHFNRGAAHPPFSTWGHPEWGLAGGLLQRFMNRSGGGDAPCGGSFCPGRVGGSPSLFPSLFSPLMPRSFGLLLFVGCPF

SEQ ID NO: 116603 - protein, 136 aa, Oryza sativa
  Clone ID: PAT_MRT4530_20088C.1.pep
VPPQQQAAAFGCGSSPPARIRACARPLPASVPLPPPAAAPAPAARSPPTSGSSLPTACSRARASRPPASALVSSPSARTPAARSLPASARPRPLPQPSPPPPATGLGSSPAGGLASTPPATASPKTTLTPNRSSAF

SEQ ID NO: 116604 - protein, 127 aa, Oryza sativa
  Clone ID: PAT_MRT4530_20089C.1.pep
MALCAGGHSSASVADADADGADALGRALASLRRRRARRCCRRARQGPRLLARTPCSPPPARLHCWSKKMGEGKKTENEGIDGNVTISSRPSKMLYAETATGAVTTVKAPYRGGLAVWVLGCIKLPAN

SEQ ID NO: 116605 - protein, 142 aa, Oryza sativa
  Clone ID: PAT_MRT4530_2008C.1.pep
THPARLRPQASYQALPARRAQRPASVSATAETSRTRTKSRKNRTTPTLESMFTLMEGTHSDSEIPMPRSNQCNTVSIGKNHEAKQSSRSSKTDQQFTIPAWRAAPALDSIYRRRQADGEGGEGEGRRRGPIGILSCGDLTRG

SEQ ID NO: 116606 - protein, 259 aa, Oryza sativa
  Clone ID: PAT_MRT4530_20090C.1.pep
MAPPLLLLLASLLLVAARRALGLGLGQWQPGHATFYGGGDASGTMGGACGYGNLYSQGYGTSTAALSTALFNRGLSCGSCYELRCAGDHRRSCLPGGATVTVTATNFCPPNYALPSDGGGWCNPPRRHFDLAEPAFLRIARHAAGIVPVSFRRVACARKGGVRFTVNGHAYFNLVLVTNVGGAGDVRSLAVKGSGSGSRVGGRWQPMSRNWGQNWQSNAYLDGKALSFRVTAGDGRSLTCADVAPAGWQFGQTFEGRQF

SEQ ID NO: 116607 - protein, 329 aa, Oryza sativa
  Clone ID: PAT_MRT4530_20091C.1.pep
MAAGFRRRLTALTIPKASSYLRRTRHKKLSYSRARSASLPGRFHPVVTGLHESASALLGWTDEAPAQAGTQWIGEGVGHLARLLAGLTELLHHPQAQDPLRPPRKAAPWTERLLDDLLLLADAHGCFREALLALKQLLAEAHAALRRRDATRLAAALRARRRSDRDLSRLASTLRDLSYRSSSAAATSDSGEAALAEAVGAATCAAAAASASFFAGLASASASSASRSLASPTAASPAKVAVAPVWWVADLLRWRRRTVSVAACESGAGAKETPLDECIDEEEEERKAAMDRLLRLEECVVAAEDGCEQVYRALVNARVSLLNVLTPCF

SEQ ID NO: 116608 - protein, 190 aa, Oryza sativa
  Clone ID: PAT_MRT4530_20092C.1.pep
MPRPKILNGFDIIASSPSFDMSGLFQERGERMRFVSGASVADIIAKLEEIAGMVSFMAWTKDCQVSIEATRNGQKSALAISAKVFELTCELVMVQLSMRRGGSGARMSGRRARPEPVAAPGCPAVRGGGVGRTPGATYGARMSGGRWWLRAGAREESMSGCGLAQGSVGRKEGTKRREMGELTHGERWES

SEQ ID NO: 116609 - protein, 137 aa, Oryza sativa
  unsure (1)..(137): unsure at all Xaa locations
  Clone ID: PAT_MRT4530_20093C.1.pep
MASRILPGFFRRRRSSAVVPAATKEEMLELERRLWDIAPAAAYELQKRRQWTPEQVAREAEKQRWIAEEKRRIEKETKRHQQRGSPASPVVVVVDLDKELGKEFERTRFYEELRLQQAEARRAXASQGRDDDGGGRR

SEQ ID NO: 116610 - protein, 176 aa, Oryza sativa
  Clone ID: PAT_MRT4530_20094C.1.pep
MDDQLDRISNCAKPNYKSTDRSKGESAIYGQFGGDGDGDAIHRRGRLRPRRRVAEIHQQVCALVASNPSSRRRCSLSTCRRRDSIDMSSFCTIGIFLIDQGISQHAGRQQRRDPSASMAAIRSMSTAILRAAHRQSRRRRPIHQQKAVLETSQHPLTASATASPLEGSNRISRQII

SEQ ID NO: 116611 - protein, 99 aa, Oryza sativa
  Clone ID: PAT_MRT4530_20095C.1.pep
STDRSKGESAIYGQFGGDGDGDAIHRRGRLRPRRRVAEIHQQVCALVASNPSSRRRCSLSTCRRRDSIDMSSFCTIGIFLIDQGISQHAGRQQRRDPSA

SEQ ID NO: 116612 - protein, 267 aa, Oryza sativa
  Clone ID: PAT_MRT4530_20096C.1.pep
MSMTSPRLKLFGFDVSEEETAEHEEQYSAEPESAPVCGGNGGGGGGGSDSSSSSTTTTTTATAGGDGRRYECQYCCREFANSQALGGHQNAHKKERQQLKRAQLQAAAAAAGRVAGGAAALYPRANPMVSAFAPTPHLLGGGEAGPTSWVYFSPRAAAVAGGAQGQQFHVSHGCVFPARGAGPAAVAAASPAVFSYTPATSAAAVAAASAPYVTTDEHHGRRIHASSAASLARYPGPAMVVAEPVATVPEDTCLGLDLQLSLAPAGL

SEQ ID NO: 116613 - protein, 157 aa, Oryza sativa
  unsure (1)..(157): unsure at all Xaa locations
  Clone ID: PAT_MRT4530_20097C.1.pep
GFVLLRRNIWAHAYSDEEEVVTYVPQDDLVIAVSNFFDGIQCVLSGVXRGCGWQKIGACVNLGAYYIVGIPSAYLIAFVLQAXGMGLWLGIICGLLVQVLLLMPITXLCTNWDKEAANAKDRVFSSSLPSDLATTEVRGDSCESVLADYMLLLISPH

SEQ ID NO: 116614 - protein, 37 aa, Oryza sativa
  Clone ID: PAT_MRT4530_20098C.1.pep
MPRADNVLLDSESRTTMKVPFSVVEGSVSLRFYTGID

SEQ ID NO: 116615 - protein, 187 aa, Oryza sativa
  Clone ID: PAT_MRT4530_20099C.1.pep
MKITTGDRKEKRNVGFKIPKKKFRFCVRDEYGTKALAEQVMVKSTSLWREIELRTETRMITAFFYHGCGLRTWSAYRQNIPIFNKLHAALNNILRRYKSRRVEIGLFYLQSNMKCFQFTVRSPLDNNNEFLKKLRKIKAHECNMREDNAEKTGSLSPIIMGTLRLVSKRHVLGFMFVIFLSCVIIFL

SEQ ID NO: 116616 - protein, 60 aa, Oryza sativa
  Clone ID: PAT_MRT4530_2009C.1.pep
CLCQNRWGKRETGAGNNWFFLTHRGILNLFPGIKKFFVKPPGKNYPFSPRKISGGGGGFF

SEQ ID NO: 116617 - protein, 71 aa, Oryza sativa
  Clone ID: PAT_MRT4530_200C.1.pep
MAAKCPGLASLRWLPAIGSTTTSYQLLVLLPPLPRCPPESTAGSSVTNKPRDKGFFNPASTSNQLYVAFLN

SEQ ID NO: 116618 - protein, 329 aa, Oryza sativa
  Clone ID: PAT_MRT4530_20100C.1.pep
MAVIRGETSSRTLTLGGLICEFEGLKEKFPEAYGTFQLAQTAAHLTAPWLRPLLRPQDGRWDILQRPAWALALVQSLRNILQEEEDAPSAGMSAYAMLIDNTWKDTLPPSALAFIILEKVVMPELVADVVDRASQRLGEPVDPASVWVSPWIPHLGVDRLHGVYLDIAGELGRWMKGRDVTRCAYGKVSQWKGVFDPETWDEFVTVQRHVVPVVSRSLRDPTISPTRTWGGSNTFPLVMRWALLVPARYMVPVLESEFFAKWRYAVYPFVTEVRPIPGKAAVWYQSWKDLFTPELLADERVLLQLETGLGMINRAAQGQQISWPEHSDV

SEQ ID NO: 116619 - protein, 45 aa, Oryza sativa
  Clone ID: PAT_MRT4530_20101C.1.pep
MGPESSELPYGPMKFWAAHRVTNNDHEEDACEDPVDPLEWDSYGF

SEQ ID NO: 116620 - protein, 39 aa, Oryza sativa
  unsure (1)..(39): unsure at all Xaa locations
  Clone ID: PAT_MRT4530_20102C.1.pep
GLFPFVAVLNSTELMIVIVFGVHGVGRSFPCGGXHPLGN

SEQ ID NO: 116621 - protein, 135 aa, Oryza sativa
  Clone ID: PAT_MRT4530_20103C.1.pep
MRTAAVLLMALALTLAAAGTGTGAELETAAIRRRQSRFLASAKNSPPLSYYDCKRKPPSVCLEPGSPGATCCKGACVDTGSSFAHCGSCNHVCKYGETCCGGHCVDLLSDRKNCGDCFVRCPSKKCSFGLCDYAG

SEQ ID NO: 116622 - protein, 54 aa, Oryza sativa
  Clone ID: PAT_MRT4530_20104C.1.pep
PNRPTPATVRHKDKRAMGWHWSHSLASAGLGLHFLLCSKLLMNDVLILHQFFGA

SEQ ID NO: 116623 - protein, 102 aa, Oryza sativa
  Clone ID: PAT_MRT4530_20105C.1.pep
DVFDEFLLRTQLLQMDTISPARVQSVERKGIRSDNGGEFKNASFEQFCNERDESDDNDRYKFARPGKQAPARQTADRLTVKDPSKCGNPVVVFVPKLTYPER

SEQ ID NO: 116624 - protein, 158 aa, Oryza sativa
  Clone ID: PAT_MRT4530_20106C.1.pep
HEGERELVSSFFFFFFESKALPGVSAFAASTEKDRGETWGAIWTKAQKWSTPQIARTHARNGQSTKQSSGALHKISPASACKSNPKLKFDAKIASSSHDKTNPALHLHTCVRQITLGDQHVRRGGAAASRRRWWRCYRRREEAQGLEPEEGLRQKPPL

SEQ ID NO: 116625 - protein, 274 aa, Oryza sativa
  unsure (1)..(274): unsure at all Xaa locations
  Clone ID: PAT_MRT4530_20107C.1.pep
NERIVVPTALDTNILQAYENNQGNEEERKDEEEKDLSIAPFLLEECSIDQAPIISEDEKKXNDNGATATQGMDIYDMSTMSTTYTTLEQPIVETIAEIYFSQNNLFDVSCDKEQFCDASFISMPQLVNGHVSSIVEPLCIQFKHVIRIARENEEFKLLSSLNTWAYIQFDDFCLLNNLDKKLFARLLNELXVGLQEGECCGFSTTKISGSNQMAIKKXSSPNGVIDKDKFHRLHDKVKPRTVSNQEEKDDEDTTSSNITMTTICSILDLLVIYL

SEQ ID NO: 116626 - protein, 225 aa, Oryza sativa
  Clone ID: PAT_MRT4530_20108C.1.pep
MRIELCQEQKKSCLALGKSMPLASIQMTLSNKKQRSKSSELHLGRCLPLVRFLVYTLENAILSLPEDQEKMVWLIDFTGWTLANATPIKTARECANILQNHYPERLAIGILFNPPKVFEAFWKVVKHFLDPKSIQKVNFVYLKNEESMKILHKYIDPEVLPVEFGGKNNVVYSHEEYSKLMVKDDIKMASFWASDTKTDHVNKVINEHSVPEVTQQSSLVAAKAS

SEQ ID NO: 116627 - protein, 229 aa, Oryza sativa
  Clone ID: PAT_MRT4530_20109C.1.pep
MFSFRKKHASRFDSDDIEQQEAKIQELRAALGPLSSSGKKYCTEACLRRYLEARNWNVDKSRKMLEESLKWRTAYRPEDIRWPEISVESETGKMYRASFVDREGRTVVIMRPAKQNTSSHEGQVRFLVYTLENAILSLPEDQEKMVWLIDFTGWTLANATPIKTARECANILQNHYPERLAIGILFNPPKVFEAFWKVVKHFLDPKSIQKGEFCIPERRGEHEDPAQVH

SEQ ID NO: 116628 - protein, 110 aa, Oryza sativa
  Clone ID: PAT_MRT4530_2010C.1.pep
MEELKELTLEFDRKGYLDKHESFFLEYQEPCSLKVSSESATFCATSTLNHLKVLTGKMFKSYNFNDESTIDGEARDYITNGGCNVKIKKNDGHAMPKNAGDTSIVAPPCF

SEQ ID NO: 116629 - protein, 76 aa, Oryza sativa
  unsure (1)..(76): unsure at all Xaa locations
  Clone ID: PAT_MRT4530_20110C.1.pep
HRPLYINRDSREPQSAIRXAHSDQSGIGPQSYSENLQVLRGSTTRTWSRLSPRSKGKDAFAYECFLYHWTDRYEPI

SEQ ID NO: 116630 - protein, 75 aa, Oryza sativa
  unsure (1)..(75): unsure at all Xaa locations
  Clone ID: PAT_MRT4530_20111C.1.pep
GTXEDGRXSARQPDRGPKRPSQGDHRENLSRSENAPKMTMTMPXRSYSADTITYLGVKRILNQYRFLKNWFPPQK

SEQ ID NO: 116631 - protein, 101 aa, Oryza sativa
  Clone ID: PAT_MRT4530_20112C.1.pep
SPNLYTRRKTHKGSGRLGPRGRNGSGPIPRGDKERGGLITFGPDPPEGVRPRGSPRRYARAITLLEGSVGQKPNGRKSRTSAMVTRLSIMSGLFKTATLLE

SEQ ID NO: 116632 - protein, 114 aa, Oryza sativa
  unsure (1)..(114): unsure at all Xaa locations
  Clone ID: PAT_MRT4530_20113C.1.pep
FLSKKGLVSTHXGINMYTRGHYKLSHRLIQLLSPLRHSLFRGFYLSXCGTWHLMQGCIGFRSSAKGXVLCFAGPGNYIGYIGVVEGCIDSTSWIALIRLVYLSTYLSYILVNLI

SEQ ID NO: 116633 - protein, 107 aa, Oryza sativa
  unsure (1)..(107): unsure at all Xaa locations
  Clone ID: PAT_MRT4530_20114C.1.pep
STRIRRGLPITPEFLRLLLLYSFTYSKYTIEPYKEAKVYFSSLCVXSSSTIRCCSAHMQLHAAMGHSHQVSRCLRQASAVPSKQSNKASSSSLVPRCPNYLDGDGLG

SEQ ID NO: 116634 - protein, 121 aa, Oryza sativa
  Clone ID: PAT_MRT4530_20115C.1.pep
LNKKKTILAKVSAGGAKFFYLGILIFFGQRAKIHIPTGWGISPLTEIGSKPKFFWFLRALLKWGFPQGILGPPDPFPPWGGFVNSFYQKRGWEFKKKPEIPQFSLLNFWGKKKKKKFFFFF

SEQ ID NO: 116635 - protein, 89 aa, Oryza sativa
  unsure (1)..(89): unsure at all Xaa locations
  Clone ID: PAT_MRT4530_20116C.1.pep
RRSLVYVYFRCFDXVAFTIDASLTMDMGDXMVKVDAWYDNEWCYSQRLVYLAHLIASKRTGAVVHXSTIHLEDFLMDNXIPDECKLFEN

SEQ ID NO: 116636 - protein, 161 aa, Oryza sativa
  unsure (1)..(161): unsure at all Xaa locations
  Clone ID: PAT_MRT4530_20117C.1.pep
MVISSWFYNKWYQNLPEIHGRRPDVVLGLMLAKVIDDPIGAIGYFGRVTRNFWKESPQGKDNDAWVQDLTLEANPPIIVNLIDHLVALWEVVRGVHLDDKESNQIDWKFTSNGRYTASSAYCAQCCGXPSTSFNXLIWKAWVPGKCKFHAGLIIQNRVWTS

SEQ ID NO: 116637 - protein, 69 aa, Oryza sativa
  Clone ID: PAT_MRT4530_20118C.1.pep
LIVSFLKDILKGSFLPSYMRLWAKRQCYLFPIYLSFKISRYIALLVIVKSSAVGLLYGANPGPAHGLCA

SEQ ID NO: 116638 - protein, 65 aa, Oryza sativa
  Clone ID: PAT_MRT4530_20119C.1.pep
RSYIYCSSFRHINISTRSYSSSLYVSNAKSKYIYLYIYVQTNQNTVRGEDLPVWQQIEQSGATRE

SEQ ID NO: 116639 - protein, 253 aa, Oryza sativa
  Clone ID: PAT_MRT4530_2011C.1.pep
MGSGPGLSVARLLSFSLSFVSPSSSTSGQAATRRCGSAGRGGYGAGAARRRPGKARRNSGDPPSAAAARDGARASSAAGQRHGRSRLQGDRAVELGSFQIDGWEGEPLGWSVHDDPAGGGTAAGAAQLRRCTSQIEGAGEFYATRGFSGREDLPWNGRTTKGEDAWCGADEAEVASGRRRSQVFDVCSSATRLPQWRRRQQDYSSTPSNLQLRLGSLTMVISSGGERVIARCSMECMTGKRQRRMGFLWPGLA

SEQ ID NO: 116640 - protein, 46 aa, Oryza sativa
  Clone ID: PAT_MRT4530_20120C.1.pep
MSTKTDHQLTHVNKHNPVFQSKVPSPSDYAICGTVIQIKTNNGIRQ

SEQ ID NO: 116641 - protein, 46 aa, Oryza sativa
  Clone ID: PAT_MRT4530_20121C.1.pep
MPPSLSKPIWPRGGIKHGSMSVPIAIHRDENCHDRSTMMAKQWEVK

SEQ ID NO: 116642 - protein, 107 aa, Oryza sativa
  unsure (1)..(107): unsure at all Xaa locations
  Clone ID: PAT_MRT4530_20122C.1.pep
MASVGFGTTVAPAVAAXXRRLXHRRAAXPPXXARLARXSXTKXXTAAMXTEEKGLFNAIFGALYKEEQLLETDPILNKVEEKAPVAXSRATKAXGAPAKKAAGXGKR

SEQ ID NO: 116643 - protein, 58 aa, Oryza sativa
  Clone ID: PAT_MRT4530_20123C.1.pep
HSLLLLPSSPSSSRTRRPLLLLLFLLHPSPRRAPTVSAPPLVSVSPPPDLTSPNAPLT

SEQ ID NO: 116644 - protein, 282 aa, Oryza sativa
  Clone ID: PAT_MRT4530_20124C.1.pep
MAAVAFRSLLHPAAAALTERVPLPPAHLRLQGLHRHRVGVLNLFVASGHRRRILLPLAAAGGEFSSEEEEYANEEEEEGEEYIIYDKVTDRSRGFAFVTMATAEEAATAIQMFNGALLGGRTARVNYPEVPRGGERAVGSAAATRENRRDDGTFKIYAGNLGWGVRADALRAAFEGQPGLLDARVIFERDSGRSRGFGFVSFRTAEDAQAALEALDGVELEGRPLRLSMAEQNPTAGSPSTVQSQEEETASESSDAETEQSITSEPSEAETEESNLQTAASY

SEQ ID NO: 116645 - protein, 476 aa, Oryza sativa
  Clone ID: PAT_MRT4530_20125C.1.pep
PRVRPRVRKPRRAKKMMTNTKLFPLVAAICISFLSVACASNSTSSHPSSSSSLLTKPPQWREHLLLADSSSHVGLGLNTVAAWLLSFLAASVSSAGGVGGGSLFLPILNLVAGLSLKRATAYSSFMVTGGAASNVLYNLLCTGCGRRAAAVIDYDIALLFQPCLLLGVSIGVVCNVMFPEWLITALFALFLAFCTTKTLRAGLRIWSSESRGATLAVAAATAHGREEPLLLPHGTDAGNGGGARGDAGFPWKDVSVLVMVWLCFFVLHVFIGDKHGKGMIRIKPCGVAYWLITLSQVPFAVAFTAYIIYAKRKKQVLHNQEDGKANPESTKMDTLPTLLFPLAAFVTGALSGLFGIGGGLLLNPVLLQIGIPPQTAAATSSFMVLFCASMSMVQFILLGMQGIGEASVYAGICFVASVVGAVVIERAIRKSGRVSLIVFLVTGIMAVSTVIITFFGALDVWAQYTSGAYMGFKLPC

SEQ ID NO: 116646 - protein, 152 aa, Oryza sativa
  unsure (1)..(152): unsure at all Xaa locations
  Clone ID: PAT_MRT4530_20126C.1.pep
MAAVAFRSLLHPAAAALTERVPLPPAHLRLQGLHRHRVGVLNLFVASGHRRRILLPLAAAGGEFSSEEEEYANEEEEEGEEYVEEEEEDGEGGGGXXXWRRLADTTRLFVGNLPYTMNSXEISQSFSEVGRVDHVQIIYDKVTDRSRGFAFV

SEQ ID NO: 116647 - protein, 225 aa, Oryza sativa
  Clone ID: PAT_MRT4530_20127C.1.pep
SPGCRLASPAIFSSSTAMAAVAFRSLLHPAAAALTERVPLPPAHLRLQGLHRHRVGVLNLFVASGHRRRILLPLAAAGGEFSSEEEEYANEEEEEGEEYVEEEEEDGEEEEAAAVAAPRGYYPPRSRPALGQEPGRLFVGNLPYTMTSGEISQTFSEAGRVDNVQIIYDKVTDRSRGFAFVTMATAEEAATAIQMFNGALLGGRTARVNYPEVPRGGERAVGSAA

SEQ ID NO: 116648 - protein, 45 aa, Oryza sativa
  Clone ID: PAT_MRT4530_20128C.1.pep
CDVMESWKFEVVENELNMAQGYLLNLGILIKYMELTTSCHMLPLF

SEQ ID NO: 116649 - protein, 88 aa, Oryza sativa
  Clone ID: PAT_MRT4530_20129C.1.pep
PRVRGRVGRTAEDAQAALEALDGVELEGRPLRLSMAEQNPTAGSPSTVQSQEEETASESSDAETEQSITSEPSEAETEESNLQTAASY

SEQ ID NO: 116650 - protein, 86 aa, Oryza sativa
  unsure (1)..(86): unsure at all Xaa locations
  Clone ID: PAT_MRT4530_2012C.1.pep
MLRLPTLLPLKPSPPTTGLNPIHGRRXHGHHPSRLLASSARAAPPRXXKPSPYQHENLGAHPSHNKPEAGRAGARDLSWRSEFRSS

SEQ ID NO: 116651 - protein, 105 aa, Oryza sativa
  Clone ID: PAT_MRT4530_20130C.1.pep
VDMHDLHAWSLSSSALTREAPANDTDMGLITIPKSPSRARRESSTRPCARSLCLLKLFAIWSGKERGVARIVPFHMQVVHHSSERCPFYEDCKPRFICGGAVGVH

SEQ ID NO: 116652 - protein, 196 aa, Oryza sativa
  Clone ID: PAT_MRT4530_20131C.1.pep
SARNRKLPPENPISRRWPPPPPRSSPSPAPPSRRCSPAAARPTATPTGSSSAWLAAQPRLPRPSTTTTTTTRPAPPRAPPSPSPSWGTPRSRSLPPSPIRSAASPGRPTPPTPPPRSASSPPPAAARRCAPPCARPPSRAPSRRPWCPPTRSSSSSWHHPPPPLASPFTRSTTVRSSSLTPASCRPPSASSTLGPD

SEQ ID NO: 116653 - protein, 181 aa, Oryza sativa
  unsure (1)..(181): unsure at all Xaa locations
  Clone ID: PAT_MRT4530_20132C.1.pep
FGNGPPEGLICILNYVRDKSRVQQGPVMYFGYKYGPTPCNQGTTVQYTSAHRHPFYPYXLMTFLLSSWAASGSIFDEEHVLSDGLCIANIYSRSGTPNNLQVFICPCRSNSSYIGMASDDMSSAILPIGYRRXFNYLLQLEPEGNSFGTALELSRFPRPLRVDFXVNSWPPSTTTPRSPHA

SEQ ID NO: 116654 - protein, 233 aa, Oryza sativa
  Clone ID: PAT_MRT4530_20133C.1.pep
MATTAATAPDLSLHISPPSPPDMAAGGETMEQLAEPKLCLGFGTAAAAAAEQYNNGGCNLQQQQRLHQPSQIQRFKKSASGGSPVCSGGATGTGGVAAARSGNGGGGGKRSSRAPRMRWTTALHAHFVQAVELLGGHERATPKSVLELMNVKDLTLAHVKSHLQATYLLDLVQMYRTVKGTTDRTCAEGHGQMRDMGFLRRGGGGVDGFDVLGNTSSIAIANIRAFNLKDANI

SEQ ID NO: 116655 - protein, 110 aa, Oryza sativa
  unsure (1)..(110): unsure at all Xaa locations
  Clone ID: PAT_MRT4530_20134C.1.pep
MDDGLRHKSHEENENDVNYVDGLRLNKNDQAYHGPITRSRARKIQQEFTPEDIITTARRMGYVEDDKGYVEEEPAHAKPVAVYANKKMVYAAKXQLPRLVRPNQSTFSML

SEQ ID NO: 116656 - protein, 163 aa, Oryza sativa
  Clone ID: PAT_MRT4530_20135C.1.pep
RSHDRLVALAVGVFLLLLLAPRRGFHPPPSPRRRRQSRIPRARVVVVGPGWREEAEGGGGSGGGGGGRPGALRRLPRRRQLSLAAIHARLCPSVFKPAENNGAVAPPPRMSEALGISSQQLPDQKRVVPTNIPPPAPAPSISAVPPPPPVFNLPPPPPPPPLT

SEQ ID NO: 116657 - protein, 221 aa, Oryza sativa
  Clone ID: PAT_MRT4530_20136C.1.pep
MATGLRRAPGHRCGYWASAAREQGGGGAQGHRERSVGTQAAPWRRASSASGALDLVGRQLPEANVPKCSLTSHTLQHDKQMFALHTYEPPDFGGGCYGDGVQIHHPDEAATVLAVPDEVAVHPQPVVGGLVDGAVGPDVWSEPEAVDVLTPRASSSMLIVAAGGSSSGAPAAGEADAAAAAAGTRRHRRSNCHVSATSDKDQVKIATPQKNFHIFEKLLIE

SEQ ID NO: 116658 - protein, 104 aa, Oryza sativa
  unsure (1)..(104): unsure at all Xaa locations
  Clone ID: PAT_MRT4530_20137C.1.pep
GHITELNVPEGGGHAAITILPLLLKTSXCMTRMXNEDIQALTKKTQDGGTEHGVSHALKRSATMPTAYAGAEFXDACMNVLNGVHDHEXRSSAQSTVTELTFFD

SEQ ID NO: 116659 - protein, 156 aa, Oryza sativa
  Clone ID: PAT_MRT4530_20138C.1.pep
MEPQVFKSLLTFIYTDSLPELEDEEETESDRDEEEDQESEADGVHGEDYDDDDDDDDDDNGGDEMWSPLLVAADRYDLQRLKLICAKKLCERIDASTVADNLGLAEKQHCRLLKEACLEFLKAPANLKVVLASDGLDHITATCPSVLKELLAKFAS

SEQ ID NO: 116660 - protein, 265 aa, Oryza sativa
  Clone ID: PAT_MRT4530_20139C.1.pep
MASCAGCGCGCVSLARGWSTGRRPPRSHYQHGRRGTWGEHVDCLWLRPHIWTYRTVDEASDHWLRMYGHLIRYGEDGSSLVRVMNLHSVAVAAAAEIRWFQAVSNPCEVVERGEGENGDVLTVRFRKLAADQIKGARRRRRPPPRRRLRPDAPLLRHRRQSLVTTACALGPRAPPTPSLTPPPLAPCGPARRHRPAPAPPTPNSRIGGPVPSSNPSPSASSSSTAAAGKQVERSGSSPATTHSEDAVEVSERRGGRWKRWRGRRW

SEQ ID NO: 116661 - protein, 217 aa, Oryza sativa
  Clone ID: PAT_MRT4530_20140C.1.pep
EKDAHLTIAAPATVSTVLRAAHRPRRRPRYGRWRASSRFSPPTSPPPLSKTTTLMATGLRRAPGHRCGDWASAAREQCSGGARGHRVQAAAASRRARAQAHDKQMFDLHTYEPPDFGGGYCGVVVQIHHPDEAATVLAVPDEVAVHPQPVVGSLVDGVVGPDVWSQPEAVDEVTPRASFSMLIVALVLQSRARPTQPQPQPAHDTIEGLLVQSKSQY

SEQ ID NO: 116662 - protein, 125 aa, Oryza sativa
  Clone ID: PAT_MRT4530_20141C.1.pep
PVYNHRTTGSATRRHRRRCCVRCLRVNLETWPSDDRIYHPWPCGGRIHHACAPPGRGSTAHAPRSPPLSPPSPVHRGHLSAPSPLRPRPPQPFCRTPQPRPPLPLPRRPLRPPPPPCPPLPLPSG

SEQ ID NO: 116663 - protein, 69 aa, Oryza sativa
  Clone ID: PAT_MRT4530_20142C.1.pep
LARAQAPISDPPRRRACIVPGGLVVALPISHIYSPYFSRNRHSVSASRIILAFSSPRGQATREPAATEL

SEQ ID NO: 116664 - protein, 203 aa, Oryza sativa
  Clone ID: PAT_MRT4530_20143C.1.pep
MSDERQEAVVVAEEAEQTKEMERVRGNSSSSKRSEPVDLVKEEEEDGEDWFDALLRKLGHPFTVDEKGRPVDDADDREKGIWNASMVYMRAQNMSSEYDMVPNNLVLYPMMFEKRRWYHCNILGCKRLNDSTGEHSTQQRFFVELIINGGFIYHVLSCTKVDGDIDNNLCIACPPNSGIVHPPAGGFICGVSKDQKIFKVPFY

SEQ ID NO: 116665 - protein, 59 aa, Oryza sativa
  unsure (1)..(59): unsure at all Xaa locations
  Clone ID: PAT_MRT4530_20144C.1.pep
MLRSRKSRVMVMLVTAALLLTDMAAVSYMRRLISDLYVMWVVXGGSPPAKGGYMSRLQV

SEQ ID NO: 116666 - protein, 415 aa, Oryza sativa
  Clone ID: PAT_MRT4530_20145C.1.pep
MSDERQEAVVVAEEAEQTKEMERVRGNSSSSKRSEPVDLVKEEEEDGEDWFDALLRKLGHPFTVDEKGRSVPDPDWCPYAHGDPRHVLYVDRRNTPDVDMFAFILGQIPVDDADDREKGIWNASMVYMRAQNMSSEYDMVPNNLVLYPMMFEKRRWRKGWVKWASHGLVEPTLVLFAIFFHVDDLDSLLMTVESSLEVGVEVVTALEITAVLLVRPARARPKPAQTAAPLPPLFLLLTAPPLCGSLRRRRRRVSSRAPPSLRLSSSDAVSFISIARSSPSSSRLPFPPQITEAQPTLSTRSSPPSPSVQPCRATVAATAFGRRRHRRDHEEEQHLVHPFVAAVSHRSTAVTADPKTAVVIHRRLPSSKPLVSSLSRALRVGALRLRRRAVVRRRARGAEPPPEMTSSLMLALCQP

SEQ ID NO: 116667 - protein, 45 aa, Oryza sativa
  Clone ID: PAT_MRT4530_20146C.1.pep
SVDVQCQFLKSMRGSIMHASLLSMMAHDDSQLFVSWCSGMSVHLF

SEQ ID NO: 116668 - protein, 413 aa, Oryza sativa
  Clone ID: PAT_MRT4530_20147C.1.pep
MPPPPQQAPEPAGLQLLLQPEVVAPNHPPPAPPAPAAVPAPPQPQGEARYRRPLVRLQAVPNEDHVPDNYGDGPDELGITPAVYQALERHLPPDLAGAPAEVKRYFMRSVLRNYVPSPSQRIRTQNQREYRERILSAYQIFFFLLDIFKPLHPELYTNDPSTFILPAFLQAINGNTEESITSIMMEPAPGVFAFPMLKPSFCQMLMSEVNNFLRWAQSANQRIMRPTSLDRHGRGAALSDFGLQEMLDNLMKDFISPMSTVLFPEVGGNTLDSHHTFVLEYGEADGARGFHVDDSEVTLNICLGKHFTGADMYFRGIRCGNHVNSGTHDEEYFVHPNVPGQVLLHHGSHRHGVFSVTSGRRVNMVMWCKSSVFREMKKFMTDFSGFCCECQFQRTARQARISISGQESEDETP

SEQ ID NO: 116669 - protein, 103 aa, Oryza sativa
  Clone ID: PAT_MRT4530_20148C.1.pep
MAAMAACRCSSRLSLQLPPPCLLIVLVAAAAMVAAAATGARAAWVDYPSGVPCGETIPVEQCDPGDAAANSACMDVCHYGGCRRGGECVSLGFGRGRGCHCKC

SEQ ID NO: 116670 - protein, 154 aa, Oryza sativa
  unsure (1)..(154): unsure at all Xaa locations
  Clone ID: PAT_MRT4530_20149C.1.pep
AMRRIVDSLMHQSXGEGALDRAINSSFLVSADMAHALHPNYPDKHEEHHRPELQKGLVIKHNANQRYATSAVTAFLFKEIARHHNLPVLXFXVRNDMGCGSTXGPIXASGXGXRTVDCGIPQLXMHSVREMCGXEDVDTTYRHFKAFSEMFSDI

SEQ ID NO: 116671 - protein, 263 aa, Oryza sativa
  unsure (1)..(263): unsure at all Xaa locations
  Clone ID: PAT_MRT4530_2014C.1.pep
QRGVKQGDPISPLMFVLAADLLQSMIKKAHKGIFTMPITKPDGKFPVIQYVDEXTIQKEIFCQKGILQSFAQSTGLKINYHKSYMIPINVPKEDKEILAGTFGCKTGSMPFTYLGLPVGTTKPRIAEFAPLIDRVERKLPXALITMFLNHGQRLSLVSYVLSSMPTNYMCSLKLPEKVIEHIDRGVRHNLXKXSSNLNVGPQSLAAWDMVCKPKNKGGLGIINLEYQNIALLMKHCDKFYDKKDLSXLRLIWNKYYHSGEPHQ

SEQ ID NO: 116672 - protein, 195 aa, Oryza sativa
  unsure (1)..(195): unsure at all Xaa locations
  Clone ID: PAT_MRT4530_20150C.1.pep
MAPAVQPPPSPPPPRRPRSGPPPGLKNLGNTCYLNSVLQCLASTPPLATFCLSFRHSNLCKKVLPNKDKECVFCVVERQISRLLRTEAGALDSPAKIIRCLPLFAEHFRWGRQEDAHEFLRYIIDACHTAGLRIRKRLPASNANGDAGEEGGPVQGPYMVMKETFGGALLSQVKCLTCXGESNXTDEXMDISLDL

SEQ ID NO: 116673 - protein, 429 aa, Oryza sativa
  Clone ID: PAT_MRT4530_20151C.1.pep
MSHQSDTSSSSNDSEDSNIIHPASIYSMEEFIAEQSIVDNFLQRIIVKIEAKIEAQKASTSHPRSGERKYVKRNREEGHRRLVEDYFSKDPIYSDKQFRARRDAINRQGLSPLQKCTIAIRALACGTLGDAIDEYVDTGISTALECLDWFVEGVIDNFGEEYLRSPTSEDMQHILQMNEARGFPGMLGSIGCMHWEWKDCPGICTSLKIQSTVIDSTMILEAVASNDSWIWHAFFGAIGSNNEITILGQPQLFTELLKGQAAHVQFSVNRRQYNTGYYLADGIYPEGNVFVKTVTLPQSEKDQLFARHQEGARKDVQEAFGLLQSRFAIVRGPTRFFQQETLVKIMQACIILHNMTVEDEKDMGSSCFDSDEILGTLAVLLSDINTVPAGCYAEVVRRNASVCAQPTHAQLRRDLMEHIWQRFGPFGNK

SEQ ID NO: 116674 - protein, 636 aa, Oryza sativa
  Clone ID: PAT_MRT4530_20152C.1.pep
SSTPPPPRRPRSGPPPGLKNLGNTCYLNSVLQCLASTPPLATFCLSFRQCDRMRCWRRRRRCRVFCVVERQISRLLRTEAGALDSPAKIIRCLPLFAEHFRWGRQEDAHEFLRYIIDACHTAGLRIRKRLPASNANGDAGEEEVRVQGPYMVMKETFGGALLSQVKCLTCKGESNKTDEIMDISLDLPGSNSVADALARFFQPEILEGSNKYSCERCKKLTSARKQLFVLRAPKVLVIQLKRFEGINGGKINRNIEFKETLFLSDFMYNKNQDSLPVYNLFGSIVHSGFSPDSGHYYAYVKDAIGRWYCCNDSHISPSSSQDVLSEKVYILFYILSTKTQKPSTNGYSSSAAKSSNSNGNGISNATSNEPLKIPLVKQNGLCSSKGIAPPPLKNGKIAPGMHLKPIHLKNNGTGKVSSNGKASIIPGNKLEVSEGLTLPAVNGRDSGKYAEPGKMNANGSVSCNKTDVNSQRVLPNTNGNGNPIHFSDLQETIDAKATCAEQYSEKSSIASLEDSKNPVSCHEMSAVIVKDVVSSGKDSSSLKHHLEEGKFKEMLAESASSELHLSGWVDDVRNFMHTIKRRRLQNTGTPQDSDTMRKELISESGRIFRSKIPESLREHLIQALRSYYQDKFSLGG

SEQ ID NO: 116675 - protein, 93 aa, Oryza sativa
  Clone ID: PAT_MRT4530_20153C.1.pep
MADASGFATEVTGDEPVRFQYGRAPDLPVRFSAQRSGEEISAPDPSDANERRSGQETGKRMARHGRDRSISQIAGSLHTGDEKDREAHRGARP

SEQ ID NO: 116676 - protein, 83 aa, Oryza sativa
  Clone ID: PAT_MRT4530_20154C.1.pep
AQDNYTCLELHVLWILDYSHSNKAYYMEPYDLGSVAILSNTTRSPHLSSFTDGGSYSKKLIRNLFVKVYMNYQLLVYTLIASV

SEQ ID NO: 116677 - protein, 611 aa, Oryza sativa
  unsure (1)..(611): unsure at all Xaa locations
  Clone ID: PAT_MRT4530_20155C.1.pep
MGGGGGGGGRKDRGEGLGRALTRQRNKAAAAAKERGHALALARRARQPLESVIEVSDIDAVLQRAAEEYLLLGGGGGDVFDEMSLKRVAHSGAGAGAPLRCRDGTVETEEERRWLREEQEALHAGSLKVPRRPPWTPQMTVEELDANEKRAFLEWRRNLARLEENEKLVLTPFEKNIDIWRQLWRVLERSDLLVMVVDARDPLFYRCPDLEVYAQEIDEHKRTLLLVNKADLLPLNVRQRWAEYFKQHDILYLFWSAKAATADLEGKKLSSYXXENWNTADLDTKIYGRDXLLVRLQGEAEYIVNQKGALRAEEGHESSRSDSVSTRPKHVVVGFVGYPNVGKSSTINALVGQKRTGVTSTPGKTKHFQTLVISEELILCDCPGLVFPSFSSSRHEMVACGVLPIDRMTKHRGAIQVVANRVPRNVLEQIYKITLPKPKAYEQLSRPPTAAELLRAYCTSRGHVSHAGLPDETRAARQILKDYLDGKIPHFELPPGDTDSETDPEETTDLEGSDTAVGATADHCASDEQDEEISQADPNISHVLSDLESFDLASEVSKNSTKKKKEASYKHHKKPQRKKDRSWRVGNDGADGSAVVRVFQKPAVNFATVTG

SEQ ID NO: 116678 - protein, 150 aa, Oryza sativa
  Clone ID: PAT_MRT4530_20156C.1.pep
MPPRHHRAASPPAAASPPAAALHLHPPPRCISARRSAASLPIAAPYLLRRPPHLRRRAASLPAAALHLRPSSPKRQPSPAPPQQPSPSPPRSSGLAPRQPPSPAPPFLAPLLLVVPSSSAPPSSSKEVLPMGENAPVLPMGEDAPMLPRA

SEQ ID NO: 116679 - protein, 90 aa, Oryza sativa
  Clone ID: PAT_MRT4530_20157C.1.pep
EFRMRTQDCINRIITLEGMDRLSGVMDDRGKFIYISTEEMKAVADYIRKQGRVSISHLASNSNQFIDLEPKPQYNEESNLDENAAAGTEL

SEQ ID NO: 116680 - protein, 41 aa, Oryza sativa
  Clone ID: PAT_MRT4530_20158C.1.pep
MSLLLSLNDKHLWVMMQQGPKPVRAGAEISRSLSVIEVCAE

SEQ ID NO: 116681 - protein, 124 aa, Oryza sativa
  Clone ID: PAT_MRT4530_20159C.1.pep
RSGPKVQVVFLDTSTMELSCTCKKFETTGILCSHAINALDLKNFDRIPERYVLKRWKKYVRKGTYLFPSDEFVGQDCTEPGLAFRNKAMRFVYDLLMKSKGHQDTRKLIPDVFEKWKKISRKPM

SEQ ID NO: 116682 - protein, 82 aa, Oryza sativa
  unsure (1)..(82): unsure at all Xaa locations
  Clone ID: PAT_MRT4530_2015C.1.pep
MGQGASCGRPSEEVDFFGAAQSDDLARLAADVRSRPSLLGRTTLFDRLSVLHIDAGHGHLQGGIMAVDLXRHPDVVNQPKQT

SEQ ID NO: 116683 - protein, 265 aa, Oryza sativa
  unsure (1)..(265): unsure at all Xaa locations
  Clone ID: PAT_MRT4530_20160C.1.pep
PSIVHLKCSVHETSRKRGSVSGWIPAGEVRKYLNEKVRSCSHDSCKFVGTYEQLREHARTAHLLAKPAHVDLSRKRTWDXLEREQEVGDVISAIRSQNPGAIIVGDYVIETRDAMSPXETTGDESNDEWWRDSIESPDNRYNSPRLLPNEAPESSIIWADERHGLPRFQPQNNRVLPRFSFTNRSSSRSDWHRIRRPSRQSLARRGLLNRPYRNNSDYHGFRPQLFDQPNGSSHRSGINRSLDDPSFVPRRQRLRYTHRSHHIRD

SEQ ID NO: 116684 - protein, 139 aa, Oryza sativa
  unsure (1)..(139): unsure at all Xaa locations
  Clone ID: PAT_MRT4530_20161C.1.pep
SHDGIYTSFQVKRDNTDITSSDTHNNPPPVIXGSITRARALQLNLEVSSFLCSSLYEFENRFLPNDYIVIRNNEEDKETLGEVTRVMEDHRGRPSQGGDPNXSTSSAIWSPGPICTKTDAQVAYVLGLGRSLYDRKLRR

SEQ ID NO: 116685 - protein, 115 aa, Oryza sativa
  Clone ID: PAT_MRT4530_20162C.1.pep
MPHPKPLPRVVVAPTPRRRWRGRGESPSGREEERRGRDAAEEESSSRGKRVEELGGARMKTLLQEYKIRFKNTKKTPTPEGEGVVVAAEPPPPSQGCRMSGRHHIVLREGGGEMF

SEQ ID NO: 116686 - protein, 61 aa, Oryza sativa
  unsure (1)..(61): unsure at all Xaa locations
  Clone ID: PAT_MRT4530_20163C.1.pep
AAGMITPSRSSHKGRSQSGPSPIKYGSSGLGXGSRQRRHQLSPALDPPSRMTGHRPDQTNA

SEQ ID NO: 116687 - protein, 131 aa, Oryza sativa
  Clone ID: PAT_MRT4530_20164C.1.pep
CRRSTTAAASTSTAATSASPLCRRRRRRREQPCPPPPPPSTSPLCDLCRLELKLSFFTARAAAIYTRSVADRANGFHYSRGIYWRRKQAPDTAAAASSRRRCLEAPPAPRLPARSPSPRRAWIGGARCGCH

SEQ ID NO: 116688 - protein, 104 aa, Oryza sativa
  Clone ID: PAT_MRT4530_20165C.1.pep
PSPSEKPKSKKTTRSTVSHQAKTPAITVARKMAKISTPKKPKTKTEQKMGSRNGSRLLRAVESEKKGPCAGRAGVRIARNGADLGGIQAPILVYLFFFFLAKLS

SEQ ID NO: 116689 - protein, 101 aa, Oryza sativa
  Clone ID: PAT_MRT4530_20166C.1.pep
KPSLSNDTPVKKWLSLPTMLVGEQQRARPTATRFPDPPVPSLIQNHGQMLLTNPGSKLSCRPDCTFPFPSDFGKSFLICCPPAVHATSMYIIFFQEKNTVS

SEQ ID NO: 116690 - protein, 384 aa, Oryza sativa
  Clone ID: PAT_MRT4530_20167C.1.pep
MGISSKWFKSLVGIRKQEKARNAEKQEKAQNAESCETSTPAAQLLHKRKHSLDTERAILVEELAVQSEPLTDDTNTQTVSDSISSDSTLLGVHISQTEEHKTKEDVAATLIQSAFRAFLARRALRALKGIVILQALVRGHIIRKQTSETLQCMQALVRAQARVRARQVRVSLENQVARKKVPEQDDHENHVREIEERWCGSIGSVEELQAKVLKRQEAAAKRERAMAYALTHQRQAGSRQQKPTTPQGLELDDSHWGSNWLERWMAVRPWENRLLDSNTKETMPLCDDKQDMETKSQITPKGKVQVSSALSNGSNKKKGINRKKSSRSQREMLLTNPGSKLSCRPDCTFPFPSDFGKSFLICCPPAVHATSMYIIFFQEKNTVS

SEQ ID NO: 116691 - protein, 109 aa, Oryza sativa
  Clone ID: PAT_MRT4530_20168C.1.pep
RRTKGFAKPAAQREGLVVPCVNDGAQPVSEEEEEPLWMNKERSCKALPKNIIAAFSRCRTSKAKVPETCSPDRSTEEEANPRLISRVLRGGGGSTYIEISGRMHNLHST

SEQ ID NO: 116692 - protein, 270 aa, Oryza sativa
  Clone ID: PAT_MRT4530_20169C.1.pep
MTQINNARHVIMCLLLCFGVGGGSEAGCGAGLGTIAFDADDPELHAIPTTYQVILAKYHVKPVRYQAIPTTYQVKLVRYQEPGIAGGPTVHVSCRSLSGGGILHGTCHVGAHRRRLRPPSSTPHAGASRQRAASSTIHITSELITSGRVACVLRHLRLTLELVTSGSILHPTPKLVAVVASSVIHAPHRSSSQTAASSSVHAKSELVSGGRVLLAPRLSTPATAPFPTVATTHVHQLRCRARAAPQRGTSLRFCDGGQAPRVAAILNWHE

SEQ ID NO: 116693 - protein, 177 aa, Oryza sativa
  Clone ID: PAT_MRT4530_2016C.1.pep
MAISPCSQPVLLRFAVYPERCQPLPMFTNDTTISYAYEDFEWPEDLRIDDLNNEFYLEHKKNFISAISPFILPTGVSQCRFTQNSYEFYHPMSTPRINHFSSIPPSVQDDGQPPSNISKSGQSIAYADATTLVENELTLAPSIIGQNAPSAESLLQDQTVVEIAPAAPKPKQTTKKT

SEQ ID NO: 116694 - protein, 229 aa, Oryza sativa
  Clone ID: PAT_MRT4530_20170C.1.pep
MALTDFSNFCGLVKFYGESLTAGLKPIIGADIYVRSDPTSEDIFELTLLAKNNQGFHNITVLLSRAYQQGYVEFPIVEKAWLAELNEGIIVLSGGRSGDVGKALLKENEQEAATLVAFYQQYFADHYYLSLCRTGRSDEERYLQQAVQFAKKYQLPLVAVNDVVFLKEDDFDAHEIRVAIHDSYTLDDPKRPQKYSPQQYFRSEEEMCALFADLPQALMNSIQIAMRCN

SEQ ID NO: 116695 - protein, 202 aa, Oryza sativa
  Clone ID: PAT_MRT4530_20171C.1.pep
MAAVREPREEAAVGEGEGEEEGRWGGLLPELVEEVVRRVEASGGERWPARKDLVSCACVCRRWREAAAAVVRPLPESGRITFPSSLKQPGPKDFPIQCFVKRNKKKSMFYLYLGLLNVASVKNFQLVATADPSHPDSVGDEETVILQFGKVDSNIFTMDYRQPLSAFQAFAICLSSFGTRRANARTCAVDASSTDPPANRRS

SEQ ID NO: 116696 - protein, 183 aa, Oryza sativa
  Clone ID: PAT_MRT4530_20172C.1.pep
MRRRDPRPAPPARRKRGGGGKGGLGTTEHAAHRRCDLPQVGHVIARHRVERKRNKFWVSVLANFVEELLYVPVDRIPHAEWVSLFMRNFLHRLLNKPNAYCVLPCDHRRTELEADRIGLMLQAAAGYDPRANPNFWEALMKFGNGEGTTHPPLQRRAAEVRQEKVMGEALEVFREAVQRHVHA

SEQ ID NO: 116697 - protein, 1346 aa, Oryza sativa
  Clone ID: PAT_MRT4530_20173C.1.pep
MNNFHVYEAIGRGKHSTVYKGRKKKSIEYFAVKSVDKSQRSKVLNEVRMLHSLDHPNVLKFYSWYETSAHFWLILEYCVGGDLKGLLEQDKKLPENSIHDLAYDLVKALQFLHSQGIIYCDLKPSNVLLDESGCMKLCDFGLARRLKDIEKTNPGDVPQPLKGTPCYMAPELFQEGGVHSYASDFWALGCVLYECYSGRPPFVANEFTQLVKSIISDPTPPLPDNPSRSFQNLINCLLMKDPAERLQWSELCEHHFWRSRMSIIPLPPQPAFDNMVDLSATPYLVERNGDKPSRQSTPPKPRDGLRKKDENSAKVFTPVKNMLSGKKNNAKPSCKADGLKGVNILRMSRVAKRNLQREKDKENYRRHPTEASENDTEVKIENNDMELDFGENPEGDAPDDNDGSDNPGSAEDEKLSTQGTDGNEENCMSNQMDMLTDEGPVKAETMIKTEHNCSENLDVVATPPSICMRKAQRAKTTSGAAAGSEPSDISAAFWHPTDLAVKPVMPGRKGDKAVETVPMLPFEALPAVDYIKLPREQMNAFNSQILQSLSGTFQVSEKQNIIKYLEMLSINSDAANIITNGPIMLLLIKMLRLSKTSVLRVQIASLMGLLIRYSTILDIELASSGIFNALSDGLRDKHDKLRRFCMATLGELLFYISTQSDQDTKEINAQESPLKDNRATASWQVPSSVIALVSSILRKGEDDLAQLYALRTIDNICSQGTDWTSRFASQDVISHLCYIYRATGKQENTRLIAGSCLARLARFSSSCIHLILERLAFKDIACTLIKGNSREQQISLNLLNSALVNSQIIPTMNRYIQSLTEEKQLVPGLISLIEQGTDVLRGKTLLFVALLCKNSRRWLPHFFCNAKLLSAVDRLGKEKEGFIHQCTEAFVQLVASLVPGILDTVSSDIQQVMGGKRHGAATALTGRAHPKSIIHLFPVILHLLGSVSFNHRVVTSHVLLQLANLMKILEAPFQARDDFQMTLLRVLEAATEEPSVILNEHKIFTSRILPSLSVLYKGNKDGDARFLCLKILSDVMIVIFSDSSLTSNEQTVSDLEKISQKYFLPMYPSFAEDEDPIPIYAQKLLVMLMEHDYVKVSDILNEATVSRCFEFLLGDLSNANVSNVKLCFALASAPDMDTDILSQLQVVRRIGNLLEFVTAKDMDDFLEPTLELCRAFIIRGISSDKIVALSKEPALLVDSAFSMSIAVDQQSCVMDICDFGGNMGIFLDLVGSSDPHISDLASDCLVLLLKAAPREATVGLLTNLPKLSVVLDLLKHGTCLRLTRLLYCLAFSCRQYLAQGMIVSISLSALMRVEALVSAFKGSHDGCLADAASYLGAELQRLPRCG

SEQ ID NO: 116698 - protein, 116 aa, Oryza sativa
  Clone ID: PAT_MRT4530_20174C.1.pep
GGGAPFWGFRAPLAPFRPPGGDARGHPLFFFFPPEGAHPLLPLTPFFFSAQKGGLFFLRPNPLVSFAVFTRVFCFFGGAPTAVVFYSPGKFAFPFFFPRFFRWGVFPFTFLGLITL

SEQ ID NO: 116699 - protein, 73 aa, Oryza sativa
  Clone ID: PAT_MRT4530_20175C.1.pep
NRNWDGVSVSTYEEAKAAYNVQRRRCKELEGIVPRLKGEDLRGLDVKVLEELQNFHVEALSKICQEKMANQVL

SEQ ID NO: 116700 - protein, 173 aa, Oryza sativa
  unsure (1)..(173): unsure at all Xaa locations
  Clone ID: PAT_MRT4530_20176C.1.pep
GSQSTQIPSSVGSVENTTLMTPAPSVPNMAAPPAPSSPPICTTPPGSPLPQISPLRGPSPPPQQAAPNSPTLLPRXPSPAPQSYLAPPLDEHVPPPKPDTSKEQPTTCEASDEVPKEYEYGKPFLPYNFMCELPWPMRLMHDWYLRASELDLGMITVHVPEGTFKDGPNAHFA

SEQ ID NO: 116701 - protein, 41 aa, Oryza sativa
  unsure (1)..(41): unsure at all Xaa locations
  Clone ID: PAT_MRT4530_20177C.1.pep
FNLELLLKKKKKKKKIKNKNXNIKKKKNIKKKKKKKKKKKK

SEQ ID NO: 116702 - protein, 68 aa, Oryza sativa
  Clone ID: PAT_MRT4530_20178C.1.pep
STHLVSKRKTPPRNLLVWFWWERLSFHHAGTVCAKVPTMRGEALLTAGPGPLERLFRPTVVSFDVVAI

SEQ ID NO: 116703 - protein, 223 aa, Oryza sativa
  Clone ID: PAT_MRT4530_20179C.1.pep
MRSTTFLRLGFRQVSSLLFHGPSSPAPTVGLALGVGRGALVRLRCSAAEAGDDGGRKVSARLALTQQVLRDAEERAASAGSDPAPKITLDHVTLNFARSGGAGGQNVNKVNTKVDMRFNVKEAQWLGERIKERILQTEKNRINKDGELVISSTKTRTQKGNIEDALQKIQAIIDAASYVPPPPSEEQKKKVEKIAAAAERKRLQKKKVLSQKKEFRRNRTSWD

SEQ ID NO: 116704 - protein, 90 aa, Oryza sativa
  unsure (1)..(90): unsure at all Xaa locations
  Clone ID: PAT_MRT4530_2017C.1.pep
ESCDTRCRSPTTRGEAHRVHSPVFLTNWSLXKTYFETSPYQKLYPKIGHRLSAXGAEVVLICANGTGANIMPAWRARRDVAGPQRQCTWR

SEQ ID NO: 116705 - protein, 288 aa, Oryza sativa
  unsure (1)..(288): unsure at all Xaa locations
  Clone ID: PAT_MRT4530_20180C.1.pep
MSGKTAPVGTEPTVNKPNGQDSSVGHRTDVTNKPQHEEDAGKVPASSGESWRTPSDPFELELAQLQYERPEDDPDYIPIEQAMATRRRSKRSAVRVEPDSDTATSGPPRTDTTTSGGACPKKKRGEKGRNLMPKETYYIAALDNDGKPVEPEHVRAKFSTTCGALARLHGPLNVDKWKHISIHIKNLMWEGLQEHLIYPPGSDALGRKFALQTIAHRWRQWKSDMNTNYVKKNKIPFEEWGTVSAAEWDKFVPKMTTPQALERRKKMSDLAKKXHISTQNFGGSDRRG

SEQ ID NO: 116706 - protein, 833 aa, Oryza sativa
  Clone ID: PAT_MRT4530_20181C.1.pep
MAMDHWRWFPKDTFEVSSTCVRKVLNCSIVRTRIEDVGQDSSGRHRTDGTNNPPHEEAAGKVPASSEESWRTPRDPFELELAQLQYERPEDDPDYIPIGQAGPQQTETTTSGGACPKKKRGEKGRNLMLKETYYIAALNNDGKPVEPQHVRAKFSTACGTLARLHGPINMDDWKHVSIHIKNLMWEGLQEHLIYPPGSEALGRKFALQTIAHYWRQWKSDMNTHYVQKNKTTFEEWGTISAVEWDKFVAKMTTPEALERSKKMSDLAKKNIYPHRLGSSGYAGHEKKWRATEEKFAAEGKPLIVHPLNKRTRNWVWERTSGQVTEEGEMLLDCPDIQNVTTSLQQIVQKENTREFVPRQQHDELTEALETAEHSGRVRGQSCRTDWMVARVNGDQMSLEIDIATPEGIELLGDAVNQFILWHRRDIILTGQFTLTTPSPSVPNTAAPPAPLSPLICTTLPGSPLPQISPLRGPSPPPQQAAPNSPTPLPRQPSLAPQSYLAPPLDERVPPPQPDTSKEQPNTCEARKLILVMVSTYNKEKMAEYETRMVLQSFKGRGGPLKPVGPNQYSAAQKSVVGLADKMQSWTSDEVPKEYEYGKPFLPFNLMCEFPWPMRLMHEWYLRASELGLGMITVHVPEDAFKDGPNANFTFTFKDLHAFFKMDKMDINLVGAWCLEHYILFLVYPMDQTIIVLDPADYDKDAHMEFLCLLNIAHGRYKKRGGYVKNPSREKLYIRGRWPCYKRPSLTNLCSYYVCKMLRVNGRYRTEFTDLPSILYSASRFDQKTLINLCADLCRFIRRDICNHLGEFHDPHSELATDPKFKNLREWEREHAVD

SEQ ID NO: 116707 - protein, 102 aa, Oryza sativa
  unsure (1)..(102): unsure at all Xaa locations
  Clone ID: PAT_MRT4530_20182C.1.pep
MAPYVMAASVTTVAPLQGLKFTGGMPVDRRSGNFSFGNVSNGRRIKCMQVWPIEGIKKFETLSYLTPLTVEDLLKQIXYLLRSKWAPWLEFNKVCLDYRENH

SEQ ID NO: 116708 - protein, 42 aa, Oryza sativa
  Clone ID: PAT_MRT4530_20183C.1.pep
LALVSASPVRCETCFYGGKRKGKTLFGFEYGNLLNWRSGPIY

SEQ ID NO: 116709 - protein, 607 aa, Oryza sativa
  Clone ID: PAT_MRT4530_20184C.1.pep
MASRHRSKRNAIRAERESDTATSGPQPMDTTTSRGACPKKKRGERSKNLMPKETYYIAALNNDGKLVEPQNVRAKFSTACGTLARLHAPLNVDDWKNVSIHIKNLMWEVEWDKFVAKMTTPKALEKRKKMSDLAKKNIYQHRLGSSGYACHEKKWRATEEKFAAEGKPLIVQPLNKRTRNWPSPAPQSYLAPPLDEHVPPPKPDTSKEQPTTCEACKLIPVMVSTYNKEKMVEYEMRMVLQSFNGRGGPLKPVGPDQYSDAQKSVVALANKMQSWTSDEVPKEYEYGKPFLPYNFMCELPWPMRLMHDWYLRASELDLGMITVHVPEGTFKDGPNAHFAISFNDLHAFFKMDKMDINLVGTWCLSQWVDAQRTEASIGYVNPTMVCETAHTVRISEDSAVLKNKTHQEKKDYIERLHKRKMAEVGNYLATSFRAHSDKRVIMIPYHFGDHYILFLVYPTDQTVVVLDPADYDKDAYMEFLCFLNLAHGRYKKRGGYVKNPSREKLYVRGRWPCYKQPSLTNLCDYCVCEMPRVSGRYETEFTDLPSITYNASRFDQKTLINLCTDLRRFIHRDICNHLGEFHDPHSELATDPKFKNLREWEREHAVD

SEQ ID NO: 116710 - protein, 64 aa, Oryza sativa
  unsure (1)..(64): unsure at all Xaa locations
  Clone ID: PAT_MRT4530_20185C.1.pep
SALAPICKVCSAAKPKTTKAKYATWSCKFCTLENSTKIDKCSACDQWRXFTXGPPAATYCPSYD

SEQ ID NO: 116711 - protein, 261 aa, Oryza sativa
  unsure (1)..(261): unsure at all Xaa locations
  Clone ID: PAT_MRT4530_20186C.1.pep
FGSSYLYESSSLHGFFIPISSRHYTYNRKQKSLGLLCTNFLSLYNRDTVHLIGLDDAATRLGVERRRIYDIVNVLESIGVLSRKAKNQYTWRGFAAIPLTLQDLKEEGLKENSNSLRGPGNHDKVSDDEDDEETQSNPAATGSQSDKLNPNSTLPKPLKNENRREKSLALLTQNFVKLFVCSNVELISLDEAAKLLLGDAHNTSVMRTKVRRLYDIANVLSXMNLIEKTHTMDTRKPAFRWLXSEGKTWDETLHISNLNDS

SEQ ID NO: 116712 - protein, 630 aa, Oryza sativa
  Clone ID: PAT_MRT4530_20187C.1.pep
MRQEITDQVTQQVTQQFYSLAAQHPQAFPDLVPHGSQSTQIPSSVESVENTTYPVDSITGPTPCNLVVPIGRAGKTKEVASGLAISGRQFHNSSILVDYARVQVARVHGDQMSLELDIPTPEGIELLGDAVNQFILWHRRDIILTGQFTLMTPAPLVPITAAPPAPPSPPICTTPPGSPLPQISPVRGPSPPPQQVAPNSPTTLPRQPSPAPQSYLVPPLDEHVPPPQPDTSKEQPKTCEARKLIPVIVSTYTKEKMAEYETRMVLQSFKGRGGPLKPVGPDQYSDAQKSVVGLADKMQSWTSDEVPKEYEYGKPFLPFNLMCELPWPMRLMHEWYLRASELGLGMITVHVPGGAFKDGPNANFAFSFKDLHAFLKMDKMDINLVGAWCLSQWVDAQKTGASIGYVNPTMVCETAHTVRISEDSAVLKNKTPQEEKDYIERLHKRKMAEVGNYLATSSLAHSDKQVIMVPYHFGEHYILFFVYPTDQTVVVLDPADHDKDAYMEFLCLLNLAHGRYKKHGGYVKNPSREKLYIRGHWPQPSLTNLCGYYVCEMLRVNGRYRTEFTYLPSIPYSASWFDQRTLINLCADLCRFIRRNICNHLGEFHDPHSVLATDPKFKNLREWERQHAVD

SEQ ID NO: 116713 - protein, 496 aa, Oryza sativa
  unsure (1)..(496): unsure at all Xaa locations
  Clone ID: PAT_MRT4530_20188C.1.pep
MHMAPTSAPCLAAAAASLPPPPPPPLPLPLPSPPICTTPPGSPLPQISPLRGPSPPPQQATPNSPTPLPXQPSPTPQSYLTPPLDEHVPPPQPDTSKGQPNTCEARKLIPIMVSTYNKEKMAEYETRMVLQSFKGRGGPVKPVGPDQYSNAXKSVVGLANKMQSWSSDEVPKEYEYGKPFLPFNLMCELPWPMRLMHQSYLRASELGLGMITVHVPEDAFKDGPNANFAFTFKDLHAFFKMDKMDINLVGAWCLXAFHDAQRTGASIGYVNPTMVCETAHTMRISEDSAVLKNKTHREKKDYIERLHKRKMAEVGNYLATSFLAHSDKXVIMVPYHFGEHYILFLVYPTDQTIVVLDPADYGKDAYMEFLCLLNLAHGRYKKRGGYVKNPSREKLYIRGRWPCYKQPSLTNLCGYYMCEMLRVNGRYKTEFTDVSHIPYSGSQFDQKTLINLCADLCRFIRRDICNHPGEFYDPHSKLATDPKFKNLREWEREHAV

SEQ ID NO: 116714 - protein, 53 aa, Oryza sativa
  Clone ID: PAT_MRT4530_20189C.1.pep
DQITLINLCTDLCRYIRRDICNHLGEFHDPHSELATDPKFKNLREWERQHAVD

SEQ ID NO: 116715 - protein, 178 aa, Oryza sativa
  unsure (1)..(178): unsure at all Xaa locations
  Clone ID: PAT_MRT4530_2018C.1.pep
SXXWPXAYLCWHSSVIPFSQSDLSDASSQGATKMKGKARMDSIXTLNRTNNHNKIHLEGTRRLQSNEIDQSPGTLHRHWASFPYRISDHDMHAHAHHEVSDLVARDSCHLLVAHASSMPLRPPCPRRRSVPHTTSRAVAXLAIRXPTSVVAAAATPRVVRTGXSGSNVQACXSKTXXA

SEQ ID NO: 116716 - protein, 220 aa, Oryza sativa
  unsure (1)..(220): unsure at all Xaa locations
  Clone ID: PAT_MRT4530_20190C.1.pep
MSWASVPMPPPPPLTSPSPVSSSILNCIKRYILFPSLPRLLQPTCTFVLAPATKKHPGLLPSSSETEPGFPSSPGTTLNMQPAPPLTSPSPATSSRPNPPSPPTPVAXRPPRRRSPPRRCPPPRRPPPPPRPPPRRPPPQVRPPRHPPSPPRHPAKATPPPASSSPPRHTPXPPPPELAHPARSPAPPPXPRRPPHPHRIHSSPVSPPLRIPQPLVSDGH

SEQ ID NO: 116717 - protein, 129 aa, Oryza sativa
  Clone ID: PAT_MRT4530_20191C.1.pep
MNIFFGFALLGIVACNGSAQFDALRHSSTRYQLRSDLLLQQQALSPWSELVRRQHSILATPFWRPATFQLINNQFMKQQCCRQLRLLAQQSHYQRINIIQEIVQQLQLQQGGGGYFDRTPAQSSRFAGL

SEQ ID NO: 116718 - protein, 207 aa, Oryza sativa
  unsure (1)..(207): unsure at all Xaa locations
  Clone ID: PAT_MRT4530_20192C.1.pep
ASVPMPPPPPLTSPSPVSSSILNCIKRYILFPSLPRLLQPTCTFAPAPATKKHPGLLPSSSETEPGFPSSPGTTLNMPPPPPLTSPSPATSRPNRASRPNPPSPPTPAAAXPPRRRSPPRRRSPPRRPPPPPRPPPRRPPPQVRPPRHPPSPPRHPAKATPPPASSSPPRRTPXPPPPELAHLPRSPAPPPTCAVRVILSLRVRSAS

SEQ ID NO: 116719 - protein, 148 aa, Oryza sativa
  Clone ID: PAT_MRT4530_20193C.1.pep
MASKRILKELKDLQKDPPTSCSAGPVGEDMFHWQATIMGPADSPYAGGVFLVSIHFPPDYPFKPPKVAFKTKVFHPNINSNGSICLDILKEQWSPALTVSKVLLSICSLLTDPNPDDPLVPEIAHMYKTDRAKYESTARGWTQKYAMG

SEQ ID NO: 116720 - protein, 241 aa, Oryza sativa
  Clone ID: PAT_MRT4530_20194C.1.pep
MAANLEDVPSMELMTELLRRMKCSSKPDKRVILVGPPGCGKGTQSPLIKDEFCLCHLATGDMLRAAVAAKTPLGIKAKEAMDKGELVSDDLVVGIIDEAMKKTSCQKGFILDGFPRTVVQAQKLDEMLAKQGTKIDKVLNFAIDDAILEERITGRWIHPSSGRSYHTKFAPPKTPGLDDVTGEPLIQRKDDTAAVLKSRLEAFHVQTKPVIDYYTKKGIVANLHAEKPPKEVTVEVQKALS

SEQ ID NO: 116721 - protein, 45 aa, Oryza sativa
  Clone ID: PAT_MRT4530_20195C.1.pep
DAMTLQEASIIQSAALTAWRALYDNCRSAAMPPVKELRKSHSNTS

SEQ ID NO: 116722 - protein, 87 aa, Oryza sativa
  Clone ID: PAT_MRT4530_20196C.1.pep
GVKRLGLLSKAEELEVLLGATDRGTPGALLGVALLLLPPGPPVVYLVPGGYPWEVPVQAVVAFAWVVGGSTAFAASSLVSKLQSWSS

SEQ ID NO: 116723 - protein, 51 aa, Oryza sativa
  Clone ID: PAT_MRT4530_20197C.1.pep
GNDLVWEEQRRLLYTTAFGGGSSSGDSIQRWIRRLLVLALSPPLLPPPLPP

SEQ ID NO: 116724 - protein, 173 aa, Oryza sativa
  unsure (1)..(173): unsure at all Xaa locations
  Clone ID: PAT_MRT4530_20198C.1.pep
YNLLGKGGFGKVYKGVLEGGIEVAVKRLSKGSGQGVEEFRNEVVLIAKLQHRNLVRLLGCCIHEDEKLLIYEYLPNRSLDAFLFDANRKNTLDWPTRFKIIKGVARGLLYLHQDSRLTIIHRDLKTSNILLDTEMSPKISDFRMARIFGGNEQQANTNXVVGTYGYMSPEYAF

SEQ ID NO: 116725 - protein, 786 aa, Oryza sativa
  unsure (1)..(786): unsure at all Xaa locations
  Clone ID: PAT_MRT4530_20199C.1.pep
MAAYLAVFVFLLLVCSSCRADDKLTPARPLSPGDELISSGGVFALGFFSLTNSTSDLYVGVWYNQIPVHTYVWVANRNTPIKKSSSVKLVLTNDSDLVLSDSNGGGGGGAVWTTANSNNVAAAGGGAGATAVLLDSGNFVVRLPNGSEVWRSFDHPTDTIVPNVSFSLSYMANSLDRIVAWRGPNDPSAGDFTMGGDSSSDLQIVVWNGTRPYWRRAAWTGASIFGVIQTNTSFKLYQTIDGDMADGYSFKLTVADGSPPMRMTLDYTGELTFQSWDGNTSSWTVFSRFPTGCDKYASCGPFGYCDGIGATXLPTCKCLDGFVPVDSSHDVSRGCRRKEEEVECVAGGGGDGFLTMPSMRTPDKFLYXNNKTKSTVLKIVLPVAAGLLLILGGICLVRKSREAFLSGNQPSKKVQSKYPFQHMNDSNEVGSENVELSSVDLDSVLTATNNFSDYNLLGKGGFGKVYKGVLEGGIEVAVKRLSKGSGQGVEEFRNEVVLIAKLQHRNLVRLLGCCIHEDEKLLIYEYLPNRSLDAFLFGILMMSDNKFHSTLILEDANRKNTLDWPTRFKIIKGVARGLLYLHQDSRLTIIHRDLKTSNILLDTEMSPKISDFGMARIFGGNEQQANTTRVVGTYGYMSPEYALDGYFSVKSDTYSFGVILLEVVSGLKISSAHLKVDCSNLIAYAWSLWKDGNARDFVDSSIVESCPLHEVLRCIHLGLLCIQDQPSARPLMSSIVFMLENETAVLPAPKEPIYFTRREYGTDEDTRDSMRSRSLNHMSKTAEDGR

SEQ ID NO: 116726 - protein, 456 aa, Oryza sativa
  Clone ID: PAT_MRT4530_2019C.1.pep
CSQAAAEAAAVADAAAKAAAAAAAEDSAAATRTQLGRLALVVVGFAFALGAVWLASAFRIASAVDHCLAVKVHWLADPMCRDTVVFAAPLAVASLILMAAAVHRQVKAEAEAGAQIREAAGVTHDVLPDPELQPPLPPPPQPAVALASGLERRLLLCGSDEVVMLTIISIYLCCVTFILVGMLLRMFGALFLVYYPGDELEIALLMGVGSGFKNVGYLWLAVGHFFLIIPYAVLRLRRFLNQFVSIFVMHVANRVLDQRQYRIADLNAAAFQFVRLLVILSSCRCCHRHCLLLADSPAYCACAKSNCTIAVAFLAMLGMAVCAEVKADAEEEAQIIRVAAGLCRPDVALPAGPDHLGRRGCDAAVVFFISAMYPYCVAFILMGKLLRTIGVFGRVPGGGGDEGITRLMNLGSDFENMGYLWLALGHFFLVAPYAALRLRRFIKEEELVTMHEVEQL

SEQ ID NO: 116727 - protein, 81 aa, Oryza sativa
  Clone ID: PAT_MRT4530_201C.1.pep
MAVVQLGRGETCREVGPDRRWQRPEVRNAIKTLHGLKPFPQLNGWVVKHSSNSCENGLPNMPFIYLRGRVSPSIRGRRAAF

SEQ ID NO: 116728 - protein, 134 aa, Oryza sativa
  Clone ID: PAT_MRT4530_20200C.1.pep
MVVEGNGRADSITIGVCVMEKKVFCSPMEQILERLRAFGEFEIIIFGDKVILEDPIEMYVMTTQVIDNLIIVLFKYRFIHTTSVVFFYGINVVHAWLWPKCDCLIAFYSSGFPLKKAEAYAALRSIPDISLDMS

SEQ ID NO: 116729 - protein, 355 aa, Oryza sativa
  unsure (1)..(355): unsure at all Xaa locations
  Clone ID: PAT_MRT4530_20201C.1.pep
MCVQGDSGLVLTTDPKPRLRWTVELHERFVDAVTQLGGPDKATPKTIMRVMGVKGLTLYHLKSHLQKFRLGKQPHKEFSEHSVKEAAAMEMQRNAASSSGIMGRSMNHDRNVNDAIRMQMEVQRRLHEQLEVQKHLQMRIEAQGKYMQSILEKAYQTLAAGDVAAAVACGPAGYKSLGNHQAAVLDVCSMGFPSLQDLHMYGGAGGGHLDLQQQQPPASTMESFFACGDGGGSLGKTAAKTRHYGGAGKSPMMWGVDDDDDDDDPAGKCGGGGHHQLQMXPPPMMDGGIDVMDSLAADVYETKPIMSGDSTGSKGGGYDVAAAASKLERPSPRRPPQLGSPSVMAGAQTRNLSYG

SEQ ID NO: 116730 - protein, 55 aa, Oryza sativa
  Clone ID: PAT_MRT4530_20202C.1.pep
KYYSYLDLFIYVDFAIHGMIYNDIIYIFNLFHNLHDYLEGMQIINNNVSFPFLII

SEQ ID NO: 116731 - protein, 590 aa, Oryza sativa
  unsure (1)..(590): unsure at all Xaa locations
  Clone ID: PAT_MRT4530_20203C.1.pep
MATREHELRPEQERLGEDREEYEDGEEEEEEGEEGWDDWESDGDDAGGGGGGGGLLCLFCSARFDSESSLFSHCASEHRFDFYRVVKETGMDFYGCIKLINFVRSKVAENKCWSCGQVFSSNSELCGHLHALEIPQLEGKVPWGDDVYLKPFLEDDSLLHSLSVFDDDDEDDCGMPMEKGGCSAGNGSLAETCESNLKSIINDGSDVIDRFERTCTIESTDGECSGSLAQEPSDKQLKIARASAAARGIKSVDESYFGSYSSFGIHREMLGDKVRTEAYRDALLGNPSLMNGATVLDVGCGTGILSLFAAKAGASRVIAVDGSAKMVSVATEVAKSNGFLYDENMEMQQKRDTQVITVVHTKAEELNHKIQVPSNKFDVLVSEWMGYCLLYESMLSSVLYARDHFLKPGGAILPDTATIFGAGFGKGGTSLPFWENVYGFDMSCIGKEVTGNSARFPVVDILASEDIVTETAVLNSFDLATMKENEMDFTSSFELRLSESGVSQSGVTWCYGIILWFDTGFTNRFCKEKPVNLSTSPFSTPTHWSQTIFTFEEPIAMAKEESAVVSSASVGTDECPSCXIRSRISIVRAS

SEQ ID NO: 116732 - protein, 108 aa, Oryza sativa
  Clone ID: PAT_MRT4530_20204C.1.pep
SLVVQLRWTISEQFVDEKVQWMHVDMAGRFGTTKARSHRIRRVHIGGVGPHQLVLEQILAQSVSIIIQARVVKSTPISVFGISQVMSYCSFLFVKRNNTVGVVDQFIL

SEQ ID NO: 116733 - protein, 61 aa, Oryza sativa
  Clone ID: PAT_MRT4530_20205C.1.pep
RLQLRSSTLLKRGNNSKAEYNHHTQQTTQTMQTCKGIQGCLVAICIKAVVKHFIEQNSKNY

SEQ ID NO: 116734 - protein, 453 aa, Oryza sativa
  Clone ID: PAT_MRT4530_20206C.1.pep
MRGVSVVLVLIACWLCGCPVAGEAAFAGDIRVDLTHVDAGKELPKRELIRRAMQRSKARAAALSVVRNGGGFYGSIAQAREREREPGMAVRASGDLEYVLDLAVGTPPQPITALLDTGSDLIWTQCDTCTACLRQPDPLFSPRMSSSYEPMRCAGQLCGDILHHSCVRPDTCTYRYSYGDGTTTLGYYATERFTFASSSGETQSVPLGFGCGTMNVGSLNNASGIVGFGRDPLSLVSQLSIRRFSYCLTPYASSRKSTLQFGSLADVGLYDDATGPVQTTPILQSAQNPTFYYVAFTGVTVGARRLRIPASAFALRPDGSGGVIIDSGTALTLFPVAVLAEVVRAFRSQLRLPFANGSSPDDGVCFAAPAVAAGGGRMARQVAVPRMVFHFQGADLDLPRENYVLEDHRRGHLCVLLGDSGDDGATIGNFVQQDMRVVYDLERETLSFAPVEC

SEQ ID NO: 116735 - protein, 125 aa, Oryza sativa
  unsure (1)..(125): unsure at all Xaa locations
  Clone ID: PAT_MRT4530_20207C.1.pep
LEEGDGPDWWAPPVGDPERGRSGAAWLGLGLRPAQQGGGERKXEWAGGPFEKKRKKRGKRKRKRKRIFPGIKNIACSILIVLADKQLLPFVPKFCMVPRSVVPACLSASRSSKHEPLLPIPSHEL

SEQ ID NO: 116736 - protein, 72 aa, Oryza sativa
  Clone ID: PAT_MRT4530_20208C.1.pep
SCHFTLIGYENNGIYKSLCRYHCLPTINELDSYFWCSFWYVANWLHILQLTVSFAEMHLLYFLCILDCLIVY

SEQ ID NO: 116737 - protein, 57 aa, Oryza sativa
  Clone ID: PAT_MRT4530_20209C.1.pep
LAAARCRPVRALVHGMACSLGVAGVGHSEHGSSQRPVLPWITQEILRLFRGKAKRSP

SEQ ID NO: 116738 - protein, 775 aa, Oryza sativa
  Clone ID: PAT_MRT4530_2020C.1.pep
MASSSPLCCYLLLFVVVVVLTGSCRARDTVVPGRPLAANETLVSGGDANFVLGFFTPPGANSTYVGVWYNKVSVRTVVWVANREDPLPGDVADNPDATLSVSPTGTLAIVAGNSTVVWSVTPAAKLASPTARIMDSGNLVIADGAGGGVAWQGFDYPTDTLLPEMRLGVDYVKGRNRTLTAWKSPSDPSPGPVVMAMDTSGDPQVFIWNGAEKVWRSGPWDGVQFTGVPDTVTYSGFTFSFINNAKEVTYSFQVHNVSIISRLGLNSTGSYGLLQRSTWVEAAGTWNLYWYAPKDQCDEVSPCGANGVCDTNNLPVCSCLRGFTPKSPEAWALRDGRAGCVRSTPLDCQNGTDGFVAVEHAKVPDTERSVVDLGLSLEQCRKACLMNCSCTAYASANVSGGGRGHGAGTGCVMWTTGLTDLRVYPEFGQDLFVRLAAADLGLTSKSNKARVIIAIVVSISSVTFLSVLAGFLVWTRKKKRARKTGSSKWSGGSRSTGRRYEGSSHHDDDLELPIFDLGTIAAATDGFSINNKLGEGGFGPVYKGKLEDGQEIAVKTLSKTSVQGLDEFKNEDSRYRIIHRDLKASNVLLDKEMTPKISDFGMARMFGSEETEINTRKVVGTYGYMSPEYAMDGVFSVKSDVFSFGVLLLEIISGRRNRGVYSYSNHLNLLGHAWSLWNEGKSLELADETMNGSFDSDEVLKCIRVGLLCVQENPDDRPLMSQVLLMLATTDATTLPTPKQPGFAARRILMETDTSSSKPDCSIFDSATVTILEGR

SEQ ID NO: 116739 - protein, 101 aa, Oryza sativa
  unsure (1)..(101): unsure at all Xaa locations
  Clone ID: PAT_MRT4530_20210C.1.pep
MAAEEEASLDDSIYRASVDRTAGRRRLDDVPGNSDEMACDVAGASDALRAPXGGCDRQGDDVQRLGDITSPGXRRRGIEVVAGEARTSRQQVDVSPATDVS

SEQ ID NO: 116740 - protein, 190 aa, Oryza sativa
  unsure (1)..(190): unsure at all Xaa locations
  Clone ID: PAT_MRT4530_20211C.1.pep
MKLSMKRPPYNRTSRMDFSFPGAPELLSLLETWTPRVHEDLSSWSGYCQCEVIEKLCRDASHVLGRGXYVGQSRSAGKVYIHCNIFFMLMEPLPKRREGGRPQKTMTTQWREAILGITMDEVGVEASEDPYAYYQEGDEDDGAQEGSQRWPPAKIGLDWAGPRFGRTSLIAAGCRVSSGRCGLASNDGWR

SEQ ID NO: 116741 - protein, 624 aa, Oryza sativa
  Clone ID: PAT_MRT4530_20212C.1.pep
MEKMQKTQSRKSSSWWWDSHISPKSSKWLSDNLEVMETQIKETLELIEEGEPSAEKAGVLITHVQNFQQMYRVLAKRYGNVTGELRKNIPSSLQSSVSFGISESDSEAQSPSSPERDLQEKMSQKQKPRSDCFDVSIGSGMSSDVSKKGSDGSSSSSESDLELDEAKEENGNSIFYALSQKIIELEDELHEVRGKLDASEEKNMRCHCNFGANSELSEHEEKQQVSDVETSSLQKDLDEVKSEKEALEAVVLVNKDEIDRLKESMVSAAKQFEVELAHRDTEIDKCKQELEVLSEKYLHDISALEAEIGKLQGVIKTFEDDFAKISQEKLMLESRVEELEQSVNSSNYSVSEMVNLQELMKDTQAELEKVSQEKEVLRERVLEFEQLLGDFENSGMEVAKLPETIKNLGAQIEGTLQEKSVLQDRIKELEQAVHDSLQNHSLEKSSLSAELSKLSEANASLEAKLASVEAELKQVYDEKANESLNSEKEISRLNQELANVKTDLELLLSEKSLVDNKVTTLLTDITTRDEKMKQMDDQLNQLQLEHSKLMAQADLARKSLSELHARVCELEKEVEMQKLVISESAEGKREAIRQLCFSLEHYRSGYQELRQLLHDQKRPLVMAT

SEQ ID NO: 116742 - protein, 120 aa, Oryza sativa
  Clone ID: PAT_MRT4530_20213C.1.pep
DFSFPGAPELLSLLETWTPRVHEDLSSWSGYCQCEVIEKLCRDASHVLGRGSCVGQSRSAGKVYIHCSIQGLVRINTEDFRFPKSGVYSLRGRRADGVALDLQKEKRELGRGGPMRGDWK

SEQ ID NO: 116743 - protein, 78 aa, Oryza sativa
  Clone ID: PAT_MRT4530_20214C.1.pep
PFVRNFDQGGCWDLLPMRSVSLELLKVGKDKRALEGGQREKLGTHKRAQERRERRWAGCPQEDEGLGGRVTLHTREEE

SEQ ID NO: 116744 - protein, 192 aa, Oryza sativa
  unsure (1)..(192): unsure at all Xaa locations
  Clone ID: PAT_MRT4530_20215C.1.pep
MKLSMKRPPYNRTSRMECMRMXSSWSGYCQCEVIEKLCRDTSHVLRRGSSVGQSRSAGKVYIHCSESVEEKPLSGLVRINTDDFRFPKSGVHTSVPADVHHLGVGELADLRRDAPVKAVVEEQELVERPLHPPDAXAGCSRRSGCWRAPPPSPSSRRSRRWRYPAMSPPLRSTPATTVTAGSSSAAAHVMPK

SEQ ID NO: 116745 - protein, 130 aa, Oryza sativa
  unsure (1)..(130): unsure at all Xaa locations
  Clone ID: PAT_MRT4530_20216C.1.pep
MKLSMKRXPPYNRTSRMDFSFPGXAPELLSLLETWTPRVHEDLSSWSGYCQCEVIEKLCRDVSHVLGRGSCVGXSRSAGKVYIHCSVSKPNLPLPKRRECGRPQKTITTQWREAILGITMDGGQNCRCLM

SEQ ID NO: 116746 - protein, 85 aa, Oryza sativa
  unsure (1)..(85): unsure at all Xaa locations
  Clone ID: PAT_MRT4530_20217C.1.pep
GVEKKAQRKGWVPMAAKPTLNFRGTPLAGEGSFSRALPPXVQANAYRIPREGAQGPRQTRGDGFGASPPPQTKGPQGVYNGAEPS

SEQ ID NO: 116747 - protein, 569 aa, Oryza sativa
  unsure (1)..(569): unsure at all Xaa locations
  Clone ID: PAT_MRT4530_20218C.1.pep
MEAAAAAARRLAVAAAAVALHPGDRGHRRGALHAEASYXAGRQLLSLKEGGGNGELPDDFEFDIHVDVTFANDRLRRAYVGLQALRQAIYSDPKNFTGGWVGADVCSYFGITCAAALDDPAVTVVAGVDLNGGDIAGYLXAELGLMTDLALFHVNSNRFCGVIPKSFSRXALLHELDVSNRALVGGFPEVVLDMAVLKYLDIRFNDFEGELPPQLFDKGLDAIFLNSNRFVGRIPDSIGGSTATVVVLANNHFVGCIPRSVGRMKGTLNELLLLNNRLDGCIPPEIGELADAEVVDVGGNMLVGLLPEELAKMGKLEQLDVSRNLLAGAVPEPVCKLPSLANFSFAYNYFSVEPPACVPAETAMVELDDKGNCLGGGRPEQKTSLECAPLLKRPIDCRTNTCSALPSSSKPAPKKITPTPPTLAPPPLISPKEETPSPSPYIEPPKSSPPPVKFPLPPVXSPPPPMESPPPPAPVSSPPPPVKSPPPPAPVSSPPPPVHSPPPPSPMISPPPPVHSPPPPVLSPPPPVVPSPPPPAPSLPPPAPEELIILPPILSHSYASPPPPQFEGY

SEQ ID NO: 116748 - protein, 303 aa, Oryza sativa
  Clone ID: PAT_MRT4530_20219C.1.pep
MPPLRKRGFPGSERLIRRYKRPALPWKINDMRVTETGSFQYLLEYLDYPDEEKTWTEVFEKNPAYGKRNSNVVRERECMLRPSYPELYWGDQVPEQFPKSNVIVSVCDTPKVGDLVEWLSEGSYWTAKVTKLLSEDMVKVQLLKPPIGEGGSYTAYCKDIRPALDWCLEKGWTVPLSQANGRCWHAARLIHHKSGTADLLWIQYGYTEMSGSDEESTSDDDEEEAQKSLKRASNSSQEAPGSNLEITSDTTSSSRINSQTATIATTKGISRSSPVIDMSNSTNVSELDRISNSTIAAESLPKI

SEQ ID NO: 116749 - protein, 94 aa, Oryza sativa
  unsure (1)..(94): unsure at all Xaa locations
  Clone ID: PAT_MRT4530_2021C.1.pep
RNRRVRGVAGNAGATISVAAGATXEINPGLQVDATTGDVVGRADWHNGRRSPLGNAVNDRREPYDDVRVAGHQNYVCWARRGHGASRTPLVPTY

SEQ ID NO: 116750 - protein, 123 aa, Oryza sativa
  unsure (1)..(123): unsure at all Xaa locations
  Clone ID: PAT_MRT4530_20220C.1.pep
MKLSMKRPPYNHTSRMDFSFLGALELLSLLETWTPRVHEDESSWSGYCQCKVIEMLCRDASHVLGRGSCVGXSRSAGKVYIHCSSRAVGEETFRHTHTLRHNTNKVRRQGLGANRFRHTQALR

SEQ ID NO: 116751 - protein, 176 aa, Oryza sativa
  Clone ID: PAT_MRT4530_20221C.1.pep
SSWSGYCQCEVIEKLCRDAPHVLGRGSCVGQLRSAGKVYIHCSVSATQPPVPEMVHTPLIPTPSPQLGSSLETPIQVDSETEGTDTEPEIEPDITDPSEDETPVPRITFIGGPHTLSIARKSTRSPGKKPKPDPEATTSKPWGLSFDLASYVDCITIYVLFVELCDVIYDIIAVVL

SEQ ID NO: 116752 - protein, 337 aa, Oryza sativa
  Clone ID: PAT_MRT4530_20222C.1.pep
MGQRRRSGPRRQSQSVVVVVVAVLLATASCAAAQLSQSYYASTCPNVETLVRGAVTQKLKETFNAAPGTLRLFFHDCFVRGCDASVLIAGPDDEHSAGADTTLSPDALDLITRAKAAVDADAQCANKVSCADILALAARDVVSQAGGPYYQVELGRLDGKVGTRAVVKHSLPGAAFDLDQLNKLFATNGLTQTDMIALSGGHTIGVTHCDKFVRRLYQFKGAAPQYSPPMNLAFLRQMRQTCPLSYSPTTVAMLDAVSPNKFDNGYFQTLQQLKGLLASDQVLFADRRSRATVNYFAANQTAFFDAFVAAITKLGRVGVKTAAGSDAEIRRVCTKVN

SEQ ID NO: 116753 - protein, 87 aa, Oryza sativa
  unsure (1)..(87): unsure at all Xaa locations
  Clone ID: PAT_MRT4530_20223C.1.pep
MKLSMKRPPYDRTSRMECMRMXSSWSGYCQCEVIEKLCRDVSHVLGRGSCVGQSRSAGKVYIHCSESVEEKPLSVRLRIQQDDRSAV

SEQ ID NO: 116754 - protein, 54 aa, Oryza sativa
  Clone ID: PAT_MRT4530_20224C.1.pep
SCANESFRFPCLPVKNMACQTQEYAIYYYLVLPRPIRKPKNAMGRPLIHKALRP

SEQ ID NO: 116755 - protein, 181 aa, Oryza sativa
  unsure (1)..(181): unsure at all Xaa locations
  Clone ID: PAT_MRT4530_20225C.1.pep
HSTVDDADDGNVSVDVTPAHNRRLSYSNSFTLARDVPLYPXDIVPXMSPCASIPPRYLGXNCDNTPCTTQLTTVHHSWIIISPSKTRGINSPATPTDFSPLLSLAPHNEPCYTKGLDCKVAGAMRLGRAIREHXREEDDETNSPKGGTTTDDDGRWPATRLRWRHGSVHGDDGVSVRGDSK

SEQ ID NO: 116756 - protein, 190 aa, Oryza sativa
  Clone ID: PAT_MRT4530_20226C.1.pep
MDGGAATNASGVAAAAAAAGNGVQAGGGGERAEDASKQNLALMMASIQRTLGLLHQLNLNVSSFSSASQLPLLQRLNSLVAELDTMQKHAEGCNIQVPMEVVNLIDDGKNPDEFTRDVLNSCIAKNQVTKGKTDAFKSLRKHLLEELEQAFPEDVEAYREIRATAAAESKQLAQSQSALPNGDVKVKPEH

SEQ ID NO: 116757 - protein, 1572 aa, Oryza sativa
  Clone ID: PAT_MRT4530_20227C.1.pep
MDAAAASSSTPASSPRPAESSGGVEMMTTHGTTLSGAPQVGVPTAMDCASATSASSSAAAEHGADGDKLSSPHDKMASDIINKSSCSKFDKEKPDQEVVELGRRWRIGTGVRRNGLWYINQEEMGLAVVVGDTEKEIILLHCQLGHPSFESLSKLYPDLFTKVDKSRLVCDACEFGKHTRSTYAGIGLRSCEPFILIHSDVWGPCPVTSVSGFKWFVTFIDCYTRMTWIYMLRHKNEVLRCFQDFHKLVTNQFDARVRIIRTDNGTEYINSEFVSYVSDHGIIHQTTCPGAPPQNGVAERKNRHLLEVARSLMFQMNVPKYLWSEAVMTAAYLINRMPSRILGMKSPAELLLGKREFKVPPKVFGCVCFVRDHRPFVGKLDPHAVKCVFVGYASNQKGYKCWDPIGKRLFVSMDVTFREFEPYYRSRGDLDQFLEEFSTVIEIDSREGEIVEVDAHKQGDEDVVIGSIPSFVGDTIEKVVDIGEKVVDISCDKDEGVVVGTIPCPLERVEVQQTEMRVYQRRNKNQVDKVTGKEQVHQRSQIQNQGERSGEPMQEQDKESQQLQQFEYAVPDSSSSLSPTSSSLLETSGNISPTFEQRCAKQDPRWKDAMKEELRALEKNKTWELVKLPMGKRAVGCKWVFTVKQTPEGKVDRYKARLVAKGYSQTYGIDYDETFAPVAKMSTVRILISCAVNFGWPLHQLDVKNAFLHGDLQEEVYMEIPPGFGNSQTVGKVCRLKKSLYGLKQSPRAWFDRFRRALCNMGYSQCNGDHTVFYRHRGAHITILAVYVDDIVITGDDVEEIKCLKQRLGEAFEVKDLGPLRYFLGIEVARSSKGIVLSQRKYVLNLLKETGMLGCRTSATPIDRNHQLSAQSGDPVDRETYQRLVGRLIYLCHTRPDISYAVSVVSRYMHDPRTTHLEVVHRILRYLKGTPGKGLWFRKNQHLDVEGYCDADWASSVDDRRSTSGYCVFVGGNVVCWRSKKQAVVARSTAEAEYRAMALSLSEMLWVKNLLLELRLFRNNTVVLHCDNKSAINIANNPVQHDRTKHIEIDRFFIKEKIDSGALRLQYIKSSEQLADCLTKGLGPSERNKMTNSFDGLFCFSAKTLLFLQDQQSGSLLIYPGYKTNECSQNSFGKMESTSSFFAAYDDRCEEEIRTVCHEKVEESLRNDPLPLLVRADSDSRPTFQESCSSDRPREKQVLFSVDSLKEVLDEKEYLVHELECARQQLDEVRSMNSEILRENRKLKRSLRTRDVEGISRNVLEKLGYCHDIFLCPNEVDVEKLQELLCRSECKLLYTVKIPGATTDHSWKVDTLAKMSPFCKVVFLGMIEDVYRLHRSGLCLNGKFSLKDFCWTLSQKVKFSAELKRSVLRRKLKRMRLDYQKLCEIMIEVLEECKVKIPADLEYLLDLMRDDPVKHQFLIRYNFCLMDDILKREETLTMFTQYEQLNREDREKHGKTTREYRTEIAVSFITLPRNIGSAMLANKFVAKIFERWRVETGFYSLDTRRKLIELIRHCMVHLPEKAFDEEKRTHYTDANVVDMVQVGAPQVFCQFQRGMSEIKELSYPHLVRVMKS

SEQ ID NO: 116758 - protein, 188 aa, Oryza sativa
  Clone ID: PAT_MRT4530_20228C.1.pep
MAPVKINKFIAATFFMVLVIMSCALTSTLACRGGTECTVETPHCTMDSCNAKCKAEATSRKCNRLTASCHKYATLEKCCCTFHANEVGTKVPRPRLFGHMRARHRYDEARHEATTDCLKRRHSFVIRHIGPAVALLGGQWIKDVANLVGVTHCQIAVRNPCSGSMSTSHVAPRVAQSPILSKLIYEKT

SEQ ID NO: 116759 - protein, 213 aa, Oryza sativa
  Clone ID: PAT_MRT4530_20229C.1.pep
MGLEGAVGGRAAFQWWRRTRRRAVAAEDVDDGGCGGLEGRGGSRTDVNLAVPAPARCSTRQQGKGGCGAVGGGRVTRVGGGGGDAARFLGNDDGSGGRRRPQAIRGSGGFGGNDKIWFADQGPGMPQLTRCEYSCLKNVHITGYKGARCQIEFLLHIVENAPTLEALTVDTTQVLYEDYYGARIGSKFSECFAVVSRDFLRRKLPTKVKLHVM

SEQ ID NO: 116760 - protein, 59 aa, Oryza sativa
  Clone ID: PAT_MRT4530_2022C.1.pep
LALYHSTRIISLIISEADRLNKGLLCPLQEQALTSILPCLLCVTQLHVVNAIVYYRGSR

SEQ ID NO: 116761 - protein, 126 aa, Oryza sativa
  Clone ID: PAT_MRT4530_20230C.1.pep
PRAAGIRHEAHSSEFLPHVPDHTSLSSQRASRRTSMATSPSPSPPLSVDLQHIYGTIVILLTHTLHFPFHSFPNQLLQTSSASAFQTVQSQTIKKILSSITGSAAQMHSHRAPSSSSPPHSSQAAS

SEQ ID NO: 116762 - protein, 1160 aa, Oryza sativa
  Clone ID: PAT_MRT4530_20231C.1.pep
MEATGAGAGEERWASLCNCVVNFLLEERYHLTALELLQELQEDGRHAHALRLRSFFSDPALFPPDLVARASSAPPGVCALVLDLHSTDDLVGADPQSLLEEKIAAEEKLALTDYDLRLAREDLSRLKLELQKQKESSPDGSNATDALTNEGSSHHDKRDAKISTLGPLKDNERKDLNCAVKEYLLLAGYRLAAMTFIEEVPDQDLDVWINSSACVPDALRRYYYQYLSSTTEAAEEKISILRENETLLKDNESLGAEKDALIKSREVANSQIAALRKSLEAAHKDIKEKEKTVQDLKQSLDVQRKELNDCRAEITSLKMHIEGTRSSKRLSSGDTDGLIPANSMEEIVVLSSEHDNLKGSESITSKLASEVSLAEGKKKDHENMESSLEGSPGPEAEVSCSTAENSGYGTSGEDKSGTNTCFEDLSVNGNLHGSGNSQGDSDSISVYLTDDKVHTEKVESPYKQKSSDKMALETIKIVSDALPKIVPYVLINHREELLPLIICAIEKHPDSDVRDSLTHTLFNLIKRPDGQQRRIIMDACVELAKSVGEMRTETELLPQCWEQINHQYEERRLLVAQSCGELAVYVRPEIRDSLILSIVQQLVEDSATVVREAATHNLTLLLPLFPNLDKYYKVEELMFQLVCDPSGAVVNVALKELVPAVVRWGDKLDQILRILLAHILASAQVYMFVNFGNLIVSLKCHMCSDTIVMLQRCPPVSGVEGAIDSHLRVLGEQERWNIDVLLRMLTELLPFIHQKAISTCPFAADPSTGTMPESYFSKSCLKLYAAGDTEWSAFEWMHTECLPDLIKLACLLPAKEDNLRTVIRKYLLDVSGRYGIDYLEHVMLPVFLVAAGDIDSSDFTYFPLATQSRVRGLRPKTSIAEKLGIVCVLPLLLSGILGYPSKRQQLEEYLRKLLIQNTKDGSFSMHHTAEIIDAVRFLCQCHDVVDMLYVNVSHLLSLCSMFEEHHVAVFNIVWEMVVISDANLKTNAAALLKALVPYISVKVASTHVLPALITLGSDQNLTVKYASIEAFGAVAQHFKNDMIFKLTSAPPTRYYIEQDRVLAYVFYAARGAVDVAVHPAVSVGVRFVAKLQNLLRILEALDLAYAEGCPPVSGVEGAIDSHLRVLGEQERWNIDVLLRMLTELLPFIHTESYIYLPVCC

SEQ ID NO: 116763 - protein, 148 aa, Oryza sativa
  Clone ID: PAT_MRT4530_20232C.1.pep
MTSFKVYLISKMTSFKGEEITVAPEEPVLVDNNHQEDNSSHPLNLLADTSEWFRNMDDDDESPLWLNVLLRTAFWRKCDVHEQLENAHRAEESIFCTNCLKTICPHCTHDQPSHQLLKVRRYIFRSVVRVKDMQNFGIDMSYIQAFLR

SEQ ID NO: 116764 - protein, 379 aa, Oryza sativa
  Clone ID: PAT_MRT4530_20233C.1.pep
MAEAGVAAASLFGADRRLCSADILPPAEVRARIEVAVLNFLAALTDPAAPAISALPLISRGAANRGLRRALLRDDVSSVYLSYASCKRSLTRANDAKAFVRAKKSVFDSFSFALETVWKVMEMCYKILGEGKLVTLRELFYTLLSESPTYFTCQRHVNQTVQDVVSLLRCTRQSLGIMASSRGALIGRLVVQGPEEEHVDCSILGPSGHAITGDLNVLSKLIFSSDARYIIVVEKDAIFQRLAEDRIYSHLPCILITAKGYPDLATRNPAGLAILCTYKYGSISMGLESYRYACNVKWLGLRGDDLQLIPQSAYQELKPRDLQIAKSLLSSKFLQDKHRAELTLMLETGKRAEIEALYSHGFDFLGKYVARKIVQGDYI

SEQ ID NO: 116765 - protein, 212 aa, Oryza sativa
  Clone ID: PAT_MRT4530_20234C.1.pep
MAQIATTTWQQFEIAELICKFDRNNRTKTLGSFQSCSSIEHLFRLVVALTAILGDDICDARVAIECSAYRCNPQLAIGARDEEISMAPEEPVLVDNNNQEENSLQQLNLLADTSEWFKNMDDDDESPLWLNVLLRTAFWRKCDVHDQLENTHRAEESIFCTNCLKTICPHCKHDQPSHQLLKVRRYIFRSVVHVKDMQNFGIDMSYIQVLLR

SEQ ID NO: 116766 - protein, 75 aa, Oryza sativa
  Clone ID: PAT_MRT4530_20235C.1.pep
MGSGVIGEGSRRGSGVVGGGRGMASPAERSACGRDKEISGRWRLEKERERIRAGRKNRGIRGAALSGSRLGKADE

SEQ ID NO: 116767 - protein, 143 aa, Oryza sativa
  unsure (1)..(143): unsure at all Xaa locations
  Clone ID: PAT_MRT4530_20236C.1.pep
PILRPDLXKAAVAGVPFVDVLTTMLDPTIPLTTSEWEEWGDPRKEEYYYYMKSYSPVDNLKAQGYPNILVTAGLNDPRVMYSEPAKYVAKLRELKTDDNLLLFKCELGAGHFSKSGRFEKLREDAFTYAFILKALGMAPKAAL

SEQ ID NO: 116768 - protein, 118 aa, Oryza sativa
  Clone ID: PAT_MRT4530_20237C.1.pep
MKPSSSSVGVCTLLVAVASLQLLLVVAVAASAKTAPAMPDEEFLGRLCDQQQGATRRRLPWCQQLHARRRHGGGGGGVGVGKRRRVPMPPPSRAGEEIDARYDVSKRVVPSGPNPLHN

SEQ ID NO: 116769 - protein, 802 aa, Oryza sativa
  Clone ID: PAT_MRT4530_20238C.1.pep
LSAFAMAATPPVARKVPRELAQHGDVRVDNYYWLRDDSRSHPDVLAHLRAENLYTATIMSDVKNLEDEIYAEIRARIKEDDIGAPLRKGQYYYYNRTLTGKEYVQHCRRLVPTDAPVTVYDVMPTGPNAPHEHIILDENVKAEGHDYYSIGAFKVSPNGKLVAYAQDTKGDEIYTVYVIDAESGKFVGQPLEGITSDIEWAGDDHLVYITMDTILRPDKVWLHMLESNQSDDICLYHEKDDMFSLGLQTSESKQYLFVESGSKNTSFIFYLDISKQSKELVVLTPCVYGIDTTASHRGNHFYIKRRSEEFYNSELIACPLDNVAETTVLLPHRESVKIQSFQLFENHIAVYERQNGLPKVTAYRLPATGEPIGQLQGGREIDFVDPAYDVEPEQSQFGSSVVRFHYSSMRTPPSVFDYDMDSGVSVLKKIDTMDAINSVKSCCSEAQSLHGVAALIEGKGRVFVMLEDGHLAAAVLQDEGIMAGGRRCSESARRTVLGGFDASNYVTERKWAAASDGTQIPMTILYRKDRVNLDGSDPMLLYGYGSYEICIDPSFGRSRFSLVDRGFIYVIAHIRGGGEMGRKWYEDGKLLNKRNTFTDFIACAEHLIENKYCSKEKLCINGRSAGGLLMGAVLNMRPDLFKAAVAGVPFVDVLTTMLDPTIPLTTSEWESEGWGQPRLLGMQEWGDPRKEEYYYYMKSYSPVDNIYWIKLIYAIYGGCFGAEYIKKLGHLYEPDPRVMYSEPAKYVAKLRELKTDDNLLLFKCELGAGHFSKSGRFEKLREDAFTYAFILKALGMAPKAAL

SEQ ID NO: 116770 - protein, 104 aa, Oryza sativa
  Clone ID: PAT_MRT4530_20239C.1.pep
FPPTLAMGPMDPGRQYMMQTLGRGSSPPMFMSQPMALLQHQCCMQLQGMMPQGPCGPRCQIMQGMPQVFCAGLGPQQIIKMAMQIPNMGNRAPVNFQLSSGGGC

SEQ ID NO: 116771 - protein, 170 aa, Oryza sativa
  Clone ID: PAT_MRT4530_2023C.1.pep
MGAVAAALLALLLAAMAAPPAEAAVGVNWGTLSSHRVPPPVVVDLLRANRIGKVKLFDADPAVLRALAGSGLQVMVGVTNAELAAVAGSPAAADAWVAQNVSRYVGRGGVDIRYIAVGNEPFLTSYQGQFQSYVIPAMTNIQQSLVKANLASYVKLVVPCNADAYQSASL

SEQ ID NO: 116772 - protein, 180 aa, Oryza sativa
  Clone ID: PAT_MRT4530_20240C.1.pep
MWTGVAACGTEQQHAKPTWQRAEWRDGGWSSGARNGGNPLGLMGGGARPLPTPWAPLRGVQVVVGGGAVRDGLRWDEVPAQLRREGSGHDNDLNATEGGGPWRGGGHASPPVRPAFAKGKPVAAVVEEETALQLLARGHGARSSSATRHVEEDPRVVEAVAGVAAGAGAPPLAVAWGCRR

SEQ ID NO: 116773 - protein, 156 aa, Oryza sativa
  Clone ID: PAT_MRT4530_20241C.1.pep
PVINWKRLLDSPDSFLDFNTLSRVRILAKLEPIVDLILMYSVKNQKAFDTQKESHPNLEMKPTNHYLYFMPTNLANPRDTNLHVSRQNRQCVNGLADFTMFLSSSIRLMTATTILPVFSNQLTIRIPLLVLSNGRLKHLKRGLPELMIEARTLSGQ

SEQ ID NO: 116774 - protein, 228 aa, Oryza sativa
  Clone ID: PAT_MRT4530_20242C.1.pep
MADEVVLLDLWVSPFGQRCRIALAEKGVEYEYSEQSLADKSDLLLRSNPVHKKVPVLLHAGRPVCESLVILEYIDETWPPEPEKKKESPRLLPSDPYARARARFWADYVDKKLFDCQTRLWKLRAGDAAHEQAKRDMAEALGTLEAELGEGDYFGGEAFGYLDVVLVPFVAWFHAYERLAGFAVAEICPRLVAWGERCKGRDSVAKTLTDPEKVYEFALYLKAKFGAK

SEQ ID NO: 116775 - protein, 49 aa, Oryza sativa
  unsure (1)..(49): unsure at all Xaa locations
  Clone ID: PAT_MRT4530_20243C.1.pep
AAGIRHEGAGRPLFGGAISSTFPVRFQXDVSNIRQVPDHQVRAPLALDP

SEQ ID NO: 116776 - protein, 68 aa, Oryza sativa
  unsure (1)..(68): unsure at all Xaa locations
  Clone ID: PAT_MRT4530_20244C.1.pep
LFVHFHDTYGRSLSKILISLQMGESAADYWRECLGGCPXSKGASALEKTDDGGYMPNGLGISTNDALC

SEQ ID NO: 116777 - protein, 86 aa, Oryza sativa
  unsure (1)..(86): unsure at all Xaa locations
  Clone ID: PAT_MRT4530_20245C.1.pep
PPRPPSSPXSPRSRPTPPRSPXSPPHGGLSTPTPPRSTQPSRPASRASPSSTXCAPPWTGQXSARTSPSTGTRRTRPTTWWTDYRR

SEQ ID NO: 116778 - protein, 99 aa, Oryza sativa
  Clone ID: PAT_MRT4530_20246C.1.pep
LASEKHSSRVWRRVPPDSEADLAANADMTTTITTISSSSYYYPYSYPPPPRPRHRHHRRADRRTHPVEAEAAEESRRGAQGEAAWPRRTNPVVEAEDEP

SEQ ID NO: 116779 - protein, 66 aa, Oryza sativa
  unsure (1)..(66): unsure at all Xaa locations
  Clone ID: PAT_MRT4530_20247C.1.pep
KKIKIKIKICENEERCREITTQVMWRKSVRIECXLSSXAKNRGVLITCNXDPPGNFNGERPFLTIK

SEQ ID NO: 116780 - protein, 115 aa, Oryza sativa
  Clone ID: PAT_MRT4530_20248C.1.pep
MAQCSESSNAARWEELTEATFAPAPVLTALFRNTMSTSPALADDATTRPSTNTIAARLSHSPDEAAILQRQRSSLPIKHPKKQKETHGRIDQQDAGKNTYASVLEKKTENMTERR

SEQ ID NO: 116781 - protein, 174 aa, Oryza sativa
  Clone ID: PAT_MRT4530_20249C.1.pep
NTLLFCHSKAPFPLACNLTINRLYQEASISIARRIMGESRGSIAFFASYRPPVALDIFCCPAPPSSPKDELHLTDGDSYNYNCQPIPPAALKTVVERLGVSRGDAVEGDIDSGRITGLVFVSEREHNLETLHIALRFNDDGEVQVFSLADAYGGDGPVQRRPHGGQRLHCRRLR

SEQ ID NO: 116782 - protein, 903 aa, Oryza sativa
  unsure (1)..(903): unsure at all Xaa locations
  Clone ID: PAT_MRT4530_2024C.1.pep
KTSCSSSRSPPPPPPRRRPPSXPPKPFKPLSSAAPFRRPSPPPPPPSPVPSPAPPPPPHRPSPSPPPNPLSSKLWLSSKLSPPPPETLEQPEPSTTTTTTPPPPEPEAEAEARRQEEFRHKGKVFVGNLPLWARKAEIAEFFRQFGPLEKVELVRGHDDPERNVGFCFLYYGGDDADAAAERAVEVDGVDFRGRSLTVRLDDGRKGRARAEQRARWVNDGRRREPRSPWHEGRDEACREFRRVVESRPDNWQAVVSAFERIPKPSRREFGLMIVYYAKRGDKHHARATFENMRARGIEPNAFVFTSLVHAYAVARDMRGALSCVEEMKSEGLELTIVTYSILISGFAKINDSQSADNLFKEAKTKLSSLNGIIYSNIIHAHCQSGNMERAEELVCEMEEDGIDAPIDVYHSMMHGYTIIQNENKCLVVFERLKECGFKPSIISYGCLLNLYVKIGKVAKALSISKEMESCGIKHNNKTYSMLINGFIHLHDFANAFAIFEEMLRSGLQPDRAIYNLLIEAFCKMGNMDRAICILEKMQKERMQPSNRAFRPIIEGYAVAGDMKSALDTLDLMRRSGCVPTVMTYNALIHGLVRKHKVQRAVSVLDKMSIAGITPNEHTYTIIMRGYAASGDIGKAFEYFTKIKESGLKLDVYIYETLLRACCKSGRMQSALAVTREMSFQKIPRNTFIYNILIDGWARRGDVWEAEDLMKQMKEDGVPPNIHTYTSYINACCKAGDMQRAEKVIEEMVDVGLKPNVKTYTTLIKGWARVSLPDRALKCFEEMKLAGLKPDEASYHCLVTSLLSRATVMEGSTYTGIISVCREMSENDLTVDLRTAVHWSRWLHKIERTGGALTEALQRIFPPDWNSLEFLGEPSSSISMGESDDYSDSDFSGDEDEDHNIDDS

SEQ ID NO: 116783 - protein, 129 aa, Oryza sativa
  Clone ID: PAT_MRT4530_20250C.1.pep
MGRPEPVVLFAQTILHSQLDEYVDEVLFSEPVVITACEFLEQNASPSTPNISLVGATSPPSFALEVFVHCDGESRFRRLCQPFLYSHSSSNVLEVEFNGPYSSSEATAIAAFSMFVLFYQVKFISLQQQ

SEQ ID NO: 116784 - protein, 681 aa, Oryza sativa
  Clone ID: PAT_MRT4530_20251C.1.pep
MVDINPDHIFEVPDTPDRIQQSTCPVSSPAARRGIAKAAGTPLPSRRIKFKITNNSIQGQSSRGNASSVSPAPLDAGDIFKQAELARLLPVAEDPEARSSLLKSGRTIETSVENEKVPKKSGLDQSMNISNNINCRGSGERDRSCQIRKGDISARDANSCNADFLCLGSGLPTTTVGKPRNRMGTITFKKPKEVVGANVCSVSSPREGKGEEITDKGTTGISSSTPSIVPQRHVGQRKLVRNGCISPSNIAKRSLKVDEKREICSTSGLLHYPDTQVDASGKGNVIDLTDSSPIIRRQGNTATDMEKRSGRKSAIGRAGETVIPLAANQVNSIFSEGNKNKGKEISHDVVGAKQSGEAYMRRVCPRSMGDSSSVANNDHTGIGSEQGKMTNSCGRESGSSEQSNLDRASAAGDSNNSIEGGDNNNSIGGAKTLQTASFVNRTIRISSRKRKRIASSYHPGESSSSVDVDQPRVASSDSTAARNHTTHRHHIPVVDIDDICSPEVRPSLSGIGSSNRTSVDPNIREQLESDELLARQLQEQLYNETPHVVPTEEIDAIIAMSLQHEDNAQPTSRTARRFQSTTRGPRVLRSTVPQHANRVRYDSNNRRIIYQRALSRYPAAHIQPNIDLNDYDALLALDENNHQHAGASESQINNLPQSVIQCIDEWLRRKKLCPVCKSGIT

SEQ ID NO: 116785 - protein, 85 aa, Oryza sativa
  Clone ID: PAT_MRT4530_20252C.1.pep
NDYDALLALDENTPQHAGASESQINNLPQSVIQSNIENPCAVCLDNPSIGDTIPRLPCFHMFHKECIDEWLKRKKLCPVCKFGIT

SEQ ID NO: 116786 - protein, 207 aa, Oryza sativa
  Clone ID: PAT_MRT4530_20253C.1.pep
MAIATTTLPLAPLALAPPSSPISQCSLLLLRPRAPAALSLRPSARLLVAVAAREPELGGSGGGGAGDGSGSGGGGDSEKPRGGGGDEEGEGEEEKMGQGLSMSQKITLAYAALVGAGGAMGYMKSGSQKSLAAGGISALVLYFVHTQLPVRPVFASSIGLGISAALLSVMGSRFKKSGKIFPAGVVSLVSLVMVGGYIHGILRSTHA

SEQ ID NO: 116787 - protein, 92 aa, Oryza sativa
  Clone ID: PAT_MRT4530_20254C.1.pep
LLYSVRGVRNLKDVIRVYVNHGIPPKLFQLQIACLLSFTCQFMIKILQHFPRWIMDLPSAPREIRGGASAYREPPLRREGTATSEIGPKIPK

SEQ ID NO: 116788 - protein, 442 aa, Oryza sativa
  Clone ID: PAT_MRT4530_20255C.1.pep
MPSRRREERGCGCWAAVARGLRGACFRPAGVAAAASGADEKGAAGGSAKGSHVHDAAAETRYLNASNRELGDHFQTNLDDENGVNASTEKKLLRFTFQELKSATVNFRPDSILGEGGFGYVFKGWIDPNSTSPAKPGTGLTVAVKSLKQDALQGHREWVAEVDFLGQLHHKHLVKLIGYCIEDDQRLLVYEFMARGSLENHLFRRALPLPWPCRMKIALGAAKGLAFLHGGPKPVIYRDFKTSNILLDAEYNAKLSDFGLAKAGPQGDKTHVSTRVVGTYGYAAPEYVMTGHLTSKSDVYSFGVVLLEMLTGRRSMDKKRPTGEQNLVAWARPYLSDRRRLYQLVDPRLGLNYSVRGVQKVAQICYHCLSRDTKSRPTMDEVVKHLTPLQDLNDMASASYRPRSSQHDQPNTVFGGWLHKRKTACTCGWLQRVITTYFSDKG

SEQ ID NO: 116789 - protein, 103 aa, Oryza sativa
  Clone ID: PAT_MRT4530_20256C.1.pep
HEGAASTRTLAPPLLSSPPKVECASFSFALPCQREQKEPRLPPFPPSRTFPPSPPPPPIKPATSVCFGCSSVVLPFLELARHGCCGSGEVWWCQEAEGRGARG

SEQ ID NO: 116790 - protein, 423 aa, Oryza sativa
  Clone ID: PAT_MRT4530_20257C.1.pep
MASISRMETPQLRVLRLLNRADVATTLVKWLGRIRTLYMAIRPEARRPGPQHSILADPTTGPCLGLPTGMLGRPGMTDPARHDGSLDGTIVAPTSAKAWDSGLLQWIEFTKLNGVSIQGNGIINGRGQQWWTYSDTDDDENDDTQYDVEFERMPQVKPTALRFYGSFNVVVAGITIVNSSQCHLKFDSCQGVMVHDVTISSPENSLNTDGIHLQNSKDVSIHHTNLACGDDCVSIQTGCSNINIHNVNCGPGHGISIGGLGRDNTKACVSNVTVRDVNMFRTMTGVRIKTWQGGLGLVQDVRFSNIQVSEVQTPIIIDQFYCDERTCSNQTSAVAVSGVQYENIRGTFTIKPVHFACSDSSPCSGITLTGVQLRPVQISHYRLNNPFCWQAFGELYTPTVPPIACLHLGKPAGNNLQSYHDLC

SEQ ID NO: 116791 - protein, 111 aa, Oryza sativa
  unsure (1)..(111): unsure at all Xaa locations
  Clone ID: PAT_MRT4530_20258C.1.pep
NCHGKRLKDMALLVCAAXKKKNRSLQQAIRNGQCLLDPDLLTGVGWTTKMITQIVQLIESEEDRITWKLTNHSEYKTTSIYNAQFLPQQNRTLTYSSGNPERHESARSLLG

SEQ ID NO: 116792 - protein, 90 aa, Oryza sativa
  Clone ID: PAT_MRT4530_20259C.1.pep
MQIRFAVPRQAAGRDGGRTDAILPHNSIIFRLAAADDTDGFRFVVQKFYKFGRKNLLLGATGKHEILEIQNRNFVATQVNSFRPRTNIDS

SEQ ID NO: 116793 - protein, 82 aa, Oryza sativa
  Clone ID: PAT_MRT4530_2025C.1.pep
PSSTYTLRSPSPASQSQAPTSAAVLLVPHPSHLNPPGPAPLPPTCHIHDITGGRREGEMDGAWREGKRLIAVEGWVKVADAW

SEQ ID NO: 116794 - protein, 49 aa, Oryza sativa
  Clone ID: PAT_MRT4530_20260C.1.pep
WEANYVTMRVCGFVQNHRHDYDANVYKRLGGIIDSVAGPAKHHPRTGLA

SEQ ID NO: 116795 - protein, 167 aa, Oryza sativa
  Clone ID: PAT_MRT4530_20261C.1.pep
MAMLADLMVERRRTGLGRGSGGGGGRVRERKGSDGGVAGREEAMVQCKRQRRRCGKFGIELYILFPLCNPSSCSIISSSTHNRTRRSSAPTHHSTWLRAHLEAKYGGGERHGGRNAGKAFMAAVLAETPPHPFEKVMVLVKKMMAAVGSPHSRAAENMLMQASSQCG

SEQ ID NO: 116796 - protein, 143 aa, Oryza sativa
  unsure (1)..(143): unsure at all Xaa locations
  Clone ID: PAT_MRT4530_20262C.1.pep
MGGENVAGRTPDFPSDVGRRQREGRGFKMNLAHFMRLRGAGDAGERAATRARRGVGRGRDGKGGGVGGCRRGRGWLEVGDDPTGGAHLSASRKEEEGARAGPRRSGACAGDGVDWADGPRIGKKEEKKKXKEERIFPGILYCG

SEQ ID NO: 116797 - protein, 64 aa, Oryza sativa
  Clone ID: PAT_MRT4530_20263C.1.pep
MGFTLTNVGLSTPGGGGSSLVRAVAGAGRVVFSRVGRGGFPAVRASGPATPPDILDKMSESIHK

SEQ ID NO: 116798 - protein, 464 aa, Oryza sativa
  Clone ID: PAT_MRT4530_20265C.1.pep
MDEALVGRLEAAVSRLEALNGAAGATARGGYGGQVDHASAHDPAILAFDELVAGAVGRVSAAAGKIGAEVAEVTRVLEKAFLVGKDLLVRTKQTQKPTVDSIAVFMGPLNETILEANSLAEGTRSSHGNHLKAAAGSLAALAWIGYTGKGCGMPLPIAHVEESWQMAEFYSNKVLVEYKSKDPDHVEWAKALKELFVPSLRDYVKTFYPLGPVWQPPGSSTSKAPSAPCPPSASLFSSSAQSSQPKTGMSAVFAEISSGKSMTQGLRTVTADMKSKNRTDRTGVVAAEGKEAHKKPSSSSTKLPSKLELQMGRKWIVEHHVGNKNLVIEDCDTKQSIYVFGCKDSVLQVKGKVNNITIDKCSKMGLLFKGVVAACEIVNCNSIEVQCEGSVPTISIDNTSGCQLYLSKESLETSITTAKSSEINALVPDANSDGDWAEHSLPQQFIHAFKDGQFTTLPACHSGG

SEQ ID NO: 116799 - protein, 257 aa, Oryza sativa
  Clone ID: PAT_MRT4530_20266C.1.pep
AASPAPGGRRASLSPSSRRLSGEGSSKKKVGVLVAGISKMTDLTNGSAVKPGRKSWDNTSIAAAAGSVMKSKVKVDKSTILRTQEAMARRLSDVTTELSSNDDDSSVDEKPKPRKKIESPAVKTKAMAPKIMLHDPKWTDGSIPLDGVSDVLSKMGKEATERRDAAAIAAADALQEALITESVIRNLSKFSELTSASKTSNPLPTVDIFLAVYEDTLKWKKIAESICTNRTETASWENSATHWVEAALATDLEVLKL

SEQ ID NO: 116800 - protein, 158 aa, Oryza sativa
  Clone ID: PAT_MRT4530_20267C.1.pep
METKEGATTTLMPAAKAFAGAGGGGDNVEKKPPVVSKKVPMPQVLLDYILSWTRMGPWPSSDDHSEFLLSPEHRNQDDDDGFAAFEAKVRAQREELSAFLDKKDDEFAVFQAKVRDEVDENGCYMVDGTYFADLEAAQALSNELFAKLNMSGILFEED

SEQ ID NO: 116801 - protein, 723 aa, Oryza sativa
  Clone ID: PAT_MRT4530_20268C.1.pep
MATVTPGVLLKLLQAMHTDDRVAGDHRSPVLQVTAVVPALTASTGDSLWPSNGFLLQLSDGLHSTYVQPSSADADALVSARPQLVGHLVHLDRLRFARPVPRAVGIRPVPSSRSVSFVGNPEPLVARPAACSRGYVIQPGSHSDAAPPLMPSSSGNAAQSDATNAINRTVLAHKNVPEAAPPPAVSAAKRRFSSPAPSKQRDPSPSVKGGASRPSSPSVKGASRASSPAVRGTPRATSPAPSKCVVPSLVAAKEENRRTAREPAIIVPSRYRQPSPVGGRRGAGSPAPGGRRASLSPSSRRLSGEGSSKKKVGVLVAGISKMTDLTNGSAVKPGRKSWDNTSIAAAAGSVMKSKVKVDKSTILRTQEAMARRLSDVTTELSSNDDDSSVDEKPKPRKKIESPAVKTKAMAPKIMLHDPKWTDGSIPLDGVSDVLSKMGKEATERRDAAAIAAADALQEALITESVIRNLSTKVVFPNTQLAIVHSKFSELTSASKTSNPLPTVDIFLAVYEDTLKWKKIAESISTNRTETASWENSVTHWVEAALATDLEVLKLMNKAPESLSRKRGADKPKAPLVVEAPRTTISKRQSHGTSAKVQSKVLPTSSASCAWNKTQGVNETAELATTLCCEMHTWFLKFVDEAMDLGFHLFEDQNVASRGKQSSHITMVLSQFKKISDWLDGVGKIAEEATTKDKVEQLKCKIYGFVINHMGSAFDSSVSISSRN

SEQ ID NO: 116802 - protein, 103 aa, Oryza sativa
  unsure (1)..(103): unsure at all Xaa locations
  Clone ID: PAT_MRT4530_20269C.1.pep
SWQEKARQERWQVLVNLQIFPLNLRFLPHSSPSEPRFYQECFRFGVWSYCKEPRFLHRFLDLMLKKLSKVVFVLVKPPAFSGRNSRRKRLEERRGEEGLVXGG

SEQ ID NO: 116803 - protein, 111 aa, Oryza sativa
  Clone ID: PAT_MRT4530_2026C.1.pep
VPRPATVFPASPPGSSTGPWCDPKFPPPCAPASPVLSHFPLLPFLLKKGPPGNPKPPPYFLTFFLTFLPLLRPNSPRPRKKDVPAFVNFSPFCPNFFLGKEALASPVLLFC

SEQ ID NO: 116804 - protein, 420 aa, Oryza sativa
  Clone ID: PAT_MRT4530_20270C.1.pep
MAAAAAATNGGFDVIVVGGGIMGSCAAYAAASSSASRCGGARVLLLERFDLLHHRGSSHGESRGIRATYPQARYPPMVRLAARLWGNAEAEAGYRVLTPTPHLDMGPRADPALRAAIQNGGAAEVVGASDDSAASWLWSAVFRLPEGWTAASSELGGVIKATKAVAMFQSLAAKNGAVLRDRTEVIDIAKQGDGSILVKTSSGEEFHGAKCIITVGAWASKLVKSVAGVDLPVQPLHTLICYWKARPGREHELTPESGFPTFASYGDTCIYSTPSMEFPGLIKVCAHGGAPCDPDRRDWCAGGDALADPVARWIDELMPGHVDTAGGPVIRQSCMYSMTPDEDFIIDFVGGEFGKDVVVGAGFSGHGFKMGPAVGRILAEMAMDGEAKTAAEAGVELGYFRIGRFEGNPEGNRAENKVKI

SEQ ID NO: 116805 - protein, 82 aa, Oryza sativa
  Clone ID: PAT_MRT4530_20271C.1.pep
SQRGFLGTIPQPMNSKTKTCLSFREKVEERRRGERDGEIMEEGMQTEGRRFYKAGCGDGNKIEIEGALEYNIEYETQHYSRD

SEQ ID NO: 116806 - protein, 41 aa, Oryza sativa
  Clone ID: PAT_MRT4530_20272C.1.pep
SIVAYIACSSNEVAVSKNVGLSGFPDCLGQEIGNSEISVVS

SEQ ID NO: 116807 - protein, 34 aa, Oryza sativa
  Clone ID: PAT_MRT4530_20273C.1.pep
LVQKRGIDGHLTYPFCAQELETTNHILLDCTQRR

SEQ ID NO: 116808 - protein, 201 aa, Oryza sativa
  Clone ID: PAT_MRT4530_20274C.1.pep
PGCRNSARGLERGVYVSGLREEIVNSAEQVFKLLELGEANRHFGETNMNVRSSRSHTIFRMVIESSAKNHMDSGDAIRVSVLNLVDLAGSERIAKTGAGGVRLKEGKHINKSLMILGNVINKLSENGKQRGHIPYRDSKLTRILQPALGGNAKTSIICTAAPEEIHVEETRGTLQFASRAKCVSNCAQVNEILTDAALLKR

SEQ ID NO: 116809 - protein, 43 aa, Oryza sativa
  Clone ID: PAT_MRT4530_20275C.1.pep
FDATLMLLSSSLFMCIVLPWAAVSFVICTSFISPFLYMRFQLS

SEQ ID NO: 116810 - protein, 74 aa, Oryza sativa
  unsure (1)..(74): unsure at all Xaa locations
  Clone ID: PAT_MRT4530_20276C.1.pep
PRVREKVISIFPQPAKMPAYKKEMLKTSVNRVSALEEELSTAKKALQETLXRQKEIMAFLXKKKKKKNQRLFCW

SEQ ID NO: 116811 - protein, 63 aa, Oryza sativa
  Clone ID: PAT_MRT4530_20277C.1.pep
KENPDAPKKNIQRLGRGGNTRKRPQNLHNLHAGILAWGRPPTNQACITHKRRAGGNRGIVPCR

SEQ ID NO: 116812 - protein, 286 aa, Oryza sativa
  unsure (1)..(286): unsure at all Xaa locations
  Clone ID: PAT_MRT4530_20278C.1.pep
MALYPSAPPTSPPPPARPPLLRRRPPLRTCRPPAGRLSPPPRSPPSARAPAAPPPCRAPIRRHPSPARYGLPPPPLTVATRALGRRRRRPRPLRQPRQPPPPPRLWPPRSPTTSPKTPPPLPKPPPSPPRPLRPSPPAATRPHLPPSPIGGGRPPAPPRPPPSTPVSSPXPPAPISILLAEVAPAPPPPPPPPLXSPSPSPSPLPRKSVAADSCSAPRNIPNPQPWRPEQQQPPAAVSPRSFSPPALCNAASPRSPPPPPQPTSPRGRRRHAERRPRRRVGLGTRR

SEQ ID NO: 116813 - protein, 175 aa, Oryza sativa
  Clone ID: PAT_MRT4530_20279C.1.pep
MAAGAAAATRRSLSALLLSSRALQRRFAPLAAAASSAYLAPWAPPSRGAKTASSGGSGYSPLNDPSPNWSNRPPKETILLDGCDYEHWLIVMEFPTDPKPSEEDMVAAYVKTLAAVVGSEEEAKKKIYSVCTTTYTGFGALISEELSYKVKGLPGVLWVLPDSYLDVPNKDYGGL

SEQ ID NO: 116814 - protein, 66 aa, Oryza sativa
  Clone ID: PAT_MRT4530_2027C.1.pep
GGQKSNCIKYLKKREGVHVNKDFIHNSWLSTTNNVRTYVRTYLRAYPHTNMCVYLSSWFNHVFNNA

SEQ ID NO: 116815 - protein, 76 aa, Oryza sativa
  Clone ID: PAT_MRT4530_20280C.1.pep
FTTPLVAWGTLVNYPIYHGNEAHLEFISNLHLKLFISQECLFTRDGGNAFTGRDFIYLLEKNKPFFEGDEKSSKHF

SEQ ID NO: 116816 - protein, 356 aa, Oryza sativa
  Clone ID: PAT_MRT4530_20281C.1.pep
MAALTSYEMAASILLCAEDSSSVLGFGGEEEEEEEDVVAGKRARCAGPPPPPCVDVAGVDFAVPSEECVARLVETEADHMPREDYAERLRAGGGDGDLDLRVRMDAIDWIWKVHSYYSFAPLTACLAVNYLDRFLSLYQLPDGKDWMTQLLAVACLSLAAKMEETDVPQSLDLQVGEERYVFEAKTIQRMELLVLSTLKWRMQAVTPFSYVDYFLRELNGGDPPSGRSALLSSELILCIARGTECLGFRPSEIAAAVAAAVVGEEHAAFSHVNKERMSHCQEVIQAMELIHPKPSSPSRVFVSSSIPRSPTGVLDAAGCLSYRSDDSAVASHYAASSWGYEHDSSPVSSKRRKISR

SEQ ID NO: 116817 - protein, 284 aa, Oryza sativa
  Clone ID: PAT_MRT4530_20282C.1.pep
TRGAMAARLLAAGFAVTAYARTPAKAEALVAAGASLAGSPAAVAAACDVVFTMVGNPGDVRAVVLDAASGVLAGLRPGGVLVDCTSSSPSLAREVAAAARAAGCYAVDSPVSGGDVGARDGALALLAGGDEAVVSWLAPLFAHLGRPTYMGPPGSGQSSKIANQIAVAGAVVGASEALAFANAAGLDAPLFLDAVSKGAAGSRVMDIFGERMLRREFASGGSVKYIIKDLGMALETEEGPEGAKALPGAAMFRQMFSAMAANGDGDLSLQGLITVVERLNGIRK

SEQ ID NO: 116818 - protein, 164 aa, Oryza sativa
  Clone ID: PAT_MRT4530_20283C.1.pep
MLRHLKSAAARSPMRSPPPHPPSAPAPRDEGFEEEEEEEESARAIAVSDQRTIYLVRPAFTRPLTPSPISTVDLIWWCSTFGVNMFIANTVEFLNSFAAQCNDKLSLLHRKIVKLDSSLNLLEAKLRSIDDTNAFGHSTNQKAHGLFTQDGRFEPTNLLGESSR

SEQ ID NO: 116819 - protein, 119 aa, Oryza sativa
  Clone ID: PAT_MRT4530_20284C.1.pep
GAHPPPQGGFFPFGFFRVKRGAPGAGVSPPRNFWLWFPGLYGAFPGLGQLFCPPPKKDRPLAIILVGGSVNPGGSFCPSKKPFVFVCLGPPGFFFFCGVISLKKGDNGFPALLNPRVFF

SEQ ID NO: 116820 - protein, 81 aa, Oryza sativa
  Clone ID: PAT_MRT4530_20285C.1.pep
MHRKEIINHGNEIDGDNEDVVEAKLVIKPGMAERDWKMRLDMAGEADERDAVRWMCRAEDDEVVDGGHEGCDCDQTELGQS

SEQ ID NO: 116821 - protein, 437 aa, Oryza sativa
  Clone ID: PAT_MRT4530_20286C.1.pep
MEYGTPQHFMCPISLQPMQDPVTSPTGISYDRRAIHRWLAAGHSSCPVTGHPLSLSDLTPNLTLRRLIHSWHHSTTTPFPVERSTPSPPPLREVDDDDVVERLVMEMEGGGGGSWCPPSCDLLREAAAVAAGSGVARRRMVGAGVLRRVLRLVVWCGGRGSSSGEAAVMVEMFDACLALFHALDVSADELRPLVADGHDLVDAVTRVMATLEAGDANATRARESAVRLLEAVTEAADAPVLERLSPEFFSAATAVVRDRGAVSPGAARAAVRALANACRARASGACRNRALAVDAGAAREAIELELDAWSSPQAPGGRRATEAVMALLAELCACAEGRAAVASHPAGITVVARRVLRVSAAADACAVRVLAAVAGRAASPEVLREMARVGAVGKLCCVLQAECDAGVKEAARAVLRMHSGVWSGSPCVSAYLLSRYL

SEQ ID NO: 116822 - protein, 44 aa, Oryza sativa
  Clone ID: PAT_MRT4530_20287C.1.pep
ARGSYSLEEFNYKMDPSSFTKGYFGPSSLKEATLDPAWVSFRFI

SEQ ID NO: 116823 - protein, 87 aa, Oryza sativa
  Clone ID: PAT_MRT4530_20288C.1.pep
MAPQQKVILKVSSMSDTKMEQKAMETVADIYGIDSIAADHKDQKMTVIGEVDTVEIAKKLKKFGKVDIISVGPAKEEKKDDKKGDKK

SEQ ID NO: 116824 - protein, 86 aa, Oryza sativa
  Clone ID: PAT_MRT4530_20289C.1.pep
MAPQKVILKVSSMSDTKMKQKAMETVADIYGIDSIAADHKDQKMTVIGEVDTVEIAKKLKKFGKVDIISVGPAQEEKKDDKKGDKK

SEQ ID NO: 116825 - protein, 340 aa, Oryza sativa
  Clone ID: PAT_MRT4530_2028C.1.pep
MAGLRFAEFEALHAELAGLGGRQAVAAAEAEEEKEADMREAFGVFDEDGDGYISAAELQAVLSRMGLPEAACMARVRDMIAAADRDSDGRVDYEEFNGEGMMAAGEEHGSLLEKINDKIHEFKKGSSSSSSSDSDDDKKHHHKSKSKKKRLFGRTNPLHHVLGGGKAADLVLWRDKQTSGSILAGVTETWLLFEGIGYELLTFFCHSLMVFLTVCFVWANADSFINRGPPKFPDAILSEVQCLKIAHILRKEINEAFLTLRHVASGKDLTTYLMISLQITTSSVSQFFLMAYTLPMLYEKYEDEVDVVGEKALIELKKQYAVLDHKLLSKIPMLAEKKQH

SEQ ID NO: 116826 - protein, 354 aa, Oryza sativa
  Clone ID: PAT_MRT4530_20290C.1.pep
MAGSDEVNRNECKTVVPLHTWVLISNFKLSYNILRRADGTFERDLGEYLDRRVPANARPLEGVSSFDHIIDQSVGLEVRIYRAAAEGDAEEGAAAVTRPILEFLTDAPAAEPFPVIIFFHGGSFVHSSASSTIYDSLCRRFVKLSKGVVVSVNYRRAPEHRYPCAYDDGWTALKWVMSQPFMRSGGDAQARVFLSGDSSGGNIAHHVAVRAADEGVKVCGNILLNAMFGGTERTESERRLDGKYFVTLQDRDWYWKAYLPEDADRDHPACNPFGPNGRRLGGLPFAKSLIIVSGLDLTCDRQLAYADALREDGHHVKVVQCENATVGFYLLPNTVHYHEVMEEISDFLNANLYY

SEQ ID NO: 116827 - protein, 117 aa, Oryza sativa
  Clone ID: PAT_MRT4530_20291C.1.pep
MKTNSQGKLESRTRDLRQSLPSRTLESESDSDTCVRVPRGRGRSGRLTRTTLMLAGGGWRAHWGGLRRADRGRKTATAMGKEDAGDGGGRRRRRGRKTAAAMGEEGLPASSSSPRRR

SEQ ID NO: 116828 - protein, 115 aa, Oryza sativa
  Clone ID: PAT_MRT4530_20292C.1.pep
SLSSVLGVISSDVADSGVWCRPLRGYQHRGQLQLPVLRIGRISHSMSHVSWADDSVQLAALHGEPFVRVLTALRIHARFVGQSGRVSGESVHSSFRSYRRQTAVLSYPVYALSVL

SEQ ID NO: 116829 - protein, 158 aa, Oryza sativa
  Clone ID: PAT_MRT4530_20293C.1.pep
MVSGVEEEKVRGEEEEEDRPQLSAAAVEALPEFLLEQRRDGGEEGSDGVEPVAEDWRLSQFWYDEHTERELAGKVVRPVSLSGPASSATAAAVACVACPTLYAYLKTSNPKGVGDNGGVRGTVRSGAVEEATGRGGGSKTASRSGGTQRRSGRRWIGI

SEQ ID NO: 116830 - protein, 122 aa, Oryza sativa
  Clone ID: PAT_MRT4530_20294C.1.pep
MEDVAGVVDAAEDVVKPAAARQPIRRQGSLRLRALAPGSIDVRAGGAGDGSAASEYCHDAVAAAAEVIPLLTPLHAVPAAPAASDQVSGGRTARHLTEVVAGGGREILKYSNNFLMMYMEKR

SEQ ID NO: 116831 - protein, 84 aa, Oryza sativa
  Clone ID: PAT_MRT4530_20295C.1.pep
PFEMNFLLKICGQRTVESRIYSHIEPVYYKGFSSLSLRSVSSLSGIQCPQKIRNLSCNHKLCLRCYSLERDKHMPELCTLQQPT

SEQ ID NO: 116832 - protein, 195 aa, Oryza sativa
  unsure (1)..(195): unsure at all Xaa locations
  Clone ID: PAT_MRT4530_20296C.1.pep
MRLCDTDIEHYLDQDLINISPRPTNDKISGATVDVRLGNSFRVFREHATPYIDLSGPGEQVSAQLEKIMSDEIILAEGEAFFLHPGELALATTLESVKLPDNIVGWLDERSSLARLGLMVHVTAHRIDPXGWHGKIVLEFFNAGKLPLALRLNMAIGALSFEVLSGAAAKPYNAREDAKYKNQQSAISSRINEDK

SEQ ID NO: 116833 - protein, 148 aa, Oryza sativa
  Clone ID: PAT_MRT4530_20297C.1.pep
MADGAGRDRSGLGPGKRRKTCARSPRHASSLVPTPPTRATTNGDGEQGRAAMARRLTGQGCNGAAARSETGGSSKRGRGGFYGVVMRHDGTGAAHRAVDLLYGGRARASPPPSPMMLPMPRMGSKMAAVADMVEDKGGNGGGSQALPP

SEQ ID NO: 116834 - protein, 92 aa, Oryza sativa
  Clone ID: PAT_MRT4530_20298C.1.pep
FYISPYFYFFLFLFFLIFLSVYTKHLQHPRNNHCPKHNNIPTKAQSSTTRKHQPQKKNNPKPYRQRQNLDLQQRKNPNKNPMESPKVQTHTP

SEQ ID NO: 116835 - protein, 264 aa, Oryza sativa
  unsure (1)..(264): unsure at all Xaa locations
  Clone ID: PAT_MRT4530_20299C.1.pep
MLPARASRLFARAKALGMMTKGYVWIVTDSIGIVLDVLPQHSIESMEGIVGFRPYIAESTRITDFSSRFTTLFRTKKPTIFQLWAYDVAWAVATATEKVHRTRSLNPTFHPPGNIGKNLVDDLPALPAGPELLNSILQGEFDGLAGQFRLIDRHLQVPTYEIVNVIGEKTRVIGFYSPDSGLTMSVNSRIIHGDAKFSTSSSDLENIVWPGDSTTVPKGWDFPVNAKILQIGVPVRRDFKXFVNVETNPNTNRSTVSGYSIDMF

SEQ ID NO: 116836 - protein, 62 aa, Oryza sativa
  unsure (1)..(62): unsure at all Xaa locations
  Clone ID: PAT_MRT4530_2029C.1.pep
MFVGYWSEDDYHYFSKAVLIGYFGVCXVNLIYRFTRNESSLESMFTMGVEFATRYLQVDGKV

SEQ ID NO: 116837 - protein, 182 aa, Oryza sativa
  unsure (1)..(182): unsure at all Xaa locations
  Clone ID: PAT_MRT4530_202C.1.pep
RRRSSSSSSSRVLLLLRRRRRRRTRCSRATSACASSSARRRWAGTRTRTSGSAAPPSGRRRRRRTTSTTTGXDGRRRPAXSRRTPRSCAPPSASTRRARRSTSSSSSTSRRRRSPRTPRRRGSTTAQPWRRRRRSRRGRPSPHSPTTRCSARRRRRGPGASGSERSLSLLPARSRSRHQSRM

SEQ ID NO: 116838 - protein, 914 aa, Oryza sativa
  Clone ID: PAT_MRT4530_20300C.1.pep
MEPRGLFGSRREAASSAATCSRRRSLNVVFFFFFPLLIVAAAAGNTTAAAAAAAARVAVDVGVILDLATALGKKSMLSMEMALEDVYAAHPEFATRVALRARDSRGDVVAAASAAIDLIRNENVAIVIGPQSTLQAEFVTYLANKTKVPVITFSATGDAVTRYHVPYFIRACSKDSYQVASIAAFVKAYEWRNVVLVYEDNNYGVGILPSITDALQGVGVNVINRSAFPAYSPNNHIDVELYKLMTMQTRVFIVHMLPARASRLFARAKALGMMTKGYVWIVTDSIGIVLDVLPQHSIESMEGIVGFRPYIAESTRITDFSSRFTTLFRTKYHPNTDIRMAKPTIFQLWAYDVAWAVATATEKVHRTRSLNPTFHPPGNIGKNLVDDLPALPAGPELLNSILQGEFDGLAGQFRLIDRHLQVPTYEIVNVIGEKTRVIGFYSPDSGLTMSVNSRIIHGDAKFSTSSSDLENIVWPGDSTTVPKGWDFPVNAKILQIGVPVRRDFKTFVNVETNPNTNRSTVSGYSIDMFEAAVKKLPYALRYEYIPYDCAVSYDLLVSQVFYKKFDAAVGDVTIIANRTRYVDFTMPYTESGVSMLVLSKSDDEPTTWIFLQPLAKDLWIATMIFIFFTGLVVWVIERPINRDFQGSKWKQCITAFYFAFSTLTFSHGQKIQSIQSKIVVSYTASLSSMLTAERLQPSVTDLKQLLANGDSVGHQSGSFVQSILKKLKFDDHKIKVYSTQEEYAKALRMGSKHGGVSAIFDEIPYLNSFCSKYGREFQMVGPIDRTSGFGFVLPKGSPLVPDLSEAILSLTEEPERLKIEKTWFMDSSLDYYGSHSKGSSRISFQSFQGLFIIVGCLLGAVLLINFSKFLYDKCKEMRGFGSDRVHSGERVVCYGEAQPQPPQIVMVDRRSCAC

SEQ ID NO: 116839 - protein, 443 aa, Oryza sativa
  Clone ID: PAT_MRT4530_20301C.1.pep
MGCTNSTEARREMVLADAGRRATRSFSLPTVDRQRLRWKAVSMLSSLGISQGRRSGAFKYATTSVEGMMKSENDHAGQALLHVQEAAAKRAVIKPCTPTLTPPNEPEVINAWELMAGLEDDPPTPPCASHEPPAVTPQWMQADTDIPIVALDFDPEILSGFREALADTSPSEPTSCSVTEEEEQPAQPEKHADACDAPTSLATGDMPEKRADACDAPVSLATGDMPEKRADACDKTISLATGDMPELSGIVRARINAFQEKIERRSSKGARDAKVAHLRPPGGDKKAVVYFTSLRGVRKTFVDCCSVRSILRSYGVRLDERDVSMHAVFRAELAELLGPGGFACAALPRVFVDGRYLGGAEDVHALHEAAELARMLEGCEAAPVRKLGYMEACAACGDVRFVPCETCYGSCKIFVDDDVDAGEFRRCPDCNENGLIRCPVCCC

SEQ ID NO: 116840 - protein, 69 aa, Oryza sativa
  Clone ID: PAT_MRT4530_20302C.1.pep
MRGVRASGAARGCPRRLTPYGLRLSRPSCERLLQPTGDDRLVTGRKWNRVVEQAGEEVQRSVTSNAISE

SEQ ID NO: 116841 - protein, 108 aa, Oryza sativa
  unsure (1)..(108): unsure at all Xaa locations
  Clone ID: PAT_MRT4530_20303C.1.pep
NDINSDTLHPWNPGKAFKVGNGGEISQFFFFFRVAHTSRLRSSIIHVGVRGPKDVNGELSTTEIIKRGDGSYLNWVTGTLWAPKSHRFYIVSTWRXVLVASLEEGPHK

SEQ ID NO: 116842 - protein, 99 aa, Oryza sativa
  Clone ID: PAT_MRT4530_20304C.1.pep
PDTHPDPNRIRQILREIVIPFTSSSYFLKGEEMKSMYTTLAGTLSVYQNATGKICGVWRRVPRDYKRILRDDRLHVVLLWGNKQQAELALAGKGAKYTA

SEQ ID NO: 116843 - protein, 254 aa, Oryza sativa
  Clone ID: PAT_MRT4530_20305C.1.pep
MRPQALVLANFLAAALLHPLLCQGAAAASPASIAGKLAMDGMAIDQGIDHLLVLAAIFVMCLYGVARHRPLDLLSCLFHHPVPLTQTTMRKVRDRGEEREKEKEIKRTRVVEWAESLCNVRNVPYAASRYVPSIAATRSSAHRPVTKRSSPVGCSKRSQLGRDNRRPYGVKRLGHPRAAPLARTPRMSEPPPGRPCYAKRKRQPHVRTPRRENRSIDRCQALAVSSKERSKGSRRCAPPGLRHLRHARLPMRVY

SEQ ID NO: 116844 - protein, 90 aa, Oryza sativa
  Clone ID: PAT_MRT4530_20306C.1.pep
DTHPDPNRIRQILREIVIPFTSSSYFLKGEEMKSMYTTYNPQNVVATARFPLAGTLSVYQNATGKICGVWRRVPRDYKRILRDDRLHVVL

SEQ ID NO: 116845 - protein, 41 aa, Oryza sativa
  Clone ID: PAT_MRT4530_20307C.1.pep
IQSYLFLFRIPNLKILGPLSSIGRGTDLGIHWARILGPNES

SEQ ID NO: 116846 - protein, 47 aa, Oryza sativa
  Clone ID: PAT_MRT4530_20308C.1.pep
MSIANWDRIFYTCKEKNESYKEIYATCCDVEGAASKSVAYVACHVGG

SEQ ID NO: 116847 - protein, 74 aa, Oryza sativa
  unsure (1)..(74): unsure at all Xaa locations
  Clone ID: PAT_MRT4530_20309C.1.pep
NSHWLAIWKFQCGVSSFLLDECITGVAFMIIDFTGSLLEVPETIYFLWHLFLFVFLGYYLXTXSLLFKXFQGNR

SEQ ID NO: 116848 - protein, 58 aa, Oryza sativa
  Clone ID: PAT_MRT4530_2030C.1.pep
KKKWRLHARCSRPCFSWCCCLRTGENGRAVMVAEARTAVSAPRGGSPCSESSSGTQAL

SEQ ID NO: 116849 - protein, 58 aa, Oryza sativa
  Clone ID: PAT_MRT4530_20310C.1.pep
MPHVASTMRAELHVASMMADTRTRPSCGVNAGSYADAVELGTASTQMWLQTGQSSRGR

SEQ ID NO: 116850 - protein, 94 aa, Oryza sativa
  Clone ID: PAT_MRT4530_20311C.1.pep
MTVVMVTMVGNTLQLSLGLHLNRPVKTCIQRWHGGFGRTRDRPNPAQFRLAASFVVLLCRLMNFGPIQNVNFEFLAHSCISLILDIVRLIYRLS

SEQ ID NO: 116851 - protein, 70 aa, Oryza sativa
  Clone ID: PAT_MRT4530_20312C.1.pep
MVDFVKCTVSVDPGGQTGRVPPVRLQSVAGNRSESTWEKLMSRDQEIMRDTKGRRFDRRRLDFVIDFVQG

SEQ ID NO: 116852 - protein, 95 aa, Oryza sativa
  Clone ID: PAT_MRT4530_20313C.1.pep
HSPVWLNPLFRAPAEPGSLEPPDLAPLCLVVLLRRRTLLRDKNVEYAERMKAMGKDVELVVFAGEEHAFFGVKPMSAATGELVEVIRRFIAGAAA

SEQ ID NO: 116853 - protein, 69 aa, Oryza sativa
  Clone ID: PAT_MRT4530_20314C.1.pep
MDAVDSVVDPLREFAKDSVRLVKRCHKPDRKEFTKVAARTAIGFVVMGFVGFFVKLIFIPINNIIVGSG

SEQ ID NO: 116854 - protein, 109 aa, Oryza sativa
  unsure (1)..(109): unsure at all Xaa locations
  Clone ID: PAT_MRT4530_20315C.1.pep
MRALARLAWQGRAGXRACTTYASNDYSIPLASMHRRSGEQVSGTSAFDVLHREKAAIRFLGSASCDCSLFVRDGSPFSPLACFAPSSTLATASSSCRATGLSVPRYAFD

SEQ ID NO: 116855 - protein, 815 aa, Oryza sativa
  Clone ID: PAT_MRT4530_20316C.1.pep
MAQPRVIRVRAHDGRSTTVTIAASATVSDLRTALRSSFAPALVSPDFHLFLKGTKLIADAKVGNLPVGPGESISFIPVNAKSAPPHPPSSSAPNPWRKRKFSWHDGGGEDIYAKKPTNPAPPRPLSCHGTQPLDPTQMVEHLRQGLGKAGQITHVEEIPGREATFAELPGHLSSSMRDALRSIGVTKLYAHQAQAVQSAVSGEHVVVSTSTSSGKSLCYNIPVLESISQSSAPCALYIFPTKALAQDQLKTLLEMKPAFRSDFDVSIYDGDTAMKDRTRIRNTARLLITNPDMLHMSILPCHAQFKRVLFNLKYIVIDEAHSYKGAFGCHAALILRRLKRICSYVYGSNPTFIFCTATLANPREHVMELANLDRVVLVDNDTSPCGSKNFLLWNPPLQLAKAEDRRPNPVLEVSYLFAEMVQHGLRAIAFCKTRKMCEQVLMQTRQILKETAAELVNSICVYRGGYVASDRRKIEADLFGGILRGVAATNALELGIDVGHIDATLHLGFPGSMASFWQQAGRSGRRAKQSIAVYVAFEGALDQYFMRSPHKLFGKPIEHCQVDSQNRKVLEQHLACAASEYPLRQEHDESYFGFSMNSVLMTLKDKGCLMNNPSGGDSGVWKYIGPDKKPSHSVSIRAIEHHRYKVYDGAVYMHQGVSYLVDKLDLTSRIAYCKVFDLNYYTKVQDYTEISFIGGDVDEHPANRILLYDKHPGGIGLASQAKLLFGELLVAALELVSSCSCTNSDGELFDTVFMLTCWFIWKERNGRIFEHRSRAPEQLVHDIKEELMIWKMAGVFSLVSREALPHCRCDRVLSL

SEQ ID NO: 116856 - protein, 810 aa, Oryza sativa
  Clone ID: PAT_MRT4530_20317C.1.pep
MAQPRVIRVRAHDGRSTTVTIAASATVSDLRTALRSSFAPALVSPDFHLFLKGTKLIADAKVGNLPVGPGESISFIPVNAKSAPPHPPSSSAPNPWRKRKFSWHDGGGEDIYAKKPTNPAPPRPLSCHGTQPLDPTQMVEHLRQGLGKAGQITHVEEIPGREATFAELPGHLSSSMRDALRSIGVTKLYAHQAQAVQSAVSGEHVVVSTSTSSGKSLCYNIPVLESISQSSAPCALYIFPTKALAQDQLKTLLEMKPAFRSDFDVSIYDGDTAMKDRTRIRNTARLLITNPDMLHMSILPCHAQFKRVLFNLKYIVIDEAHSYKGAFGCHAALILRRLKRICSYVYGSNPTFIFCTATLANPREHVMELANLDRVVLVDNDTSPCGSKNFLLWNPPLQLAKAEDRRPNPVLEVSYLFAEMVQHGLRAIAFCKTRKMRKIEADLFGGILRGVAATNALELGIDVGHIDATLHLGFPGSMASFWQQAGRSGRRAKQSIAVYVAFEGALDQYFMRSPHKLFGKPIEHCQVDSQNRKVLEQHLACAASEYPLRQEHDESYFGFSMNSVLMTLKDKGCLMNNPSGGDSGVWKYIGPDKKPSHSVSIRAIEHHRYKVIDRRSNRVLEEIEESKAFFQVYDGAVYMHQGVSYLVDKLDLTSRIAYCKVFDLNYYTKVQDYTEISFIGGDVDEHPAKPQENSETADRILLYDKHPGGIGLASQAKLLFGELLVAALELVSSCSCTNSDGELFDTVFMLTCWFIWKERNGRIFEHRSRAPEQLVHDIKEELMIWKMAGVFSLVSREALPHCRCDRVLSL

SEQ ID NO: 116857 - protein, 67 aa, Oryza sativa
  Clone ID: PAT_MRT4530_20318C.1.pep
MEADDQTMTMRKINANRNHNLRYLNKRIPGRRVYKTFSKTFLAENSFKKHWDLLSWTDSNKIMTIFE

SEQ ID NO: 116858 - protein, 70 aa, Oryza sativa
  Clone ID: PAT_MRT4530_20319C.1.pep
LNYVFQSYYDTEILSWVRFWSKLKQTFKKSLLINIIRPISRHHVYIFMRNVLYISVILFSVELTLWRNTT

SEQ ID NO: 116859 - protein, 54 aa, Oryza sativa
  Clone ID: PAT_MRT4530_2031C.1.pep
MIAGGGHSNPFVAAQLPRRSCELSAQDEVSSVVDLHAYYIASPASWELRVGSAI

SEQ ID NO: 116860 - protein, 49 aa, Oryza sativa
  Clone ID: PAT_MRT4530_20320C.1.pep
ARRVTSVRVGRKHRSRYSDSGYGSSGVYVFALEAFSVVSEREMRGVSTL

SEQ ID NO: 116861 - protein, 116 aa, Oryza sativa
  Clone ID: PAT_MRT4530_20321C.1.pep
MKAVMSSSSSPSMTHGQQLRRSRHHLLSLDCRCRISHSCWHLALEKAANLISSSASAARSLQISNSRRQPLSRFSSSAYTSTRRYVGCYRGSFCVGKQHRGSVFAVRRTRPDRASH

SEQ ID NO: 116862 - protein, 123 aa, Oryza sativa
  Clone ID: PAT_MRT4530_20322C.1.pep
LRSPRRRAGAAAVSSADGILCVISRGEDLVCADSRAAWIGQGGAAGLYFLARAAVRCSYASLRARAHTVGGCTIPSLCCRATPPTSAGAGSSLGLPNVAPVGLLHRHDILLCIGNVFTAKGGR

SEQ ID NO: 116863 - protein, 281 aa, Oryza sativa
  unsure (1)..(281): unsure at all Xaa locations
  Clone ID: PAT_MRT4530_20323C.1.pep
WAAGISSHGGDCQWLWRRASAASAGASPPVTPHSPSTPRLSHCERRHTYLTRRTRLSLPRSSSITSHPPPPRPPRKGSSASRWPRWRRPPAIARHGLPRRRRPLRSKRRATRXDGGGAGGSGGGGEGGGGGGVGSGSCGGVVGRNLSLFPPLLSLSPTGAVRRGGLGGDPLGTGGGLRSPTSHARRWPPFPDGGGRRARRRPVAADPAAPSLGGPDPPPYRGARHAAGTETAGGGDPPPSSMPQPHPRSTPQQPHHRPALHRWLEEARSGLLFGGSREVRR

SEQ ID NO: 116864 - protein, 267 aa, Oryza sativa
  Clone ID: PAT_MRT4530_20324C.1.pep
MAVEGNRVEAGMRRGMAKLMAHVVRRGDGGSSGDARLEIADERRQEVRRWRGEGRPNRARERRSRGGNRRGSGMPTWGDGGSAGAGFCGTSGENGGGRGGDRAHVVGCELGCGRALDFVATWTAMAVGVGRREVGGGADGWDRRSHLSAKGEKEGRKIDFCERARGEGSRPERGRRRAGRGRGRRGSIRPPRTTPGSRTPRETLATLAPAAAAAAAKAKMIYDVNSPLFRSFLSQKGGASSDKRKMEEQKPKEQRPKASENKPVMNE

SEQ ID NO: 116865 - protein, 102 aa, Oryza sativa
  Clone ID: PAT_MRT4530_20325C.1.pep
CMVWLVSTGYVSLNLCLNKKKIIQSPHHHRVYLLSLSSKHNTNYSSTLANRHVIKPRGPLLGRRYAQVDAPFPPSLGGPLCPAPLAYRSSRKSGIVEGDRVD

SEQ ID NO: 116866 - protein, 539 aa, Oryza sativa
  Clone ID: PAT_MRT4530_20326C.1.pep
MAAVASSAEVHEGTRSCVLLNVRGYRAARRDATTATSYTSNGHPIEVSFRAALPPVLSDFYVYCPALQLQEPADYPSMVPKAIAVDGDLFLFRIPIDRVGTMSLTHNDYFVYMARSPPHRPRLDLLPNPSHDTLGDKEIAILSCADGGEQYVVTALRTIPGSKTIHRLHLYRSKPNGEQGRWTSQMVSVEGPLMRDLVCPIPETVHRQVHHVTSKVIRLGTGANGMVGWVDIWRGILLCDVLQESPKLHDMPLPLPAKSNSHRAFLNTTDQYCGDVAVSRDKSFIKYVEMEIVTPKIVSATPPGDCDPDPFLEWLRRRECKDLKRTLVHGRWKATTWRMPIPVTSWDDWCRDCAVESAELSTDNPKAYELLCAVSKESLKEDDDDKAMEAATTTTTRLPLGRLGMAYPAMSIDDDVIYVLTKPVMGNGKAAFLTAVDVRRKKVLAVAKLDSAVFMRYYLAVGISKHFFSAPGNDNFPGIFDPITSFLFKDLGPDPYDSSCFWMLHVQENHLDKLKIMGRSQQEEEEEDVESGKSDAVQQ

SEQ ID NO: 116867 - protein, 164 aa, Oryza sativa
  Clone ID: PAT_MRT4530_20327C.1.pep
HLFHGNSWRRQEEEKRRRTPSLAARKKNRSHGSHVAKPVRVKWPIYHFSKSPLGPLCLFCLGLGFWSLDRVAANLCPVGIFRGAAAACDCGRVAAAGYERLRQRHSRTAQAAKPTRRKLQGEGACARRRGRTAAWPRGSKRRAAQQAAGVACLLLLGLLLGCFQ

SEQ ID NO: 116868 - protein, 217 aa, Oryza sativa
  Clone ID: PAT_MRT4530_20328C.1.pep
MNRVENWATFKCGFWGLFGHDPNESFQKFGSIQSSPFGNIYGQNDVYTTILPRFVIVFSTRQGVTIGGRKHTPATSVGLRQQAEQQEKGCHGGNNVDDPLSLGSIYSSVPTPPLSLSLFVDPALLPSPTPVVIPTLSHLPTQLVVSSTQPHFIIIPALSSSLSQVPQPPSPLSVLAQVLMYEYQESPHCVTGTKNHVLYYAYIEMCRQLDPQGLFNV

SEQ ID NO: 116869 - protein, 456 aa, Oryza sativa
  unsure (1)..(456): unsure at all Xaa locations
  Clone ID: PAT_MRT4530_20329C.1.pep
KELLAVVFAIDKFMSYLVGAKVIVYIDHAALKYLLTKKXMLLLQKXELPINDYLRDGMLLKVTDSDPWYATIVNFMVACHVPPGENKKRVIYESRMHLWDLPYLYRVCSDVLLRRCVPVAEGIKITEKCHVAPYGDHYGAFKTHAKIWQSGFFWPTMYDAKEFIRRCTRCQKHGGITARDAMPLTYNLQVELFDVLGIDFMRPFPKSFECEYNLVAVDYVSKWVEAIPCKAADAKHARWMFHEITFPHFGTPRMVISDGGSHFIDKTFXSFLQELGAQYIIATPXYHSQTSGQTETSNKQIKNILXKTVNEMGKAWKNKLPDALWAYRTACKTPIGMSPYQLVYGNSCKLKXKLEXHIMWAIRTWNMDLKGDGHHRKMQLSELEEWRDKAYHNAKICMDRTKRWHDRQIKHKEFKAGDKVLLFNSRVKLFGHGKLRNKWMGPYIAVDTSSHGAVIQ

SEQ ID NO: 116870 - protein, 60 aa, Oryza sativa
  Clone ID: PAT_MRT4530_2032C.1.pep
MTYTVKRRKYMFCNAIFRLLTWLKVQDRRSITVSHTLYEWLQSPESVILIIGEITPMCKL

SEQ ID NO: 116871 - protein, 164 aa, Oryza sativa
  Clone ID: PAT_MRT4530_20330C.1.pep
RNASSARAWLELAKLGSARRLNEPSPSSLHSSFPNRAEPELARKLLAPDRQRQAGSAVRSPLCAAAVGPPPPFPARLRRGLAASLPAPPTSPSVAASAPSSLHGDAPCAVGPPRRRLPSLHHLRPPSTVPSAARAELDAPCVAGVPDSTPSIMTSQAGSSWLEL

SEQ ID NO: 116872 - protein, 78 aa, Oryza sativa
  Clone ID: PAT_MRT4530_20331C.1.pep
GVDNRQPPILGSQAAGSGKKNCHRDSQRQGPSMRSIASRRRHVQQLLHLKQRPSFSTLRWHSRAELLDLAASLTPART

SEQ ID NO: 116873 - protein, 67 aa, Oryza sativa
  Clone ID: PAT_MRT4530_20332C.1.pep
SNIIGPCKFEGLRIHKSKSSFRPSHQGRSIYDRCICSTVGISYFLAIKKIYMWSHPQIKKCLKQGIL

SEQ ID NO: 116874 - protein, 349 aa, Oryza sativa
  unsure (1)..(349): unsure at all Xaa locations
  Clone ID: PAT_MRT4530_20334C.1.pep
SLTTLHLDQLNASKERERARKRAAMATSHADVEKGARRKEVGKVPSPLYPQHEGEREWVPWIVPSFLVANIVVFVLTMYANNCPLHTPPRSGKCIARXPRPLLLPASPREPAPRPLLRHAXKMGALVWDKVVHEHQGYRLITSIWLHAGVLHLVANMLSLIFIGLRLEQQFGYVRIGAIYLLSGLGGSVLSSLFIRNHISVGASGALFGLLGAMLSELLTNWTIYTNKVAAVITLLFVIAVNLALGILPHVNNFAHIGGFLTGFLLGFVLLMRPHFGWMERYSLPSGSPCSSKKYLVYQWILLAIATALVIVGFAVGMTMLFRGENANDSCHWCHYLSCVPTSRWTCSN

SEQ ID NO: 116875 - protein, 191 aa, Oryza sativa
  Clone ID: PAT_MRT4530_20335C.1.pep
MFLYQSDLRLFLNMSNTNNRPATASDIRVDVQHGQNQSQTSGQQLKNDAERKGAELANDASRKADQAKAAGAQLANDASKKADDLKNAAGEKVDQAKAAGAQAANDASKKAEEWKNAAGEKADQAKAAGAQLANDASKKAEELKNATGEKVDQAKAAGAQTVNDASKKAEDSKNAAGEKVTRRKQLVLKRE

SEQ ID NO: 116876 - protein, 381 aa, Oryza sativa
  unsure (1)..(381): unsure at all Xaa locations
  Clone ID: PAT_MRT4530_20336C.1.pep
MATAGKVIKCKAAVAWEAAKPLVIEEVEVAPPQAMEVRVKILFTSLCHTDVYFWEAKGQTPVFPRIFGHEAGGIVESVGEGVTDLAPGDHVLPVFTGECKECAHCKSAESNMCDLLRINTDRGVMIXGDGKSRFSINGKPIYHFVGTSTFSEYTVMHVXGCVAKINPAAPLDKVCVLSCGISTGLGATINVAKPPKGSTVAIFGLGAVGLAAAEGARIAGASRIIGIDLNANRFEEARKFGCTEFVNPKDHDKPVQQVLAEMTNGGVDRSVECTGNINAMIQAFECVHDGWGVAVLVGVPHKDAEFKTHPMNFLNERTLKGTFFGNYKPRTDLPNVVELYMKKELEVEKFITHSVPFSEINTAFDLMHKGEGIRCIIRMEN

SEQ ID NO: 116877 - protein, 135 aa, Oryza sativa
  Clone ID: PAT_MRT4530_20337C.1.pep
GRRPRTRRAAPVRATWSFICDGKYGIDDPLVDPLSMPAPEWRKLACSRVAVTVSDLDDFKERGKAYAAALRDSGWGGEVEEYETAGEVHVYFLDKPSSPKSAQGADLRRRLPEPRVAAAAQRHGCQIGRRLAVHD

SEQ ID NO: 116878 - protein, 124 aa, Oryza sativa
  unsure (1)..(124): unsure at all Xaa locations
  Clone ID: PAT_MRT4530_20338C.1.pep
MERAAVKRGQHRRRWWQGKSERGGHNGGVDGSSTALEDRKSERGVGLXEDFGSDSGEGIGGMRRRGHVRRSEEARRRSLRTGENRGRGGGGAWWAGPVGRLRAGLVLPYSGPLIQPTYEKLEME

SEQ ID NO: 116879 - protein, 55 aa, Oryza sativa
  Clone ID: PAT_MRT4530_20339C.1.pep
SINPKQKKQGRCHMAFTYQRQLFLSPYYHHFHMAHLHTLDPHSNLPYSILLKLIT

SEQ ID NO: 116880 - protein, 467 aa, Oryza sativa
  Clone ID: PAT_MRT4530_2033C.1.pep
MELLALVTVLLLAHAVAYLAWTAAARRRQSRCYLLDYVCHKPSDDRKVSTEAAGAVIERSKRLSLPEYRFLLRVIVRSGIGEETYAPRNVLDGREGEPTHGDSLGEMEDFFGDSIAELFARTGFGPRDVDVLVVNASMFSPDPSLASMIVHRYGMREDVAAYSLAGMGCSAGLISLDLARNTLATRPRALALVVSTESIAPNWYTGTDKSMMLANCLFRCGGASVLVTNDPVLRGRAKMELGCLVRANIAANDDAHACALQREDDDGTVGISLSKALPKAAVRAFAANLRRLAPRILPITELARFAAQLLITKKLLRRRATAATATKHTGGDGPRINFKTGVDHFCLHPGGTAVIEAVKRSLGLDDDDVEPARMTLHRWGNTSASSLWYVLSYMEAKGRLRRGDKVLMVTFGSGFKCNSCVWEVTGDMADKGAWADCIDAYPPENTANPYMEKYSWINDVDGDSLII

SEQ ID NO: 116881 - protein, 82 aa, Oryza sativa
  unsure (1)..(82): unsure at all Xaa locations
  Clone ID: PAT_MRT4530_20340C.1.pep
MSIKHIEYKVVKSVEDQNRCSSTQKQELIKTKRKTLSMRGNPHEAYXLNPTTYTTSYCRIXLDRLTSSDSNSADPSRSRFGL

SEQ ID NO: 116882 - protein, 101 aa, Oryza sativa
  unsure (1)..(101): unsure at all Xaa locations
  Clone ID: PAT_MRT4530_20341C.1.pep
FFFFFFFFFFFFFFFKTXEQXKXIRPXXXKXRAXFLXXGGXTIXKAAXXGGXPXLLFPLGXXNFXXXXIXXXAVSWXKXLSAHNSXQXXSRXXKGXSXGGL

SEQ ID NO: 116883 - protein, 64 aa, Oryza sativa
  unsure (1)..(64): unsure at all Xaa locations
  Clone ID: PAT_MRT4530_20342C.1.pep
LYRLTRGGFWVRMCQERRPGCVQGRRGAAXRSSMGPTPRGKCHVDVEGDLSPLSTISPGPYHRQ

SEQ ID NO: 116884 - protein, 76 aa, Oryza sativa
  Clone ID: PAT_MRT4530_20343C.1.pep
MGLAHLLAVREKESLGLNLQDPGKSDLEDERRKHAGRRSFGAPCNKNQDDGVDQGATSKEKGGAPVPLETSNRMAD

SEQ ID NO: 116885 - protein, 154 aa, Oryza sativa
  Clone ID: PAT_MRT4530_20344C.1.pep
MSSVVKIGPWGMGRGSQLTENCDIAVAPLRLESITVKHGEVVDCLSFSYRDREKLPHTAGPWGGRGGQEITINLGPSEFVTEVHGEYGSYYGHNSIANLTFVTNRGRHGPFGIVDTSGWDRFSVPIKNNSSIVGFFARTGDSYLSAIGVYVRPF

SEQ ID NO: 116886 - protein, 105 aa, Oryza sativa
  Clone ID: PAT_MRT4530_20345C.1.pep
KFSLITSTHIHICHVRRWINTIHIVYTNNHRFLRFHRSMWHNDSNQTANMKPTVNPRPEKMNKRITPSLSCQKLLVPEGADALGDVEPGVSHCLESGFPQRLTLP

SEQ ID NO: 116887 - protein, 971 aa, Oryza sativa
  Clone ID: PAT_MRT4530_20346C.1.pep
MSVMRGRMQGVWLAALISLLCHSIANAGKEAAAAVCITSERDALLAFKAGLCADSAGELPSWQGHDCCSWGSVSCNKRTGHVIGLDIGQYALSFTGEINSSLAALTHLRYLNLSGNDFGGVAIPDFIGSFSKLRHLDLSHAGFAGLVPPQLGNLSMLSHLALNSSTIRMDNFHWVSRLRALRYLDLGRLYLVACSDWLQAISSLPLLQVLRLNDAFLPATSLNSVSYVNFTALTVLDLSNNELNSTLPRWIWSLHSLSYLDLSSCQLSGSVPDNIGNLSSLNTIDFSNNNLHGEIPSTMGFITSLAILSLRENSLSGTLPSSLQSCNGLIILDLGSNSLSGSLPSWLGDSLGSLITLSLRSNQFSGEIPESLPQLHALQNLDLASNKLSGPVPQFLGNLTSIFSVDLSKNSLSGHVHTNISQLTELIELDLSHNSLEDVLSEQHLTNLTKLKKLDLSYNSLRISVGANWLPPFQLYELLLGSSPLQSQVPQWLQTQVGMQTLDLHRTGTLGQLPDWLWTSLTSLINLDLSDNLLTGMLPASLVHMKSLQFLGLSSNQLEGQIPDMPESLDLLDLSNNSLSGSIPAYFCNMPWLSAIDLSNNSLSGELPNCWKNSTELFLVDFSYNNLEGHIPSSLGSLTFLGSLHLNNNRLSGLLPSSLSSCGLLVFLDIGDNNLEGSIPEWIGDNMQYLMILRLRSNRFTGSIPSELSQLQGLQVLDLANNKLSGPLPQGIGNFSEMASQRSRHIIPMQISGDSFGGSLYHNESLYITIKGEERLYSKILYLMKSIDLSNNYLTGGIPAEVGDLVGLKNLNLSKNLLSGHIPETIGNMSSLESLDLSWNRLSGIIPESMTSLHLLSHLNMSYNNLSGMVPQGSQLQTLGDEDPYIYAGNKYLCIHLASGSCFEQKDNHVDQAEHNDVHDIWLYIFSGLGFGVGFSSVWWLLVCSKAVGKRYFQFVDSTCEKVIHWMILLE

SEQ ID NO: 116888 - protein, 226 aa, Oryza sativa
  Clone ID: PAT_MRT4530_20347C.1.pep
MSADELRLDLEELRRLEGLAKRPRVLSALANEIRAVDAKLAKATEPQAPQAVAAGSPPVVAAAAAPAPAAAAGVSYVTLGSFSWDQDAEKIKIYVFLEGVEQDKVETTFKPMSVDTKFHDVKGKNYRCAIPKLHKEIVPEKCKVLVKPTKIIVTLYKASKGNWLDLHFKEDKFKPSMAKEKDPMSGIMDLMKNMYEEGDEDMKRTIAKAWSDARSGKTADSVRGLP

SEQ ID NO: 116889 - protein, 194 aa, Oryza sativa
  Clone ID: PAT_MRT4530_20348C.1.pep
MGQAFRKLFDAFFGTSEMRVVMLGLDAAGKTTILYKLHIGEVLSTVPTIGFNVEKVQYKNVMFTVWDVGGQEKLRPLWRHYFNNTDGLIYVVDSLDRERIGKAKAEFQAIVNDPLMLNSVILVFANKQDMKGAMTPLEVCEGLGLYDLKNRIWHIQGSCALKGDGLYEGLDWLASTLKGLEASGRLPSGGTSLF

SEQ ID NO: 116890 - protein, 57 aa, Oryza sativa
  Clone ID: PAT_MRT4530_20349C.1.pep
ARTYVGIYSINYHRDCTGFFDGAHAGQGDATYLRLRCNVTLHPDVTHLTLSLFLTSF

SEQ ID NO: 116891 - protein, 88 aa, Oryza sativa
  Clone ID: PAT_MRT4530_2034C.1.pep
FFFFCSNSLPFFSSLVCAGLAISSHHAHPSVSIFFSLHPTLISFRCSQHHSAHHHHIIRTHIQAIILHQQHHTRLRFPQLSFIHIGQP

SEQ ID NO: 116892 - protein, 106 aa, Oryza sativa
  Clone ID: PAT_MRT4530_20350C.1.pep
KRGVSPPQKKKQIFFLLGAPNRGFFPKTPSFKKTKPGEGPFLNPFFSRTPFFCRCNQKPYSGGGGGFVFLNILLTGGLTQTPPEFFYQNVFFGAGFQLKMGLGGEI

SEQ ID NO: 116893 - protein, 109 aa, Oryza sativa
  Clone ID: PAT_MRT4530_20351C.1.pep
MAMTLPSPTSPSFYVSSSPRHQPGLLLPLPSPSSSDRRRPMQLAVAAAMDTTPRQGGVLLEMRPRGGGGGAPRRPAPPAGPREGRGGVVVVHAVARDAPPETGSGPKIH

SEQ ID NO: 116894 - protein, 92 aa, Oryza sativa
  Clone ID: PAT_MRT4530_20352C.1.pep
EVTEQPSSEAKGNDKSEFGTILADVVANMKAPVTLLNVTLMGAFRSDAHVGTWSYPPTVLDCSHWCLPGVPDAWNELVFSYLLTNGWRKMAR

SEQ ID NO: 116895 - protein, 73 aa, Oryza sativa
  Clone ID: PAT_MRT4530_20353C.1.pep
LHTCFHHHKYTKLKTLHYTVTLHTWYSASILLFKFTHDDINEPIMHTHKFFSFFFLFHTRRLVASSVLVRHVT

SEQ ID NO: 116896 - protein, 68 aa, Oryza sativa
  Clone ID: PAT_MRT4530_20354C.1.pep
RTTLSPFWNVGTHRLCILLKAVPGSSCQQQWKDSVQRRACGQLLIIPQHYAVVKWHKRDVLHASDISI

SEQ ID NO: 116897 - protein, 43 aa, Oryza sativa
  Clone ID: PAT_MRT4530_20355C.1.pep
MDGGMFPDMLLLEALKRTVFDRYYPFNIVETEIEEFNVNRKQR

SEQ ID NO: 116898 - protein, 53 aa, Oryza sativa
  Clone ID: PAT_MRT4530_20356C.1.pep
MDSGGESKREGEGAAKEPSSSLPHPLAPDPPTVIALATIATIVMAEDYIWWRK

SEQ ID NO: 116899 - protein, 42 aa, Oryza sativa
  Clone ID: PAT_MRT4530_20357C.1.pep
MARQMGWRNKTSPQAEIWPEMKSPGNRLIKAESKMKSVAKTE

SEQ ID NO: 116900 - protein, 122 aa, Oryza sativa
  Clone ID: PAT_MRT4530_20358C.1.pep
MWFPVENRGTATAVPVTSWHRGGAAAAAVQGRGEPASRRRGDCGCGVGGWEVRRLHHYCRAAAGAMSADPARHGCGRGNDGRMRAGGAAAPPPSLIGGRYDVGGSGMARLRARRQRATTDRR

SEQ ID NO: 116901 - protein, 124 aa, Oryza sativa
  Clone ID: PAT_MRT4530_20359C.1.pep
MEVEPPRLQPAFSRRCRAHNRAEPDPPTSRPPPLGSSGGAVAPPTHQRRTRSRLSPLCPQPMPCRIHLVTPHHPRTTTTSPPRRRFSSSLNRRCRRSSSMPRRHRNSRRRSSVLHGEPHAVADP

SEQ ID NO: 116902 - protein, 122 aa, Oryza sativa
  Clone ID: PAT_MRT4530_2035C.1.pep
PEGGVRRSTADGGHGDSLRRRIRRRRPREGRIRRPREELGARRRAAGTATPCGSGSGGGVLERAGSAALRWSSALGGGHGDVAVDRAAPSSRGPDLPPYGGARRSALGGGSGGGGGSGGLGR

SEQ ID NO: 116903 - protein, 56 aa, Oryza sativa
  unsure (1)..(56): unsure at all Xaa locations
  Clone ID: PAT_MRT4530_20360C.1.pep
QVAPAPGCGDVPPGAWVAVPLGTDVSAAWXDSPFMXPGWVCXLHPPPGSACAAWLR

SEQ ID NO: 116904 - protein, 131 aa, Oryza sativa
  Clone ID: PAT_MRT4530_20361C.1.pep
MAKRQAAVLAVVASAAAAWRGSCGPHGQPCRAPPPSHLPPAQALLSGDIVASPLLSPPLWHDRRGSGVDQHGWWKGLTQRWRINAEMADRHGGGGEGRCSGGGLSQPFSPVHPFSIFSRARMTTPQGDDLG

SEQ ID NO: 116905 - protein, 902 aa, Oryza sativa
  unsure (1)..(902): unsure at all Xaa locations
  Clone ID: PAT_MRT4530_20362C.1.pep
MKPNNVDTENPFLYETNERISYAELQAATESFSPANLIGSGSFGNVFTGNIPETFGKMVKLIYFSVQDNHLEGHVPLSIFNISSIRFFDLGFNRLSGSLPLDVGVKLPRINRFNTLANHFEGIIPPTFSNASALESLLLRGNNYHGIIPREIGIHGNLKVFSLGDNALQATRTRGWEFMTSLTNCSSLRFLDIGHKNLVGEMPINIANLSKELIGIYLSENQITGTIPEDLWKLNKLTSLNLSCNLFXGTLPPDIGGLPIINSIFMSHNRITGQIPQPLGNISQLIFLSLSNNLLDGSIPISLGNFTKLDLMDLSCNSLTGQIPQEILAIPSLTRRLSLSNNALIGSIPTQIGLLNSLVKMDMSMNKLSGGIPEAIGSCVQLSSLNFQGNLLQGQIPKSLNNLRSLQILDLSKNSLEGRIPEFLANFTFLTNLNLSFNKLSGPVPNTGIFRNVTIVLLLGNKMLCGGPPYMQFPSCSYEDSDQASVHRLHVLIFCIVGTLISSMCCMTAYCFIKRKMKLNVVDNENLFLNETNERISYAELQAATKSFSPANLIGSGSFGHVYIGNLIIDQNLVPVAIKVLNLSQRGASRSFLTECDALRRIRHRKLVKVITVCSGSDQNGDEFKALVLEFICNGTLDEWLHANTTAVRRSYTRINLMKRLHIALDVADALEYLHHHIVPPIVHCDIKPSNILLDDDLVAHVTDFGLARIMNIAEPFKESSSFVIKGTIGYVAPEYGSGSQVSMDGDIYSYGVLLLEMFTGRRPTDNFNYGTTSLVDYPTCGPAQCRRPPHANAQRQLPLLPLPAASEPQSVLLPRLRHVHQQAQQVAPPLSPVISEGRDVEDADPNLPGFFKNPSHLSDDEIGEDRSPLAAEPDGFLGDDEGDNAPSESDIATELDDLDSA

SEQ ID NO: 116906 - protein, 618 aa, Oryza sativa
  Clone ID: PAT_MRT4530_20363C.1.pep
MDGGSKREYIHLGHNLGLGQKSGLTLDPSWADFGLDDTDRPIFRVLIGRPSVDIGETKPLLLLSRRNPSPFPSLPSHIAALPSAPPSGGDGAPLPASGGSGALPHNQRRGALSPNNGGVEAAAARREREGRRAGPRLRQIWRHGSGCVVVVADVMERRSGLASARSGGVEAAAARRGWEGRRAGPRLRQIRRHGGGCGPTGAGELILNFTASCVLPLFLSLEELQILGRLPKKEKPGKSGEKDLAGVGSSLPDARTTTDLTMSSRIANPNNYTAAVTNPGQNYTVKNAHHGGAGVSNGFLAPPVFEALPSLRDAPAPEKPSLFLRKVVMCYVVFDFTDPTKDVKEKEIKRQTLLELVDYVTSATGKFPEPAVQEVIKMVSTNLFRVPNPAPRENKPLESFDMEEEEPVMDPAWPHLQIVYELFLRFVQSPETDAKLAKRYVDHGFIIKLLDLFDSEDPREREYLKTILHRIYGKFMFVEKDCKLADTVIRGLLKYWPITNSAKEVAERALFLWNNDHIEVLIKQNSKVILPIILPAIERNTKEHWNQAVQSLSLNVRKIFMDHDPVLFEECLKKFEEDEAKETALRSKREATWKRLEEIASSKTISSEPAVPPEATVH

SEQ ID NO: 116907 - protein, 163 aa, Oryza sativa
  Clone ID: PAT_MRT4530_20364C.1.pep
RTRGAAHGPVTADGVRRLGIESRRRRRQVQQLPWCSRRPRRETRIRLKHYHCSSQIRINFRFLNRILLRVLLLPIRVSGLGIESSPSSDQRTALISPRPLLPRVDAAPHRISARRRRRRRDAFPDSAWLWRTRRERLRADVPVLLGGGLQQAAARMRRQGDHA

SEQ ID NO: 116908 - protein, 109 aa, Oryza sativa
  unsure (1)..(109): unsure at all Xaa locations
  Clone ID: PAT_MRT4530_20365C.1.pep
AAGSGGGEVRPAAPPTPAGLQPPPHRRIWRRQGPTGVPXPASMPPDLAEARSGPPPLPPPPGRSRLHAAVVRGEGAAPSVVGEGAAAATRGKRGAVAAARGRGGEGGDV

SEQ ID NO: 116909 - protein, 182 aa, Oryza sativa
  unsure (1)..(182): unsure at all Xaa locations
  Clone ID: PAT_MRT4530_20366C.1.pep
MPPNLAEARSGPPPLPPPPGCSCLHXRRIWRRRGPTGVPXTSATTTTAAPXTMHRERERDDAAASPAXPDHSRFHAARSGGGEAEISPRGIESEATFLAQAQVVAWGGESPLLSLDSSAALHSSICSSLDLGVSVFTAHGGGKHRGGRGGQANVKKTSPTPLRENMKRVVGRNARVAEEPVD

SEQ ID NO: 116910 - protein, 89 aa, Oryza sativa
  unsure (1)..(89): unsure at all Xaa locations
  Clone ID: PAT_MRT4530_20367C.1.pep
DCAQFVARNECARVDDNNFQDVRRTTVHLSIAHCGSLRAIPPITNLRTLIIQSXFCLDQEAELMLGEXLRKSAXLRLLYLDVPSLSNAL

SEQ ID NO: 116911 - protein, 144 aa, Oryza sativa
  unsure (1)..(144): unsure at all Xaa locations
  Clone ID: PAT_MRT4530_20368C.1.pep
MPPNLAEARSGPPPLPPPPGCSCLHTAGSGGGEARPAFXTSATTTTAAPPHHAQRERERDDAAASPXPRRTTAASMPPDLAEARSGPPPLPLPPGRSRLHAAVVRGEGTAPLVVALWGRAPPPPLAGRGAPLPPLGGAEGRAAM

SEQ ID NO: 116912 - protein, 599 aa, Oryza sativa
  Clone ID: PAT_MRT4530_20369C.1.pep
MTYQTHPEFYCILCSSLISFTRGAGDVNLFKQHQALLYFDYERLYKMCMMGLTFLLVLKNRASGLIFDHVIFDIKSCLFGRSVMIKQILGRLPKKEKPGKSGEKDLAGVGSSLPDARTTTDLTMSSRIANPNNYTAAVTNPGQNYTVKNAHHGGAGVSNGFLAPPVFEALPSLRDAPAPEKPSLFLRKVVMCYVVFDFTDPTKDVKEKEIKRQTLLELVDYVTSATGKFPEPAVQEVIKMVSTNLFRVPNPAPRENKPLESFDMEEEEPVMDPAWPHLQIVYELFLRFVQSPETDAKLAKRYVDHGFIIKLLDLFDSEDPREREYLKTILHRIYGKFMVHRPFIRKAINNIFYRFIFETEKHNGIAELLEILGSIINGFALPLKEEHKLFLVRALIPLHKPKCVSMYHQQLSYCVTQFVEKDCKLADTVIRGLLKYWPITNSAKEVMFLGELEEVLEATQPAEFQRCMVSLFCQIARCLNSSHFQVAERALFLWNNDHIEVLIKQNSKVILPIILPAIERNTKEHWNQAVQSLSLNVRKIFMDHDPVLFEECLKKFEEDEAKETALRSKREATWKRLEEIASSKTISSEPAVPPEATVH

SEQ ID NO: 116913 - protein, 596 aa, Oryza sativa
  Clone ID: PAT_MRT4530_2036C.1.pep
MLLPTSASACRGSGRALLLALAAALLALATPRPASASESDHKYKVEEPVKLWVNKVGPYNNPQETYNYHSLPFCQPSENPAHKWGGLGEVLGGNELIDSQIDIKFLRNEERGSICTLELDSKKVQQFSDAIDNSYWFEFFMDDLWGFVGETDKNNENKRYLYTHKSILVKYNDNRIIHVNLTQESPKLLEAGKKLDMTYSVKWLQTDVTFARRFEVYLDYPFFEHQIHWFSIFNSFMMVIFLTGLVSMILMRTLRNDYAKYAREDDDLESLERDVNEESGWKLVHGDVFRPPRSLAFLSAVVGIGTQLAALILLVIVLAIVGMLYVGRGSIITTFIVCYALTSFISGYVSGGLYSRNGGKNWIKAMILTASLFPFLCFAIGFVLNTIAIFYRSLAAIPFGTMVVMFVLWAFISFPLVLLGTVVGRNWSGAPNNPCRVKTIPRPIPEKKWYLTPSVISLMGGLLPFGSIFIEMYFVFTSFWNYKVYYVYGFMLLVFVILLIVTICVTIVGTYFLLNAENYHWQWTSFLSAASTALYVYLYSIYYYHVKTKMSGFFQTSFYFGYTLMFCLGLGILCGAIGYLGSTLFVRRIYRNIKCD

SEQ ID NO: 116914 - protein, 565 aa, Oryza sativa
  Clone ID: PAT_MRT4530_20370C.1.pep
RVRAIVIISYLLVLVLAGAVAVEAILGAPPAPGTSAAKVPAVLAFGDSIVDTGNNNYLPTIVRGGFPPYGRDFPGGKATGRFSNGYTMADFIGLTIPLSKQISYFATTRSQMESKLGRLAMSDLLSRSLFLLAVGTMDLLPDCNYFLTFPPAPPDNKTEVQRLVELYNASVTSLYGMGARRFAVVNVGLVGCGPTVDTRRGGGSGGGGGCDARMNGLAAEFNAALGALLAGLRSEKRRLRYSLADFYAFSNATFANPSAAGHNLGLGQKSGLTLDPSWADFGLDDTDRPIFRVLIGRPSVDIGETKPLLLLSRRNPSPFPSLPSHIAALPSAPPSGGDGAPLPASGGGGALPHNQRRGALSPNNGGVEAAAARREREGRRAGPRLRQIWRHGSGCGPARAGEAAASSLSLSLCMVGRCGSGGGGGRHGTPVGPRLRQIRRCGGSCSPAGVGGAAGRTSPPPDSAAWRRLRSDGGGRGGGVVSFSLSVNGVGSPGFVNIDSSCCPGPCMPFPYFNQPPCDNRAQYWFWDGGYTTEQAAMVAAAAFYNGTAKFTTPVNFKQLIRRKK

SEQ ID NO: 116915 - protein, 119 aa, Oryza sativa
  Clone ID: PAT_MRT4530_20371C.1.pep
MAASTALSTAANPTQLCRPRGASSLAKPVKGLGLGRERAQRSSITCQAASSISADRVPDMEKRKLMNLLLLGAISLPTVGMVVPYGAFFVPAGSGGSGGGTYAKDKLGNDIKVEDWLNT

SEQ ID NO: 116916 - protein, 445 aa, Oryza sativa
  Clone ID: PAT_MRT4530_20372C.1.pep
MDPLGGRRRRTAASESGGGWMKGCTSVRARDTRSRNRKRKRTVVPPAAATFPDLLPEEIVVEILARLPVKSLLRFKSVCRGWRAIISEPSFIRTQLQCSASKQEPSILISPHTLLGRCDIQPPVGGLGDWPNNFSTQISFYQWQRGASIARSKAWAAFPANEFHLVCHFAHCDGLVLAPTDTNLYLFNPATRDTITLPDGHGDNHHHGTEMEACYAAGLGLDPVTRKYKVVRAFYRSMDPIRMGMEVFTVGETGAGCGWRETVTDPPYPVSRWLTAFTVNGGYLFWYMDRFRYPNDTLHGGLLWFSLQDQAFRVTLLPHSLDPALDDKVRPDVLHGELCVLHANSDTMPVTIWTTNSPSFDDWERRYCIYVSRLCHPMGLLGDGGMLLWAKHTIHRYDLWSDELTAVCELGGIRYQGGRPPRWKNLFNFSVMPYTESLVRITAAA

SEQ ID NO: 116917 - protein, 34 aa, Oryza sativa
  unsure (1)..(34): unsure at all Xaa locations
  Clone ID: PAT_MRT4530_20373C.1.pep
SFSPMRVRPCXIFLVNLHFTCSYTCPWISLEEIG

SEQ ID NO: 116918 - protein, 78 aa, Oryza sativa
  unsure (1)..(78): unsure at all Xaa locations
  Clone ID: PAT_MRT4530_20374C.1.pep
MDPLGGRRRRTAASESGGGWMKGCTXVRARDSLSRNRKRKRTVVPPAAATFPDLLPEEIVVEILARLPVKSLLRFKSV

SEQ ID NO: 116919 - protein, 216 aa, Oryza sativa
  Clone ID: PAT_MRT4530_20375C.1.pep
MMTECRRLFENTSREVGAQMDRLTARAISSDGRVAQLEMELEVARDDLQKMNEIVAGNEMQRLGLALECGVKSSIPAHPDETSEPKLGRVQRRIGNNVVMDDEWGLALVWSWMTGETERKLCGVDLEFMVREGDRLGGAEAGSRAEIGGGEGVCAPTPHIGGDMEETGEEGIVRDADGRDRGVSEWARERGRGPRGKKEGEKRPGRVEKGRDEREE

SEQ ID NO: 116920 - protein, 111 aa, Oryza sativa
  Clone ID: PAT_MRT4530_20376C.1.pep
MDGGRSKTRKKTSRQVIQKYYSRVTLEFHTNKKGLEEVSILASKRLQDKVARVTTRLMRRIHRGPVRLISLNLQEEERERRMYFVPQNLALQVEHIRVDQGIIELVPALGM

SEQ ID NO: 116921 - protein, 105 aa, Oryza sativa
  Clone ID: PAT_MRT4530_20377C.1.pep
KQQGVSSRSEVSCDFYHVWRDTREVSCDTCQVSDDFYHVSRDTREVSDDFYHVSRDTCEVSDDTYQPSPVDEDGTGRRGGGGERRRRRWGMGAAVVGGDDDGGEG

SEQ ID NO: 116922 - protein, 57 aa, Oryza sativa
  Clone ID: PAT_MRT4530_20378C.1.pep
ARPIAPLQLLLPNRYDVALSLSGNAIPRRYRITNKRHRQLKSPRPFNARDRHALAHW

SEQ ID NO: 116923 - protein, 514 aa, Oryza sativa
  Clone ID: PAT_MRT4530_20379C.1.pep
MSVECLSDWFNNFYDGFPRNSRTWFAYECSKDFEFPIDFRFDEINHERFEKSRMLLSTAISPCILPVGIHQGRKTPVSYKFYHPMSAGRQLGLGQLPIGLFFVDKIQTRGVITSALMMDRLLNILGPPLGSIDNIELAVIWCATFDHWWAEWKKHLFHQSPSMYMTNIFSEQIPQTTKSSPPHISQSGEPIHYAVGIVPNSGGLAPSIISFNAPTTSSLLYGLVRDPVETRRKRAKSSDAKSPPKGKSSKKQKATATDDLPALDPDVEEYRDNEDMEEAIEDAAGDVSETREGGQTPPVDPPSPKKVQSPVKRHPTKKVASKKPSAQLPPPPRTPSPPWQESSERTPLAVVSCGLIRARFEETQRQIPDTYADAISPAMYLEQHRLKLERAMQRIADRRERAELETMIQTNQLSIKGEKAKLDEMEADPSSTQVNINRLRAREAELVAELEKWRADISSQEKKLANLPRAIEQQRLKLKKSIKHLLDLSKSLKMIPSTDALDALAKEEVEQIRQ

SEQ ID NO: 116924 - protein, 59 aa, Oryza sativa
  Clone ID: PAT_MRT4530_2037C.1.pep
MARCGEGLARLGYAIDRAWEKGKRGLGTEGPGTVKAMPWKKLSGDFWKLRKVLFGNFRK

SEQ ID NO: 116925 - protein, 69 aa, Oryza sativa
  unsure (1)..(69): unsure at all Xaa locations
  Clone ID: PAT_MRT4530_20380C.1.pep
PWGKWAAEIRDPKKAARVWLGTFDTAEDAIAYDEAXFKGTKAKLNFPXXXQGRTDLFLVTRGIPPHPPP

SEQ ID NO: 116926 - protein, 95 aa, Oryza sativa
  Clone ID: PAT_MRT4530_20381C.1.pep
MDSPTTSYSTTSAMGRFNPTECICTIALVRYVWATQTGAQKEQLSTRVGCGRVHRIIENDLDKCRVVAPNLPMKTDDLSHSTGRGWTIREKDVNR

SEQ ID NO: 116927 - protein, 127 aa, Oryza sativa
  Clone ID: PAT_MRT4530_20382C.1.pep
NGFIAVALGAGVIGTACKRSVLGASCHISVGFRPPPPGPAAVAAPPVAAGLTSRIPQAPPSVPPRVRECSVRQSSARARRCRARHWGHSRVGGPWDPARGTARSTTGALGPPRNSGPGPPGVPPLPI

SEQ ID NO: 116928 - protein, 570 aa, Oryza sativa
  Clone ID: PAT_MRT4530_20383C.1.pep
MMISGTICVIMEEWSEFASKPVCWVLRCYVRRMQLALYPIFLVAYNTTQNTTSTFMEVVQEVLKHGSTQGVHAAIRSDQKSYNLVQLIASALDVYNILRNKNVPPLSFSMTQNGSTGSSVKGINGTGFLGGARIGIVAKPSPEFVAGIFGTWLSGGVAVPLALSYPEAELLHVMNDSDISLILSTKEHQDIMENISTKCSAHCSLLPSVTSIPVNIDCQEPSSTEVTSSISSLIAEIDSSKEIRGDDPALILYTSGTTGKPKGVVHTHKGIVSQVEFMPKFSVRGIWQRWRESYPNNGSKNDEAITIYAKLLPVLKLLEALWLFDTFGLPGSNNVHTAIARMCGSSALPSPLMKRLIGCSLSWHCLTHCMVHVKKVQLANRFRVLRTILSQAKIIMEDGAETTSEVGELCIRSPSLFKEYWRKPEVTAESFIDGGFFKTGDTVTVDDEGYFIILGRTNADIMKVGGYKLSALEIESVLLQHEIVLECAVLGLPDEAYGEIICAIIVPKEDSKKRAELDSKPALTLEALTSWSKDKLAPYKIPTRLYLWDSLPRNAMGKVNKKELKKLLGA

SEQ ID NO: 116929 - protein, 508 aa, Oryza sativa
  unsure (1)..(508): unsure at all Xaa locations
  Clone ID: PAT_MRT4530_20384C.1.pep
SYSLLSRLRRHFASSSSSSSSRSSSPAYNTTQNTTSTFMEAAQEVLKHGSTQGVHAAIRSDQKSYNLVQLSASALDVYNILRNKNMTQNGSTGSSVKGINGTGFLGGARIGIVAKPSPEFVAGIFGTWLSGGVAVPLALSYPEAELLHVMNDSDISLILSTKEHQDIMENISTKCSAHCSLLPSVTSIPVNIDCQEPSSTEVTSSISSLIAEIDSSKEIRGDDPALILYTSGTTGKPKGVVHTHKGIVSQVQILSEAWGYRSEDQFLHCLPLHHVHGLFNALFAPLYSGSVVEFMPKFSVRGIWQRWRESYPNNGSKNDEAITVFTGVPTMYTRLLQGYDGMDPEQQSASSFAAKQLRLMMCGSSALPSPLMKRREEVTGHRLLERYGMTEFGMALANPLHGARKEGSVSKPLPCVEAKIIIEDGAASTSEVGELCIKRASIFKGHCTKPDVTAKSFIDGGVCNTGGTATVXAXGTFIILGRTNXDIMKVXGGYKLSALEIDSGLYSM

SEQ ID NO: 116930 - protein, 80 aa, Oryza sativa
  Clone ID: PAT_MRT4530_20385C.1.pep
MDRAEAQRVRPSPDEGDPAAVRGGAEEGPATSRRRPQHRAARHGHHGRALGCKGTRQMARRSYRSEVLPRDSGMAKFGGA

SEQ ID NO: 116931 - protein, 43 aa, Oryza sativa
  Clone ID: PAT_MRT4530_20386C.1.pep
IFFLCWAFSLFLSVVCLINYMCKDSRWFFFFSSKLYKVFIPAY

SEQ ID NO: 116932 - protein, 316 aa, Oryza sativa
  Clone ID: PAT_MRT4530_20387C.1.pep
MQELGSDTDDITSVYLRAAGPPATLADGWDPPVIAYLPPRRRRARALAPPPPRIPPHPAFPARLNEGGIIPRDSLSRFPRFSLSLSLGFVRIAPAILADVINGARELRGRFPFSPAAFSPFRRYKIVPRASLFRFRHSPLALAVGFVPAPCSSLSAVAAELRFAAVVAPVLLPTRRHLHRLRRVIADPVRRSASPADRRSTVVIVIPNRAAAFLRSGRRSRRRRCPGVSRRPPFAFPLLSALSGAAPPRRWSPAVTIGARARPPPVGRAGEAAFGRALAAAKWARPSAARARSTVDRAADAWAPTPVDPVRAPSLG

SEQ ID NO: 116933 - protein, 407 aa, Oryza sativa
  Clone ID: PAT_MRT4530_20388C.1.pep
MCSAARGVRRHGSPVIIAWAIVFFSVFASSEAQLQVGYYNYTCPRAEDLVRNVVRAAILRDPGNGPGLVRLFFHDCFVRSLKGCDASVLLDAVPGSNARVEKMSQANNPSLRGFAVIDRAKRVLERRCRGTVSCADIVAFAARDACGIMGGIDFAVPSGRRDGAVSAESDVLNNLPPPFFNATQLVAGFAAKNLTADDMVVLSGAHSFGRSHCSAFSFRLYPQVAPDMDAAYAAQLRARCPPPAAPPATGRRDRVVDLDPVTKLVLDNQYYKNIQRGEVLFTSDATLVSQSDTAALVDLYARNRKLWASRFAAAMVKMGNLDSVLGHAVPGFGVAAASIDISIPCVQLLASCSLPRRRGLPLATMASCAPPPAPSPDTADGASSPTVASCPWLAAPGRDTAATGGGD

SEQ ID NO: 116934 - protein, 88 aa, Oryza sativa
  Clone ID: PAT_MRT4530_20389C.1.pep
MDRRCVHAALLAVVALAAAAAGDNATSNIGGATAAAEAVVVHRRVLATTSIQDSVLDGDRQACLRTPCSGRGQSYTGRGCAKAYGCQT

SEQ ID NO: 116935 - protein, 65 aa, Oryza sativa
  Clone ID: PAT_MRT4530_2038C.1.pep
RTTASGTPSSPFRTRSQNGHAEKLRHLTPSCTHKAPRPGVFFRELMTPRYDTHTIQGEANARVAA

SEQ ID NO: 116936 - protein, 300 aa, Oryza sativa
  Clone ID: PAT_MRT4530_20390C.1.pep
MEVGPPAGGATASNNGRRSIFANEQITPPPSSIRCGFDPTCETSVAAARQGGVGAGASGHGRRGWVAIGSARPSGYARRGGGDAKRRRRPPANRLAAALASSGALDAPDAAADHDNGQRRHRDTVATVPVPSRHRACRLRQRPWPRPRRLLDSFHSSWVRFRVAYITPLLQLLVDACVVLLLVQSADRLVQCLGCLYIHLNRTGEASAAGTASSGTCSGGHLPPASNAELAPPPTPAAQLLSASSSTGADLASPAAVAAAAFLLPQPPATPLVTRARLHHRCPPPKLCLRWRPSERAASA

SEQ ID NO: 116937 - protein, 562 aa, Oryza sativa
  Clone ID: PAT_MRT4530_20391C.1.pep
MAADDAARSSRRMDLNLYLGLPRAPRLRRPDLGSDLALGTPMLSSSPSSSAASADAPPLETEPLHPPYSPPPAELVRPPTPLPEPYDPSAPEAHPPYVPPPVPPPEAIPELADDLEFGFSHPPLLLRPSELLGWVDRPSSSTASSSFRPERVDRYRPPVICLNSRQSRCLRPRRFRSDLPPLGSEAPALENDAAAQPPPQEPMQDTVEENKVVADGAIVGASEEEPAERGKSVAMFECNICFEMASEPVVTSCGHLFCWPCLYQWLHVHSTHKECPVCKGEVTEGNITPIYGRGNSTSDAEKKVAEEGNVSGPTIPPRPHGNRLESFRQKFHHLRPISRRLGEAHGILSSWRRILDQQIMNSVSRFEGPPESTVQEMIDHAHHASRLGRITTRMRARRLQREAENSTFVASSAAESGLPANSTSDLPRRSSSPFSSERIDLLQHFVDLASTERLASAVSDLRRMVRPSPYGASTSSNPPNPPNTELLPVDGNHVAVALAADQASNSSTMAVIQEDAAFTESTGEPSNAGSSRSLRRRGRNDALGSLDVDGVGLHRNKRRRLN

SEQ ID NO: 116938 - protein, 117 aa, Oryza sativa
  Clone ID: PAT_MRT4530_20392C.1.pep
GNPQLRTPPKKPQGSPRPCRTPQRSGLLLPAGVNAAGFTKAAPNRSQIAANTTPDRAALSRSSSPSPVSSQTSDFFSCTTQQNHTSWTQPPPLRDPRRRHIRSGEVERWRRWEEEEE

SEQ ID NO: 116939 - protein, 148 aa, Oryza sativa
  Clone ID: PAT_MRT4530_20393C.1.pep
MDLAAVHAALAGKSYSSVAPLCDDLFLQAASRGAATDGWPYAVHLLAHLYLNDLNSARFLWKSTPQEAKDARPELAAVWRIGQCLWNRDYAGVYAAAQGFEWSPEIADFVAAFLGHHFVVWVGKSGDSDVHTYTSWSNCGNDLSAQSG

SEQ ID NO: 116940 - protein, 143 aa, Oryza sativa
  unsure (1)..(143): unsure at all Xaa locations
  Clone ID: PAT_MRT4530_20394C.1.pep
GGPHSFEIALHGPRFSFLSRKGLXAFSKRFNPGVLGLGLPPPAPKREDPPENVLFWVRVTKVVFFVLGRIPAFFPLGGGCLFSRPANLTGFEASAKTRGPVPGAPQFFPLKLYEPPLVLGGGPWQGCFFPLGPGIPGFFSGFC

SEQ ID NO: 116941 - protein, 102 aa, Oryza sativa
  Clone ID: PAT_MRT4530_20395C.1.pep
GKGASARTFYYYRLLGKWYSSFFLPWKKKPKPYLQRNTHTGHKGVDRSKQTRRPWRTTTREGTTPRLYRDTAGGGDHRTVQGYEQALALMAFLDMADRTVLG

SEQ ID NO: 116942 - protein, 285 aa, Oryza sativa
  Clone ID: PAT_MRT4530_20396C.1.pep
MAHADAKRQEKHKSPLEFFTTSLGGCLGSPGGKSATGCKVGDAFVIEDTTNVKFPREIAVPGYTEPLVILGTVCNLNFSSLLGYREKFFLKIYAAAFYVDCSIGVDTMRWREKVGIETFDASSVFDSIFKAPVVKSLSIILVRDVDGKTFVKALDDIIARQIKKPSAEEEQSLSTFQKTFLGRSLKQGTTVYLTWLEPSKLLRIDAIFHALTYLPSANSLTSQVFLLICDNKISIAGNQDPCQVDAEITSATVNYALYDGFLGSSPVSPTLRSSTALLLEAILTK

SEQ ID NO: 116943 - protein, 277 aa, Oryza sativa
  Clone ID: PAT_MRT4530_20397C.1.pep
MYPIERRLYTLKRYVRNRSRPEGSIAEAYIADECLTFCSKYMDDVETRFNREPRNKGFSNEEAYGVDVFGHGVNFTSAPEYVYDENGIDQMVWFVLNNCAQVEYYVNLFIEELETQGILKKHSTNPEEVDVDIFSLACGPDLRVRKYSSCIVNGVRFNTVNRDKNKKTLNSGVMSQATHNGQLIDFFGNIKEIIQLDYNLEERSVVLFECDWFKLDGKRTALKDDGFFKSINVGSLWYKNDCFILATHATKVFYLPDTKLGENWQVVQTFDHRHFYY

SEQ ID NO: 116944 - protein, 76 aa, Oryza sativa
  Clone ID: PAT_MRT4530_20398C.1.pep
ATLKIHGIICTFHLDRLRHRPALGVGEGGHAGRGKQRSNRIWDCHRRVRPSDEHWLGEAARSGQTPAAVTARHSPK

SEQ ID NO: 116945 - protein, 1191 aa, Oryza sativa
  Clone ID: PAT_MRT4530_20399C.1.pep
MVLHREVEHVREWHNAEELSEEAAVVDADDAEELGEEAVVVDADAVVALVERKGAMDRSWVHSRLFSPEYIDGVKEFMSFIQGKFNENVEILCPCSRCLNQKYQRQAVVKKHILMNGMETTYTRWIHHGESLDVNVIEHPIDMNENNDGSTTMVTEDDNYGDRLEGILGDLQTAAAQARPDVENQVGAEEPRDKESFLNIVMREAKRQLYPGCTKFSRFSFVVRLLHMKSLYRISNSAFSAHMKLLADAFPECNTLPKSYDEAKGILKEMGLGYESIHVCYNNCVLFRKEYEKHDNCSVCGLSRWKDAERKKIPQKVLRHFPLAPRLKRMFSTKEASEAAQWHKLKRQPVENNMSHPADGEAWQDFDREYPGFAKDARNLRLGLATDGFNPFSEKNTKYSMWPVFVVPYNLAPWECMEESNFMMALLIPGPKSPGKDFDVFLQPLVEDLLELWAGVDTYDAITGKSFKLRAAVLWCIHDYPALSTLSGRTTRGYFACLHCDKHPLSYALRSKIGYFGHFRFLPKEHPLRRNNEFTGLHESNDPPGKFCTEELLAELERVKDVRPGKPQGTGKRKRSNSEGGHVEIWSRMVSLWKLPYWKKLKVRHNLDVMHIEKNICENLIGTILNIKGKTKDTAKARLDLKDLGIKKELQFREDGEMPHARYTLSTEQKKAFCAFLQEVKFPDGFASNISRCLNAEGTTVQGLKTHDCHILLQRILPAAMRGFLDSDIYEAIAELGMFFRKLCSRTLNKDVLVQMKKEIPIILVKLEKIFPPAFFDVMVHLAIHLPDEALLRGPVQYGWMYPIERRLYTLKRYVRNRSRPEGSIAEAYIADECLTFCSKYMDDVETRFNREPRNKGFSNEEAYGVDVFGHGVNFTSAPEYVYDENGIDQMVWFVLNNCAQVEYYVNLFIEELETQGVPNIERMLRQGFQTWFRNHILKKYSTNPEEVDVDIFSLACGPDLRVRKYSSCIVNGVRFNTVNRDKNKKTLNSGVMSQATHNGQLIDFFGNIKEIIQLDYNLEERSVVLFECDWFKLDGKRTALKDDGFFKSINVGSLWYKNDCFILATHATKVFYLPDTKLGENWQVVQTFDHRHLYNVSQTEVSAAAYQEDECYDEEDPRRPVSSIIYDTPLNRDDERGPVFEAAEIARLMKESSKEVNVIGDEDEDEEDDTLMEYFNEEDDSVMEVDSDDE

SEQ ID NO: 116946 - protein, 376 aa, Oryza sativa
  unsure (1)..(376): unsure at all Xaa locations
  Clone ID: PAT_MRT4530_2039C.1.pep
MPSFPPPGAVTVCEINRDLVAADAVSDDRAKDAYGDVLGMVFSPIPFQPDAIVAHPRASXATEAAEPAEIVPRTSLASTIAESFKQMIFPSCDPNLLQEIDTQKVSWNPHKHCLAFVSGKNQVTVHDFEEPDNKESYILTSDHQKDVKAVEWRPNSGKMIAVGCKGGICLWSASYPGNVASVKSGVTSSSFGAFPRGLGMPIRRGLSSISLVQWSPSGDYLLTAKLDGTFHLWETNTWTSEPWSSSNGYVSGANWDPEGRIVLLSFSNSTTLGSIHFSSKPPSLDAHLLPVEHPEISSLIVSRGIDKLAWDSSGERLALSFKDGNEMYHGLVAVYDVRRSPLVSVLLVAGAVAGVVRIPSYFARIDSLKGVSKVKR

SEQ ID NO: 116947 - protein, 87 aa, Oryza sativa
  Clone ID: PAT_MRT4530_203C.1.pep
FFFFFLFLSIFNALCICPNIRYDVFGKKNWELNQTLSTRKIISSTYPSSRKNLASNLFKLAYNLSEMCNCILSLSFHLLDFPSFVLR

SEQ ID NO: 116948 - protein, 115 aa, Oryza sativa
  Clone ID: PAT_MRT4530_20400C.1.pep
MPTFAMPIDEKERPGPSVCGGGVMVNRLNIVTLDLLAKRPSQFEPSLQRDVSSVVCIADQPVMHFDTHRPQNPREKKYIWSIHIDRIASKFQCDALNKLVRAGTIAGYKSAVNIF

SEQ ID NO: 116949 - protein, 90 aa, Oryza sativa
  Clone ID: PAT_MRT4530_20401C.1.pep
RLGLGVTFVWVGQPPPELICGFKGFLSSSNHGVHPRNVAKGCKVSAAAMGHLYHMWPQSALLGTWGTKKNQNDRSHWNPTVQWSLINFGA

SEQ ID NO: 116950 - protein, 130 aa, Oryza sativa
  unsure (1)..(130): unsure at all Xaa locations
  Clone ID: PAT_MRT4530_20402C.1.pep
MEAADASINLLQNHRVEHIGAISKQCQHISPSDQTIYIACKQGTEEVISDVLGVEVXFRQTIAGNILVGSFCSPADAINRGSEVVAAGMAVNDWAAFCGADTTATELSVVAWXESVFRDMSRSLVVSSYL

SEQ ID NO: 116951 - protein, 86 aa, Oryza sativa
  Clone ID: PAT_MRT4530_20403C.1.pep
MARLSFLPAGSSESEPSEESVMDLILITALTGFICRSSGSFCHPVCGCKPEAQMGSEEWVMAVCRTIWLPQQFIEGMIHVSQTPLP

SEQ ID NO: 116952 - protein, 1071 aa, Oryza sativa
  Clone ID: PAT_MRT4530_20404C.1.pep
MGNSLRCCLACVLPCGALDVVRIVHLSGHVDEFSCPVTAGAVLAAHPNHTLTTTWSSAGVGCPTKKLVIVSPDSELKRGRIYFLIPSATLPADRRKKSRQSSNKKSKRPSHHHHKSNGAATAASTAEQDNYLRELLSEKTAASGGQRRRRSGSRILESHIMQICERWIVSRFVPLSDVGFLFGLDPVWVLVSLAKWWGIPAVDGISAVKCRSAVSDWICVFDSVFVVEICFWLISLMPRVDKRKKAAKAVVISSDESHYDDSESSENFFDGVSKYTDSSSDDNMEKLLLKIFKKQIAKKMKKKFISSSSDVFRKHKAKKAKGVVKSDGSFSRFSAKYFRRVVSSLSPHQMFVIEKYGFKNLLLFDSGGVPKKFAAWISSKVDLKTSEIILKDRVIPITVESFRDILGLPFGGLSFGKDLNLLSSYDWCKFVYDWCMNRIKKFQKSKNLGGCLYYWAVSYLDTVDFGERNVPIGFPRMSVWKEGMIKRYSDFDKMDDDTFGLRPPRVICSTSNSQLHLEKHYLIMQLLNYVIGEALPNYLKDMISAMESVHAEVHNSTDHIDVGDVHVLDANAHNQFASGAVQNEQQTSPCCNHDVDSYVPLENDLPDNVPLAGNFDNAGDFNCASGYLPSMNTGNASTSVVNDGIAESFGDGQALVTPDVGCAKNFKNSSDERFSASAIATAAAAVKHVAIKFKSRLPQFNGSENVDRAVDMFKPSYKNLFPQDNAGISFHSVEDTPEELIQIKHNHEGTARTPNSGIIKKRVFEDLVNSPDLIIVGESKFHDRCNNMTAQSDLIYNASILPTSTAHHASSLGGKIPPHGPRRVLAPAKYTSDPFVQLHRHFPISDVENRYYIAVCRLADSSKWHSYDAVNIDNVKANFYTFGHSLKKSGHEQLVVDPSFADAEKVQKSFEGAAKARRLDLCDMLFFPIHYQQHWFLFIVDVKDRMFVFVDSKHEEHSEFYENLKTFVVDNFQNLWNKFVGSSLDFSVFKTVFPPVPRQDYESDSGVFVMKFMEIWSPRILLPNEFSKQNINNIRVKYVNQIFFHAKNKMLHTEIEDAVLNWFNPEKFARQ

SEQ ID NO: 116953 - protein, 150 aa, Oryza sativa
  unsure (1)..(150): unsure at all Xaa locations
  Clone ID: PAT_MRT4530_20405C.1.pep
QKQYKKGGRFFGVPKFTSPCLHLFIFFGGGANSISLPLFLQPIHWKTPGLPNLNRFQTNPFFKRWLIMKKARPAPFSKYFPTLIGNGTPPFTAFLTPAVGGVPPSWPLSFASPLAPXSFAFFPFFFATFARFSFLTFKWGAPFRVSCLVF

SEQ ID NO: 116954 - protein, 168 aa, Oryza sativa
  Clone ID: PAT_MRT4530_20406C.1.pep
NLGVGGKTTPPLVFVGPPGGNFPFWKNLGGPRPKKKTAGPPYECLTPFFPIQNLGWPGRGFFLPLDKPGCAFPPKFKGPFAISRGVFFGQPLPSDFRAPPPPGFFFLFWKLPLPPPPPQGQSQKKFPGFCLLAPWVWILEPPPPQFCFFFLKKKKKNKKKKKKPHPPT

SEQ ID NO: 116955 - protein, 275 aa, Oryza sativa
  Clone ID: PAT_MRT4530_20407C.1.pep
MAALSQLLLTVFLAAALLPLAMAATTTTYPIGSFCWEPGMNYGDLNGSDAVVRRRSINFVVSDLVAKARTGGGFATSKAGRGYDAFYGLAQCRGDVSGGDCDACLAQAAKQMVSYCNYTSDSRLWYEYCFMRYDNYNFLGEVDTREDASVTMRQWPDMDNPKAFQKAAGKAMGKATAQAVAVGSSGLGRAKEQYTPFVSVYALAQCTRDLSPPSCAQCLSAAVSKFDKACGSGPGCQIDYSSCWARYEIYPFYFPLAAAGRATIDMTKYTKVTVH

SEQ ID NO: 116956 - protein, 65 aa, Oryza sativa
  unsure (1)..(65): unsure at all Xaa locations
  Clone ID: PAT_MRT4530_20408C.1.pep
XSEEMARSARASELLWLXSVDPGPLAHSXRTXXKAMERIQTGKKXXCPGXHRXDCDXGXXAKLXS

SEQ ID NO: 116957 - protein, 245 aa, Oryza sativa
  unsure (1)..(245): unsure at all Xaa locations
  Clone ID: PAT_MRT4530_20409C.1.pep
MLPLRPHSPPHKPTLTLKPKPKPTWGLCGRTWPSLIKPCGEKGLPLSWGIKSHPISPPXFKYPPVPSYSGETDPKEFLSIYESAIESAHGDENIKAKVIQLALDGIAKSWYFNLLVNSTCSWEQLCDVFVLNFRGTCEEPKTQQDLGIHQRPGKSTRDYMRRFSQARCQVQDITEASVINAALASLLKGELTRKIARKETRTIEHIFRIIDGYARGEEDTKWRQEIQAKYDKAAATATATAQAQA

SEQ ID NO: 116958 - protein, 143 aa, Oryza sativa
  Clone ID: PAT_MRT4530_2040C.1.pep
MASSLPSVLRGCACADGGRLLRDACHGAARGLAAWTRRGGAARALLVASVGSVALAALTVLLVAAFVLVAAATSAAAVAAVVSLAALSALLAVAYVGALSVAVFVVAATTAATVVAITIATGWAALFWIIWFAARKCLDLATN

SEQ ID NO: 116959 - protein, 107 aa, Oryza sativa
  unsure (1)..(107): unsure at all Xaa locations
  Clone ID: PAT_MRT4530_20410C.1.pep
GNRGRVKDCTYHALLTRSRLEHLLPGGMRDNWTADGVIYNGAXNSGGGGLFTGLDFRGIFSLWRLHGNWALPAARRGAAGAPFGKIAGEGSHTGWAGAGGCGGRCPG

SEQ ID NO: 116960 - protein, 122 aa, Oryza sativa
  unsure (1)..(122): unsure at all Xaa locations
  Clone ID: PAT_MRT4530_20411C.1.pep
MAPTAKIAVVGLQSVLPRARWWRWLSPPSLASLPHQIXAWWRRPRADPAAAAPSAPSCLPPAADPAAAASGSGGGGGVGDGRGWIWQRGASRGWIRRQSAVVVSTTAAGGSGGGRGWIRRQL

SEQ ID NO: 116961 - protein, 438 aa, Oryza sativa
  unsure (1)..(438): unsure at all Xaa locations
  Clone ID: PAT_MRT4530_20412C.1.pep
MQSSDPSLPGFFSLPSPKSPDYRARLAPVTADDTRISASLKSGHLREGEAAAAASSSSAAVGVGVEVEKEGKKENKVVVCARCHSLRHYGVVKRPEAEPLLPDFDFVAAVGPRLASPSGARSLVLLLADASDFDGSFPRAVARLVAAAGEXPRLAGSRGNVWAVGARNVGKSTLLNAIAPVLRDXGGPTLTEAPVPGTTLDVIQVDGVLGSQAKLFDTPGLLHGHQLTSRLTREEQKLVRVSKEMRPRTYRLKPGQSVHIGGLVRLDIEELTVGSVYVTVWASPLVPLHMGKTENAAAMVKDHFGLQLQPPIGQQRVNELGKWVRKQFKVSGNSWDVNSKDIAIAGLGWFGIGLKGEAVLGLWTYDGVDVVSRNSLVHERATIFEEAGFTVSKIVSQADSMANRLKNPKKINKKKDNKANSSPSTDPESSNPVEAVDA

SEQ ID NO: 116962 - protein, 145 aa, Oryza sativa
  Clone ID: PAT_MRT4530_20413C.1.pep
SPFWDNNAPSVGFISQGGGRGQVVNPNGKTVFYGGFSRGQLLFFPPPFAVVKKAQKEGWGFFAFKAHPYFLVSPLAGKGFFFRGFPNVVLANAFCLSKERGPGVQHNKGDGLGGFPPIPNKRFPGVFYGGESFLGGLGVKNNLIN

SEQ ID NO: 116963 - protein, 513 aa, Oryza sativa
  Clone ID: PAT_MRT4530_20414C.1.pep
MQSSDPSLPGFFSLPSPKSPDYRARLAPVTADDTRISASLKSGHLREGEAAAAASSSSAAVGVGVEVEKEGKKENKVVVCARCHSMRHYGVVKRPEAEPLLPDFDFVAAVGPRLASPSGARSLVLLLADASDFDGSFPRAVARLVAAAGEAHGSDWKHGAPANLPRALLVVTKLDLLPTPSLSPDDVHAWAHSRARAGAGGDLRLAGVHLVSAARGWGVRDLLDHVRQLAGSRGNVWAVGARNVGKSTLLNAIARCSGIEGGPTLTEAPVPGTTLDVIQVDGVLGSQAKLFDTPGLLHGHQLTSRLTREEQKLVRVSKEMRPRTYRLKPGQSVHIGGLVRLDIEELTVGSVYVTVWASPLVPLHMGKTENAAAMVKDHFGLQLQPPIGQQRVNELGKWVRKQFKVSGNSWDVNSKDIAIAGLGWFGIGLKGEAVLGLWTYDGVDVVSRNSLVHERATIFEEAGFTVSKIVSQADSMANRLKNPKKINKKKDNKANSSPSTDPESSNPVEAVDA

SEQ ID NO: 116964 - protein, 442 aa, Oryza sativa
  Clone ID: PAT_MRT4530_20415C.1.pep
MAAIPLFDLNAPPPEDGDELRGGEAIADEAGVNIAGDEGGGGAVADEVIAQNAGNIASGEGVQPQERKIRRWLSDKERYAVYIALHAKSKGGRLEKDTTKKVAEYFNVGIQVIQRIWKHAREQVALGLKVDVDNRKTRCCGPNKMEIDLSKIATIPLNRRSNLRSLANSLGVSIATVHQKFKLVVDMTKRKKTYYLLPEEEDPLRTVQNKNRIGKVMFLTAIARPRFDEEGNVTFSGKIGTWPFVKEVPAIRKSRNRTIGTLETKSIIVNRDVMRQFLIEKVIPAIQSLWPEEDIGDTIYIQQDNARTHVPPNDPHFLQAVAATGLNIQLKQPSNSPDMNVLDLGFFSSIQSLTNCSSPKTIQELIHAVQEEFDGYEASKINRVFLTLQLCMLEVMKDNGGNRYKIPHMNKQALEREGRLPSWLSCDARVYEKALDCLEQVG

SEQ ID NO: 116965 - protein, 113 aa, Oryza sativa
  Clone ID: PAT_MRT4530_20416C.1.pep
MASHSCPNTSNSNGALTYSREAGKGCSNEKPFLLLQKMTPKYQNGKFRSLPPNGSLLHLDSVSGKRCSNEQYKIKYNTLTQIFLSVTASNKPRNSGPSQGSHLNRTKKCPIEI

SEQ ID NO: 116966 - protein, 101 aa, Oryza sativa
  Clone ID: PAT_MRT4530_20417C.1.pep
QGGPAHGPPPGHPGAPPPPPPGAGPPEGAPPGMMHQGVPSGGAQQGGSGKVLTMAELENMMSVSRPPPGMPPPGMPSPPGMGFPAPPAGGSGGGSPDKRAD

SEQ ID NO: 116967 - protein, 98 aa, Oryza sativa
  Clone ID: PAT_MRT4530_20418C.1.pep
MAMLVVVVVVGLLGVALGAKPNTVDSAKGSGRGQRRRWRGDRDSPAFDSSVEARAMAFSEISYSNSVKMVPYDDDAMPAMNTLMLRGQIICWHEDGAW

SEQ ID NO: 116968 - protein, 71 aa, Oryza sativa
  Clone ID: PAT_MRT4530_20419C.1.pep
LISKGIGFILTAVPFRFQHWRIDHFSFQHLVIHPCMFPTCVPHTRMDAIALSLLSPPWTHSSLAVTNSKLP

SEQ ID NO: 116969 - protein, 98 aa, Oryza sativa
  Clone ID: PAT_MRT4530_2041C.1.pep
YTKGVFKVQIYGITKGFTVFDPTKKRYGEIIAWTGKPTVKVLLTVYAPPVLKIIIQRLSPDFYQQHHQQQQAKSQGKNAAFFFFNLLDFIKNKQCCIS

SEQ ID NO: 116970 - protein, 385 aa, Oryza sativa
  Clone ID: PAT_MRT4530_20420C.1.pep
MAPPPPHRPYKRPAISDQQRRRDLALQAQSARRADAQARARSLANSLLSPSSAAADTAVEGDSERDHEPTVAEAASKLRGSDARRWHVFARPAGKRCLVVSCNGITISRLRNGSILHRFPSALPNGSKRDISGPASSYSILDCIFHEPDETYYIIDMICWRGYSLYDCTAEFRFFWVNSKLMETTAGDPPSTYHRYRFSAVPIYECTLQGLQAAYSGSTPYVKDGLLFYNKHAHYLAGITPLALVWKDEACSQYVIDTDSKGQVPSEQHIVLDLQEDGKLTTSDDPPVVFGSLDNEFIQKSNLRPGNLLRFAVKDERVKLVDGKMEISELQFVGKPNRARAFADSHSKALFQYAARHAPLRIEDLVASIQSNNMELESTDVEMQG

SEQ ID NO: 116971 - protein, 85 aa, Oryza sativa
  Clone ID: PAT_MRT4530_20421C.1.pep
MPRMGSKTVAEWLPSPHAMDGIDDGGGSKPSQWWRMMTIGDRVNRGKGKSIFVVAWITMKRDQLDTWANQQAAQVGYGRVGRCGL

SEQ ID NO: 116972 - protein, 23 aa, Oryza sativa
  Clone ID: PAT_MRT4530_20422C.1.pep
SPLIASNRSRHKASRCHPVRRHQ

SEQ ID NO: 116973 - protein, 125 aa, Oryza sativa
  unsure (1)..(125): unsure at all Xaa locations
  Clone ID: PAT_MRT4530_20423C.1.pep
FFFFFNKTXNTIIXMNXXNWMQHKVAVTRQRQHRCSSTGQSTPQQGRFQIIRKPRAIKFTXRHFTTPTRQNAQPGCNYTPLLYGFTHSTPTTWASQGQAHNNSREPTRXAQSQRSACMNRTAKLL

SEQ ID NO: 116974 - protein, 75 aa, Oryza sativa
  Clone ID: PAT_MRT4530_20424C.1.pep
GCPPIPHGPPPRGVRPEVATYGGLGVRLQVPTYPHLWRPERSRHAAFNVACGVLNRSVIGRMTDGTRSLHPLNGE

SEQ ID NO: 116975 - protein, 140 aa, Oryza sativa
  Clone ID: PAT_MRT4530_20425C.1.pep
MNATENAKGPIAKGDGERRQCKHHIMWGVRQNNDGFDNASAGDISDDSFTDGPLRQNKSMLASEQNDTNIYSGLWSNNSSGVPTVPYICMHDLSMTKDERQVYVFREKNTKLSVDLETSMLRLPGRPNLEFTLGIGKASQ

SEQ ID NO: 116976 - protein, 94 aa, Oryza sativa
  unsure (1)..(94): unsure at all Xaa locations
  Clone ID: PAT_MRT4530_20426C.1.pep
TKDIQKPDEPQPGXETQAESPLPEALQPESSLPVTQAPNTPWCNPTFLVFLNAIASCCLRDVLAWHCHGTSQQEQARPWESVVSXSMESKLGAT

SEQ ID NO: 116977 - protein, 454 aa, Oryza sativa
  unsure (1)..(454): unsure at all Xaa locations
  Clone ID: PAT_MRT4530_20427C.1.pep
MDDYFFLQSLLLCVAAVALLQLAKVAATMIAMDELFYQSLLLSVAAVTVLQLLKLLLVAASXPRTPPGPWRLPGIGSLHHLXVNVLPHRKLRELAAVHGPLMMLQLGETPXVGYGWADILFSPSGDYWRKLRQLCAAEILSPKRVLSFRHIREDEVTARVEEIRAAAAPSTPVNLSVLFHSTTNDIVARAAFGRKRKSAPEFMAAIKAGVGLSSGFKIPDLFPTWTTALAAVTGMKRSLRGIHKTVDAILQEIIDERRCVRGDKINNGGAADDQNADENLVDVLIALQEKGGFGXFAGGTGTSASALEWAMSELMRNPAVMKKLQGQIREAFHRKAVVTEADLQASNLRYLKLVIKEALRLHPPAPLLVPRESIDTXYEFIPFGSGRRMCPGFNYGLASMELVLVAMLYHFDWSLLVGVKEVDMEEAPGLGVRRRSPLLLCATPFVPAAVSADY

SEQ ID NO: 116978 - protein, 157 aa, Oryza sativa
  Clone ID: PAT_MRT4530_20428C.1.pep
MDELFYQSLLLSVAAVTVLQLLKLLLVRHRRPRTPPGPWRLPVIGSMHHLVNVLPHRKLRELAAVHGPLMMLQLGETPLVVATSKETARAVLKTHDTNFATRPRLLAGEIVGYEWVDILFSPSGDYWRKLRQLCAAEILSPKRVLSFRHIREKQVMM

SEQ ID NO: 116979 - protein, 553 aa, Oryza sativa
  Clone ID: PAT_MRT4530_20429C.1.pep
MKVYITSAAPLAGEATKAMASPPSPPPHQHQQAATRRGCRSAVVTGLLAGVLLFRAALLTIEAGASLCPSTTGCLDWRAGLGDWLYGGSGDAMEEFMKEWRRGRREASLLDPVVVEAAPDSLDGLMAEMDTMLASYDRLDMEAVVLKIMAMLLKMDRKVKSSRIRALFNRHLASLGIPKSMHCLTLRLAEEFAVNSAARSPVPLPEHAPRLADASYLHVTIVTDNVLAAAVAVASAVRSSAEPARLVFHVVTDKKSYVPMHSWFALHPVSPAVVEVKGLHQFDWRDGGAIASVMRTIEEVQRSSMEYHQCDASVVREYRRLEASKPSTFSLLNYLKIHLPEFFPELGRVILLDDDVVVRKDLTGLWEQHLGENIIGAVGGHNPGEDGVVCIEKTLGDHLNFTDPEVSNVLESARCAWSWGVNVVNLDAWRRTNVTDTYQLWLEKAISSLILLNMDAVFLVTNRESGFRLWKMGSLPPALIAFDGRVQAVEPRWHLRGLGWHTPDGEQLQRSAVLHFSGPRKPWLEVAFPELRELWLGHLNRSDSFLQGCGVVE

SEQ ID NO: 116980 - protein, 73 aa, Oryza sativa
  Clone ID: PAT_MRT4530_2042C.1.pep
MEVQACRRSWEGQDGKAGSFQTCCRMKNTEQQDYKAISLLAILIEVVLPERLSEDTNQLSRRPSFVLGMRGYH

SEQ ID NO: 116981 - protein, 72 aa, Oryza sativa
  Clone ID: PAT_MRT4530_20430C.1.pep
NTRHLKSLKQDISQTNELGSTFSSSSSTSIYAKKRSQKLENILTTKVPTHAQPCKAYKTVSSYNREAHLKYL

SEQ ID NO: 116982 - protein, 63 aa, Oryza sativa
  Clone ID: PAT_MRT4530_20431C.1.pep
KWNLNKNSKTPPVPETQGIPRNSFTDPVENHIFSNWKPKKLQLQLGKNLTALKIKISETLSNK

SEQ ID NO: 116983 - protein, 509 aa, Oryza sativa
  Clone ID: PAT_MRT4530_20432C.1.pep
MPQLPATGQIDLRASVISPSNSSHVRDRDELTAVGRDRSNGANRVTGVAGSDVHCLESLVEVDVFDTIFRCESCMNDQKSTSKCTFHETRDVVIVLQRFEPLTLGGYRKIGELINFPTELDISPYMSGVVTDKHIYELFGIIVHEGGVIGGHYRSYVKTNCWYEVSDRDVKRVNENFVLGAQAYILFYNRKEEAKSFDEVLAFAATAMSSSDAVPTSTSKDYTERTLSPEVSSAALSCWIDAARVLEPKSYSDQDILEKYIICMDRDSSDVSERIRNAMRNCNESRQEYHFNLPTTDGPFYDDNLGQYCLLRGARFRTISTSSNVEAKRDRAVRMHFLLSEILKLLQLKPTRPVGAIGYLEKFKFGNYSRSALLRRINDACMLLGTNRLSLNISVMSRGSIIGPVLFKVGEDVMIDASLRAVQIPHDIHLVDHIKLKKPVSFVLVVEKLSIFNMLVNLNFHVTHNCIIITGCGKPDMATRGAVFKLNYCLPVKVYILADLDLDGLQIYL

SEQ ID NO: 116984 - protein, 144 aa, Oryza sativa
  Clone ID: PAT_MRT4530_20433C.1.pep
MMMHGAVGQGDTEEDSFPFTSISRKSTWHNGRAGGGGRVAAVAEARELGEGAVVGDGAAAVAGARESRKRAVVVAGAEGENGGGGPSRGRERAGGRRQGRERRRWPEPVKGAATVAGAGSGGGRGWRWCGAGAGGGGIGGGGRS

SEQ ID NO: 116985 - protein, 414 aa, Oryza sativa
  Clone ID: PAT_MRT4530_20434C.1.pep
MGDEKHPSSKLSEILRPGKLLHRRRRLVSEFADVGREDALHESDTVKYRVFAGTWNVAGVAPPDDLDLGDWLDAKADSYDIYVLGLQEIVPLNARNVLGPTRSSAAMKWNSLIGDALNRFTTGRRRRDDDDDEGAQRHGQQQQPFRCVVSEQMVGIFVSVWARSGLRRHVRHAAASCVGAGVLGRLGNKGAVSVRFLLHGTSFCFVCCHLASGGKDGDAQLRNADAADILSRTTFRRRTTAAASPAPEELPLPRKILDHDRVVLLGDLNYRIAMDDAEARLLVRAGKWSMLLENDELLLELAEGGSFDGWREGLVTFSPTYKYHLNSDMFYWSIDAAAGGGDKQQQRAPAWCDRILWRGKGMRQASYERCGGYRISDHRPVRALFDAVCELAGGGVGVEHSAAGIASFGHVPLL

SEQ ID NO: 116986 - protein, 65 aa, Oryza sativa
  Clone ID: PAT_MRT4530_20435C.1.pep
QIKCTAYRNMKLIWVNPHGMSYKVGNKEFSGVAMPSVGLPVSVSNAWISSDAISQLAAYLSFQET

SEQ ID NO: 116987 - protein, 416 aa, Oryza sativa
  unsure (1)..(416): unsure at all Xaa locations
  Clone ID: PAT_MRT4530_20436C.1.pep
WQQQLQPHDQQAASCSVTAGMMMQASGYDMAELDHIFLYLNSQDQASAAIQEQPRKPHIYMHLLLSPNLQTLNIFPSQPMHAGEPSPKGSSSHHGGASSAAASEHEGPKTPDAKTLRRLAQNREAARKSRLRKKAYIQNLETSRIRLSQLEQELVQRSRTQHVSTXGAILGGGAFSAGIGGQSPGIYNQAAWFDGEYARWVESHERMMAHMRAAVEEQPQHGGLRQLVDAAVAHHGVLVELKAAVASADVFHLVSGTWLPAAERCFLWIGGFRPSELIKMMARHAEPLTEQQAAGVYGVQQSAREREEALDRDLHATHHALSDAVSSDSLLLFPPGTGATAYSDVAMAHLSLAISNLSSLEAFVRQADALRLQTLYKLPQILTARQSARCFLAIADHSHRLRALTSLWLSRPRHPD

SEQ ID NO: 116988 - protein, 67 aa, Oryza sativa
  Clone ID: PAT_MRT4530_20437C.1.pep
MWSLTTLPAGHRAIGLKWVFKPEKNTADEVVKRGVERQGVDFDEVFMLVVRLDTMRVVLALAADRIA

SEQ ID NO: 116989 - protein, 63 aa, Oryza sativa
  Clone ID: PAT_MRT4530_20438C.1.pep
PHPQRVVGGPLLRRGESGSWTTGHPGRPNSITPTLATGACLALALMRPQQHLRETADRRNGRN

SEQ ID NO: 116990 - protein, 126 aa, Oryza sativa
  unsure (1)..(126): unsure at all Xaa locations
  Clone ID: PAT_MRT4530_20439C.1.pep
FFFFFFIVESNRNFYSTWKXRXXHHCTRWSKHSSRSGSHPPVEQGIFSRTVPMAVVSTKFIATGTHPHLFILXLLTSFPPTHLSSPRHTVRRHAHMASIVHHGGHGCHAQQHHXXNTSCTVLXSLT

SEQ ID NO: 116991 - protein, 129 aa, Oryza sativa
  Clone ID: PAT_MRT4530_2043C.1.pep
VPNKHLTFVNLAAPWFTQDNVSLFWSPKLRGTYPPQNSYQDGVLWRILRAHDCMFPAQRHLRGEASRSFFHQTNRTRGALSPHPHYLLAPASILLGTQSPFWAMFFLDCYTSLALCDCSIVTLLISGTG

SEQ ID NO: 116992 - protein, 151 aa, Oryza sativa
  unsure (1)..(151): unsure at all Xaa locations
  Clone ID: PAT_MRT4530_20440C.1.pep
AHAAHAFGKEKEKGELQPWANQLCAATSVPKLHGXRTYYCSRYMVTLPSMRMSKKRSQGIRCDYIGSATTGIMVTTTTLLLIAGRVALAPSANRKSTAGLKLEARDSGLQTGDPVGFTLADTLACGAVGHIMGVGVVLGLKNIGVLDQIIG

SEQ ID NO: 116993 - protein, 1402 aa, Oryza sativa
  Clone ID: PAT_MRT4530_20441C.1.pep
MLHTPMLCVVAPPNMLQHAAICLPHNAHNQLQHAQMHRQHKCTAQQECTGESQAGGTGQQAQAIWSGRRRGALRIELRVDGFGRVERELDSIFAEARGRRRREREREREGRHMRVTVTPKDEERLVVLMARERPRSAVVAPGGDLVTAGGGGGGGGGGEGSDGDSSGSLEEISADDFKKESSAAGGAAAAAAAQQRSRVWMGYNIPRSYAPAFHSFAWAQAVQNKPLVPRAADAADEDEVEHVVDTSDEEKEEGEIEEGEAVQTTTTSSSSPPCAQPPETIDLDSDAPEKSESMVAMYGGGAAPAGAEEEEVDFDQRVGSILEELEMVSIEEAEKYGLMILLYGKVHVLDVFWCMIQLLRDPILMFCRSFEGACTRLRTCFENLKPLFPESGSPMPMLDALVQQAFVGIDTITTVANSYDMPKREQTKNMLLKLLFHIKNRYSDMLTPDQRDELDSRVRQLVFEDGKDNANGPNATSTNAAAPSGQVLSERLPFESGAGNSFSKVEIPAKNRMVSPLLDLHADYDENSLPSPTRDSKPPFDVPKPIGYGALPMAPDRPSVLERVEPAKNSSYQSFNDALKAVCYYQQKHGQKSNFASDDLPSPTPSGDGDKSGDKGGDVFGEVSSFSASNKIALPIVNQMPSRPSTVSSNSDSFAGGPPGYAKQIENSVSGSNHLLKATAKSRDPRLKFLNRDTGGVADANRRVNFAEPNPSKDRTMGGGVSINSRKNKAVDEPMVDENALKRSRGVIGNLRDMQPTGRGGWAKDGGNISSYSSDGFQPNQNTRLGNNTTGNHNIRTDSTLASNLNNTTNNSGTSPGIVQAPQTNSAPQTSSAPAVSLPAMLKDIAVNPTMLMQWIQMEQQKMSASEPQQKVTASVGMTSNVTPGMVLPLGNAPKTTEVAAVPSVRPQVPMQSAPMHSQNDTGVIRMKPRDPRRILHSNIVQKNDTVPPVGVEQAKSNGTAPPDSQSSKDHLLNQDQKAEQLQAIALPSLPVTSSARPVTMNANPVSNSQLAATALMPPHGNTKQTSSSVNKADPRLAAGQNESNDDAATSTGPVTAPDAVPPASPYGDVDHLLDGYDDQQKALIQKERARRIKEQHKMFAARKLCLVLDLDHTLLNSAKFIEVDHIHGEILRKKEEQDRERAERHLFCFNHMGMWTKLRPGIWNFLEKASKLYELHLYTMGNKVYATEMAKVLDPTGTLFAGRVISRGDDGDPFDSDERVPKSKDLDGVLGMESAVVIIDDSVRVWPHNKHNLIVVESRRQFGLPGPSLLEIDRDERPEDGTLASSLAVIERIHKNFFSHPNLNDADVRSILASEQQRILGGCRIVFSRIFPVGEANPHMHPLWQTAEQFGAVCTNQIDDRVTHVVANSLGTDKSCQAPTTSHRLLRGGLLVAVTHRDQGW

SEQ ID NO: 116994 - protein, 776 aa, Oryza sativa
  unsure (1)..(776): unsure at all Xaa locations
  Clone ID: PAT_MRT4530_20442C.1.pep
MPSSPRSSSSWSPPAAARLGRARSPSTGGGGGRARALTVAEKTTSWLRTADALRDITGRCSIPRGFTALLAGDLPACAPPPPGAAFVYVAAMEEERLMRLPLQPFFAAVLAHFGLAPSQLTPNAWRLLAGFAALCRRAGVAPPPPPPLTVFRHFFTAIGCPPGAWYSFRARGSASTGSLFTRLSNVTMNPWWKEQFILVSSPAPWPCPVRWGKPRKHANFPPVLTTAEKDMATKLLLARGSSLIDLTTYNSIAAAKNIIAPPPPPRTLKSERAYASVNAMMREPRPHKAPMAAAAEEVDVKSEPDLDGPACAPSSSRKKKRKMVDDDAIAVEGPSGHGGGGGGWPALYPACLPPPGFKKLDDDDDGHEGGWKAARQLLQGAVTARRERAFAASKPADVVAASYVAMLQAANHVAFSLGYALELEEKARARERDAGAAEAATPREELAEVKDELAEMETAVEAMRAKLAKAKSAIAAAAASAAQPEPERIKSSWGPGGARSARRRGTNTAWREEASNEMPRALGGSEAFKLAADEVALYRPLPGRGAAVRAVAAWGGTPXLGAGQPPRRSPPGARTLGQLSAGAPPQAPATTTAGTPPPLTIHRQIRXGTQDNTGKGVKPASPATLPPLPPITEVTEPLSGVVVPDPVHKVPKAKADWWKVAGTRFPVLRRIARDIFTIHVSTVASESAFSTNGRVLSEHRSRLTSKLLEALMCQQDWLRNKYKVDEKDKEQASFWSCLQDIQEGLQWADLVSMGEGLAAAVAASGVGSGGHGEKPC

SEQ ID NO: 116995 - protein, 30 aa, Oryza sativa
  Clone ID: PAT_MRT4530_20443C.1.pep
YIVCSSASCILVPIAYSWLLNLTSESRELN

SEQ ID NO: 116996 - protein, 486 aa, Oryza sativa
  Clone ID: PAT_MRT4530_20444C.1.pep
MANEEQYDWYDADGDVTRYLLDPTTDIAMFSEPPVVQISRFDPCSPPPPARMLPGGQQQQPHPAPGGLDLRSDEIHALKQRRRPPPNPQSSSPPEGLLGAANPDRPDDDELDAILSSFRDEAAHGDSGGGVARVQVLPVEQDANLVPSLPLRHGQLDCSRCHLVRHVMHVAGIENYKTQEKHMNVRLIGPLSKWTQEWASEFIARNIDTMRNNTNGQLLDSGYSNLVESVRTNVNVPHTAVEVNLLQTIMSAPSADHHQNAADQVAAPAAQPFSAAPPVALPPKAAPRKARKDRDYASMLVAVEEFYVAATSRPVPNSDVEILESSHVSQQQDGGRAIIYPSLQARRGKTKQEVPRRNAKDVLEYLSLARKETEKEINTLSSFDGIYRNDGTLSYLMTEVRRLNRKIWRLQKNAPSTLSSRLLASVKEIDDIKVEKGRLSRIAIKVVVLGSPPLDPHEADDVGVTVTIEVIIPGLPPLRLSRSHQH

SEQ ID NO: 116997 - protein, 73 aa, Oryza sativa
  Clone ID: PAT_MRT4530_20445C.1.pep
MATATVTVEEMKRRRRQPSGLDAARAFLAGAGRDGLVCVVKTMSWLPETGGSDALCVVSFLEASSRRSPVLFL

SEQ ID NO: 116998 - protein, 482 aa, Oryza sativa
  Clone ID: PAT_MRT4530_20446C.1.pep
MGRNHLCLVTCLWILSCAVLLHASPDGLLRISLNKKRLDKKTLDGAKLAREESHRLRADGLGDDIVPLDNYLDTQYFGEIGIGTPPQNFTVIFDTGSSNLWVPSVKCYFSIACYLHHRYKSKGSSSYKKNGESCSISYGSGSIAGFFSEDSVLVGDLAVKNQMFIETTREPSLTFIIGKFDGILGLGFPEISVGGAPPIWQGMKEQQLIEKDVFSFWLNRDPDAPTGGELIFGGVDPNHYKGSHTYVPVTRKGYWQFEMGDLLIDDYSTGFCSGGCAAIADSGTSLLGGPTTIVAQINHAIGAEGIVSMECKQVVRDYGDMILEMLIAQASPMKLCSQIGLCAFDGTRSVRNNIESVVDKEKVGSDLSCTACEMAVVWIQNQLRHNQTRELILQYADSQYCDEISNMPNLSFTIANKTFTLTPEQYVVKLEQQGQTVCISGFMAFDVPPPRGPLWILGDVFMAAYHTVFDFGKNRIGFAESA

SEQ ID NO: 116999 - protein, 158 aa, Oryza sativa
  Clone ID: PAT_MRT4530_20447C.1.pep
QIGLCAFDGTCSVRNNIESVVDKEKVGSDLSCTACEMAVVWIQNQLRHNQTRELILQYADQLCERLPSPNGESAVDCDEISNMPNLSFTIANKTFTLTPEQYVVKLEQQGQTVCISGFMAFDVPPPRGPLWILGDVFMAAYHTVFDFGKNRIGFAESA

SEQ ID NO: 117000 - protein, 1262 aa, Oryza sativa
  Clone ID: PAT_MRT4530_20448C.1.pep
MKRLGLLRTHASLDEVLAEYVTMFNGPLPPHIITALTSIFDLDYDDDGNGDQPPEEALLKVVGEATPLNQQEDKESTIAEHFRHVMGWLEPRSCDLNWPVLGYTPIDLSELDDPFTEAEIRKAIKEMPVDKAPSPDGFTWKFFKSCWDIIKNDVVAAFNALHDSRNTHFNLLNSANVAIHLVEHEEDNITWKLTNHGEYTAASAYNAQLLGTTATNFNRLIWKAWAPRKCKTFACDGDGTRGRSSPAVLKRGRSQPAVPQARRLSVRKGRNTRASGWNSPAVRAPGEELADGGGGNELVGSSNGRKRRRWLWGVAEPVGSGSGRGGGERRGAVETVCCLMSRELELLLFLLALRVGFYHAKCPVAEDVVLGEMRMILEEDPTLAPSLHRMHYHDCFVQGCDVSIMLRSRSGKGERDATPNRSMRGYDAINQIKERLESICPLTAAPHRRRPDRRRSSDQKKGRGERDKGERGEEEGKEREDDIAASWPIGHRICPMTEVAGATSTRRHATDGGAEAVSSGEMGAVAEGRGGGGGGAGGWGALDLHLGWCPSEIELDSLKVRKLLEEEKCNLCDLFTYMRFFVLDCWFGLDEGYRPSWAGLGWAKGLPLKCWLNQTSLFVNDWAIRIVVLCSFAAHLVLTLFAGIRRRKATGVRALVLWLAYQLGGWAGTYALGSMSLGRTTQQQQQQLAFWAPFLLLHLAGPDNITAYSLEDTVLAGRQVLTVTVQILGASYVLYKQIYNRDGGGSALLWVSVVMFAIGIAKYVERAVAIRQANLGKMRSSNKKCKLGKRSFGDVKEVGNERTLLVAHGLLHITKGAFIDHSDDENPLKSDAARSQIFGHGWEEMCRVVEMELSLMYDILYTKVAVVHTWFGYIIRLASPVVSATAFLLFWFQGKDEQRRADVLITYILMVGTIILDVRWLLRAMVSTWTYSFLNNRPDCWFHAACLSSGRWRLLRRLVLCLDPCRLLGKEPTRYRMWSGTVGQYNLLHECTHGTIGMFGSLLKKVVSDDSWMEYQYHDARGLAISSEVRELLFQQIWEQLKTAYPAATVEKTNLLSCSSLGYAGSAWKNRELDEAMNFAHAFQETILIWHIATDIFLLVSRQFASPSNSKQVQVIMALSNYMAFLVAVRPSMLPGLKLRSLYKETHKALVEILLKEGYSGSLIERKEKLADRLIEMEKEKQVQISNAPKKVAFDISLMLDYIFNAWVRILMYASVRCTLDSHAKQLACGGELTTIVWILNEHAGIFRIPGDARDETGELGT

SEQ ID NO: 117001 - protein, 65 aa, Oryza sativa
  Clone ID: PAT_MRT4530_20449C.1.pep
MSSGMGGRQGDGSSTEAAMSSGMGGQQGNNNATEGMEEWWKSINHSVGLGSGFGMTSRNNFLFQL

SEQ ID NO: 117002 - protein, 62 aa, Oryza sativa
  unsure (1)..(62): unsure at all Xaa locations
  Clone ID: PAT_MRT4530_2044C.1.pep
NDGAQPPAPGGARARVRCERRLHLARVASLRGSPSRRVAPPAAAAVSGRVVDPGVRXRYRRR

SEQ ID NO: 117003 - protein, 732 aa, Oryza sativa
  Clone ID: PAT_MRT4530_20450C.1.pep
MARLGDPSTRPEEEECFIPTPHVTEVELKEWESTAVITWAAKAPASTTPKEVEAIFMEELHLREGEVVVSRHHPEAFIIKFAHQRHCVEALKRGSVKRHGIELHFVKWRSLKSALGVALMFRKKSTTTPRRWWRSTIPRPSPRQSAAFCRGTSEWRMASRSRSECSQSSPTIQRRHAWRRIVGAVSGVTTATSTTTTRTAALQIVLMRITEATARKRGTGATTATKGVATDADSTTTTTPSSSAATAGGVTTTATTTMTTAIEGQAVVVKHGEAVTPPSRQDATKNITDVHKHQPLSGEHAIVAPVADFNSFLAKAHNLDAALQIDWTALQIGSPAPLTASVREHDKGNEAWSMAAMGQCSGPEEMGRQHVDIPVRAPASVIDDLEQALAKMEIAAAAATPESCRGMSPPPSLLRSRQSAHGPVTDHGLGQVDGVEARHGPPLIGPAKVVGEQAGQLPVGPPGVGSPGLTRQPSPTGLASKGEEDEAIFKTRAHEATEKVAAAPLPGTHNRTPPALTQATGGSSPTADHTSPHSDRLGNLFKAVTPPLLDRLSSTPPAKSRPILAKRCRIARLAEYCSTNPRRSSRLAGKSKMPPMQKCHRVLMKRLGLLRTDASLDEVLAEYVAMFNGPLPPHIIAALTSIFDLTTTTTAMVTSHRRKPCSRWWEKVSLISPMRSTKWRLSLLAAAWSKLCLHVSSSPPYHVVYSTALLCFSFVAPCGALDAARPFAMRWA

SEQ ID NO: 117004 - protein, 59 aa, Oryza sativa
  Clone ID: PAT_MRT4530_20451C.1.pep
LRQVGLPPQSPHNLSSCLPTASGGLGILNLEKFARALRLRWLWHEWKSPRKAWVGSGTP

SEQ ID NO: 117005 - protein, 241 aa, Oryza sativa
  unsure (1)..(241): unsure at all Xaa locations
  Clone ID: PAT_MRT4530_20452C.1.pep
LANAARSAAARLASQSRLAGQSNFPVRHAHLHQPEEECFIPTPHATEVELKEWESTAVITWVARAPASTTPKEAEAIFMEELHLREGEVVVSRHHPEAFIIKFAHQRHCVEAXCALESIETSLLHPPDTRWISVWAWTGNLSSIPKRVWLIFTSSTRSKKLDTVTVSERPPKXTSATVALDDSAAITPAKRRLPPWHLGVADGEPVPERVFTEFPHHPPPPRVEEDRGSRIRGDRHDVDRH

SEQ ID NO: 117006 - protein, 79 aa, Oryza sativa
  Clone ID: PAT_MRT4530_20453C.1.pep
MIPKLEEQVAFDISVMLDYIFKAWVRILMYASVRCTRDSHAKQLACGGELTTIVWILNEHAGIFRIPGDARDETGELGT

SEQ ID NO: 117007 - protein, 60 aa, Oryza sativa
  Clone ID: PAT_MRT4530_20454C.1.pep
GERYHGPYGVDLRFTAYTRAMSALDPFRARPPCGGFGFRGRLAPRPVESPPVGRGVRPRL

SEQ ID NO: 117008 - protein, 82 aa, Oryza sativa
  Clone ID: PAT_MRT4530_20455C.1.pep
RLSSKSCQQPSASFLPDKEYVSLFQSRCRTNGLHYRSIVPVLPVQSCVLECILQGCLKSPRGNFSHKSQEKKQTAASLSLKG

SEQ ID NO: 117009 - protein, 1428 aa, Oryza sativa
  unsure (1)..(1428): unsure at all Xaa locations
  Clone ID: PAT_MRT4530_20456C.1.pep
MECFQLFLISWSPTDVVAPVQHIVDVVPLSSTHTICFCLHDPYTRYSSVSPRQPIFKTPAHEATEKVAAAPSPGTHNRTPPALTQATGGSSPTADHTSPHSNRLGNLFKAVTPPLLDRLSSTPPAKSCPILAKRYRIARLAEYSSTNPRRSSRLAGKPKMLPMQKCHRVLMKRLGLLRTDASLDEVLAEYVAMFNGPLPPHIIAALTSIFDLDYDDDGNGDQPPEEALLKVVGEDDLLFVLLHLRDDTIYMHAFDAPPHSTVITTPRLSCTCTRMRRQRQRAPHLTCAVHNFMAETNCTIACFQETKLRAMDDGLARFLSGYKLDSYAIKPARGTRVGILLMWNSNLVDINEVRLRRFSMIARVNLLHNSETFFITAVYGPTTHREKYAFLRQIKRLKPADREPWLLFGDFNMIYRACDKNNNNLNLRRMGHFRAALEHCELKEVHLQNRRFTWSNERRKPTLVRLDRFYCNENWDLGFGHHILHALSSGTSDHCPLLLTNPQGPRRPRSFKFENFWTSLPGFKDEARGICSEAKLKYLMALDVIHRLDVAQEHRDLTQAEYRLRLGLKRILLGFAVIERTRKKQASRITNIKEADANTKFFHRKINARRRKNHIHRLKKHNGWAVTHEDKESTIAEHFRHVMGWPEPRSCDLNWPVLGYTPIDLSGLDDPFTKAEIHEAIKEMPIDKAPGPDGFTGKFFKSCWDIIKNDVVAAFNTLHDSRNTHFNLLNSANVVLIPKKEGAEGIGDYRLISLVHGFGKIFSKVLAIRLRPLMQSLIPTNQSAFICGRSIHDNFMYVRNMVRKYHRTRRPILLFKLDISKAFDSVRWDYLLSLLQNRGFPPKWREWITGLLSASTSKIILNGTPGEAIKHGKGLRQGDPLSPLLFILAIDPLQRLLDKATELGAISKLRGKAVRFRTSLYADDAAIFINPNKEDVQAFTDLLGRFGHATGLCTNLQKSHVAPIRCHNLDLDDTLMDTPATRANLPMKYLGLPLTTSRLRKTDLQPLYDKSMSRIVGWRGRHIGLAGRSTLVKAVLTSQPVFLLTGLKASKESLEVLDKQRRKFLWAGGEALTGGKCKINWTRTCLPTASGGLGILNLEKFARALRLRWLWHEWKSPRKAWVGSGTPCDDTDKLLFAAATTITIGNGAKISFWESAWTQGRRLKDVAPLVYAASKKKRXRTLQQASQANQWLLDLDLPGTAGWTTDLIDQLVGVWIAVQAIHLVEHEEDNITWKLTNHGEYTTASAYNAQLLGTTATNFNRLIWKAWAPCKCKTFAWLIIQNRVRTSDRLATRGWPNGSICPLCRRTQETTLHLLAACRYTRRVWAALAEWATCEQLNPSQWRQTSTVLDWWEATANIQETPKKALRTLMLLVALEIWNERNRRTFQQKELSATSLLAKIKEEAKTWALAGARSLNSCFLLVSSDQRS

SEQ ID NO: 117010 - protein, 171 aa, Oryza sativa
  Clone ID: PAT_MRT4530_20457C.1.pep
MDDIMNKLGGYWLGQKADKEISSAGDDIESLSTSVGEGAKWLVNKLKGKMQKPLQELLREHDLPEGLFPREATNYEFSPETRRLTVHIPAACEVGYRDGSVLRFDATVCGTLEKGRLAEVEGLKTSVLVWLQGRLRRADRRQGVHFTAGIRKSRSRDAYEVVRGGIIVEEF

SEQ ID NO: 117011 - protein, 109 aa, Oryza sativa
  Clone ID: PAT_MRT4530_20458C.1.pep
HASGLSRPPSSCIPLAPAAAHLGRRRDATGATIGSLRTSSGLSLPPPVTSIAANVGRALSPPPSPDPCRSAPATTTPTAVVLPQVLTGHTREEGGLIWCPHPPLQKSGG

SEQ ID NO: 117012 - protein, 117 aa, Oryza sativa
  unsure (1)..(117): unsure at all Xaa locations
  Clone ID: PAT_MRT4530_20459C.1.pep
VAVSSSSDERHGMPSTLLSSPLHAIPEPTXAAASLLXPPTNPXPRXAPRYGLXQLAPXXXXXQRXXGAXLLXXXXGQEGRRXXSXHAXXGXPGXGVRXEGGMNLGSAFGXLXSLAQV

SEQ ID NO: 117013 - protein, 207 aa, Oryza sativa
  Clone ID: PAT_MRT4530_2045C.1.pep
MSAQIAPAEQVCYVHCNFCNTILAVSVPGNSMLNIVTVRCGHCTNLLSVNLRGLMHSAPALQDHHHHHLQESGLSGCFRDQSGYPEFGFSAASSSSKLRLPPAAAAMVSYSQQNQQLEQALHARPPEKRQRVPSAYNRFIKEEIRRIKANNPDISHREAFSTAAKNWAHYPNIHFGLSPGHEGGKKLVDVDPIPTAPSSKKIQGFYS

SEQ ID NO: 117014 - protein, 70 aa, Oryza sativa
  Clone ID: PAT_MRT4530_20460C.1.pep
AFLFTRACDSPSAPFFLYSFLLASYTHYLHADELSREIARLLYCTTWSGAAPGLMDPCFPTRSCGGLTFF

SEQ ID NO: 117015 - protein, 86 aa, Oryza sativa
  Clone ID: PAT_MRT4530_20461C.1.pep
HRCCVSATANPTVLFPPDADLIRTSPRGRLSSTAPSCILHHASPLPVPASSMRSHPAEPCITLPLSSSNLLPSNGRRRKNWKGYSF

SEQ ID NO: 117016 - protein, 122 aa, Oryza sativa
  Clone ID: PAT_MRT4530_20462C.1.pep
KKNKKKKKKKKKKKKKKKKKKKKKKKKKKKRGGRSKEKKLTSPCMQRKIFFIVSLKKNKMPGVKQQTCTEKKNGVTNLNICGRKPPFHSAGKKKKKKRHKSPFPNKYVHQKMKKEKAPCTGP

SEQ ID NO: 117017 - protein, 73 aa, Oryza sativa
  Clone ID: PAT_MRT4530_20463C.1.pep
ADLFTALKAISMAMGDIKPEHRGATHMLDSALRGRAMPDTTMDQRLRLGLPEECKDHGYRLHHLRADDPEVHA

SEQ ID NO: 117018 - protein, 256 aa, Oryza sativa
  Clone ID: PAT_MRT4530_20464C.1.pep
LPSPPTPKPNKVVVVSPPLPLSLGADIVSAVIVIVGAASIPDTPNSFTLRGRLNEARDLLWRIRRAGAATADVDAELKDIVRVAEEDRRYESGALWRLLRCKYRPHLVMAVLIMPATRVLIGASVTVAFLLLLAFFFIILPRGGTPPEVVSSSKEGGIRGRRDGGGVFQVESYGERCEHVAEEDGHDRRRFPRGYVDYLYLFDCVFGVERRVLGYGVMAAWLAVLFYLLGDTAAVYFCSSLKGLSWLLRLSRRSPA

SEQ ID NO: 117019 - protein, 142 aa, Oryza sativa
  Clone ID: PAT_MRT4530_20465C.1.pep
MRRWLAEGVMELAAGAPESNSSFCSSPSGATPSSGGPMWWVSGCHGTVYSLAVMLPSLAFVGFLAWQARRSFRRLSYCRSHVVVVAYYALLWAVAVLNLLWCFLQAWQCMPDRAFSWNVLSLFTKSGMLFWEVSLIAFLLQE

SEQ ID NO: 117020 - protein, 123 aa, Oryza sativa
  Clone ID: PAT_MRT4530_20466C.1.pep
SVLHVVLPVARWCLLLLLQLFFKGKYYQALPSRGNIYKPTKKAKQNYDCCNQERIEGLRDSFILHKCRRISCLILLNQPSSSGVIFSKTFPFLCFQVPNIPTGNKPFAAFMGEHLSYSAAVGL

SEQ ID NO: 117021 - protein, 134 aa, Oryza sativa
  Clone ID: PAT_MRT4530_20467C.1.pep
MTGSSWLPSSAARGGDKGEGGKLVVAVIDSGPEPPLRRLANLTAGASFSGPTLSHRFEEAAATTGSSLFPFLFATTVGRRCTGRSPQQPTRSGWQWKGRAQAELAGVKEVMGATQAELARAAEMGKLRASTVAT

SEQ ID NO: 117022 - protein, 183 aa, Oryza sativa
  unsure (1)..(183): unsure at all Xaa locations
  Clone ID: PAT_MRT4530_20468C.1.pep
DVARSENAVQADMEVEFHRSKQRFGFLKWGSTLQLLLLVVPPGSGILHQVNLEYLGRLVFNNGGGILCPDRVVEMDLRTXTMTDGLGRCFXWXVDGIKAEAAMLGHGQPMSIVLSGLVGFKLEXTRKLRNTDLVLAVLQADRKHGVLSVXFAEFYGGGMSELSLQVDRATIANMGFESNCNAG

SEQ ID NO: 117023 - protein, 150 aa, Oryza sativa
  Clone ID: PAT_MRT4530_20469C.1.pep
MHYDRIDAVPCNVESLLVFNYASSFRRAILGDNLKTWLEEVYKKGVLSVNSMYKAIIYRDIVPRKEVFQKLRVPLKIKIFLWYLRKGVILTNDNLAKRGWVGRTFWAREWSLLLKEEEGQHVKDGCKKLETTMLDFFAKFGWNQRRRLEA

SEQ ID NO: 117024 - protein, 133 aa, Oryza sativa
  Clone ID: PAT_MRT4530_2046C.1.pep
MASSVFKAMAEKAGPSVRKQALTLTDAAASRVRQLLGVRQRAYLRLGVKARGCNGLSYTMNYADEKGKFDELVEDKGVKILIDPKALMHVIGTKMDFIDDPLRSEFVFMNPNSKGECGCGESFMTSTKNKGPA

SEQ ID NO: 117025 - protein, 35 aa, Oryza sativa
  unsure (1)..(35): unsure at all Xaa locations
  Clone ID: PAT_MRT4530_20470C.1.pep
GARHAHLAHTKARNSSTHRISSEGGXPASRPCXLV

SEQ ID NO: 117026 - protein, 60 aa, Oryza sativa
  unsure (1)..(60): unsure at all Xaa locations
  Clone ID: PAT_MRT4530_20471C.1.pep
RQDKEGMHPDQQGLIIPGKQPXDGRTLADHNIQKESTLHLGLRPRGGRQNFVKTLADKTI

SEQ ID NO: 117027 - protein, 81 aa, Oryza sativa
  unsure (1)..(81): unsure at all Xaa locations
  Clone ID: PAT_MRT4530_20472C.1.pep
MAPAGAALALAAAVCFLLMAPAPARRPXAAAELLLPPKPVADANADVADADLTTAAALAIPDEEERGTARARASLLCFVFR

SEQ ID NO: 117028 - protein, 93 aa, Oryza sativa
  Clone ID: PAT_MRT4530_20473C.1.pep
LSSSASSISSISKALSPIHGMAWTPIAKLSDLSQIHFFFLPSISQPCITHAATTNSLLLAKVMPSLLSLLSSSATMPFFRHVPLSHISPLHIK

SEQ ID NO: 117029 - protein, 57 aa, Oryza sativa
  Clone ID: PAT_MRT4530_20474C.1.pep
HSVVCASLLLPLCSAASYLVIAVCHFCLQPPKGTLQQPCARSFRPEIYTETDPSQVS

SEQ ID NO: 117030 - protein, 319 aa, Oryza sativa
  unsure (1)..(319): unsure at all Xaa locations
  Clone ID: PAT_MRT4530_20475C.1.pep
AVKECDIDSPSPTFDNIIELEEMLHCVEPEVLMGSARGLDNFEALQKATKDLVYDEPKSCDREFSTLXSVLELIRLKAIYGWSDSSFNNLLXLKMMLPKPNSLPSNTCQAKKFIYPFSLGLEKIHACVNHYILYMKEYTSLDKCPLCSASRXKSTNNTTLDVDXFLIKEEADSFEENKEKPPSXVMWYLSMKDHIKRLYSNTRDAELMSWYXEGHKKDRMLRHPMDARHWKNIGALNLXFAKNPRNIRFALSIDGVNPXRDMSSSHSTLPVLLTIYXLHTCFVISXKYVLLCVLIQGPRXPGIDIDVFFEPLMEDIEHQ

SEQ ID NO: 117031 - protein, 160 aa, Oryza sativa
  Clone ID: PAT_MRT4530_20476C.1.pep
CSAMSVLGGCRILQDTPSPFHVHRGQGHLAQALFPHFDNACWCCVVACVQVLDKQHHERFHSPSITSSFDMFCSLSPVLLSFLHFFHAHGFRSDQNHGCMIRSIDIVLFSRCNQHPLLCSHLNFLLIREFTLLCSGKAGKRNRRIYCIQLSDRGPNGCQW

SEQ ID NO: 117032 - protein, 70 aa, Oryza sativa
  unsure (1)..(70): unsure at all Xaa locations
  Clone ID: PAT_MRT4530_20477C.1.pep
GRXGGXATXCXLXXRXRGXXRALRXPRGGXERGHGHDHEVEARHGMAARRARVWVFEVGGFALQLPGXVG

SEQ ID NO: 117033 - protein, 253 aa, Oryza sativa
  unsure (1)..(253): unsure at all Xaa locations
  Clone ID: PAT_MRT4530_20478C.1.pep
WRRRRRGCSSCSRWRASASATPPARRRRRRRRPYCGSLRTAVEARNIIGWKTVPPPCAKYVADYITGERYGRDADVVINEAIAYAESLKLSGSRQREIWXVFDVDDTALSTVPXRSRNHALTGLANRPNSXVERAQPAVHRETLRLYRRLLQLGIKPAFLGLNPXSPKGPSSTSSNLLSDNVNLTGGRSYYSSLLGSRPRLRRSLAFKTCERQKLVNDGYIIVGNIGDQWNDIRRSPDGCRTFKFPNPMYYVD

SEQ ID NO: 117034 - protein, 497 aa, Oryza sativa
  Clone ID: PAT_MRT4530_20479C.1.pep
MGALTDSRKRLSADHRLLPSFPPSPPPPSKKPKLAPLPSSSSLADASSPPPSPPPPHPSSSSAAAQGPSSSYSAAAAAGAGGASTSYASSLPPSRLRRLPPPPPHPRPIHGPQRVLRAFRLGSALSRSNPSCFTPSPSSPQHPRSLGLEQYVELVDSVAHPPPLPPSPSTADAPSRVEVIAVDDAEERKDDEEAREEEEEEVKGSVVVRRVPLYKELYEASSRRRDAKLRTLEFEVRLAEKGRLGLEQLADVLPRFGPRKEDEPFVPFTDEDEDSVDHALGGRNRRERLVVHESSNIVITRETLQCLNETEWLNDEVINLYLELLKERELREPNKFLKCHFFNTFFYKKLITGGYDYKSVRRWTTKRKLGYSLLECDKIFVPIHKEVHWCLAVINIRDKKFQFLDSLGSMDMKALRTLARYLVDEVKDKSGQHIDALSWKQEGVKNLPLQENGWDCGMFMLKYIDFYSRDMGLTFGQKHMHYFRKRTAKEILNLRAE

SEQ ID NO: 117035 - protein, 300 aa, Oryza sativa
  Clone ID: PAT_MRT4530_2047C.1.pep
METAPSSSMSPASGTYVLDVHGFSGLRRQHCGGGGCIVSPTFTVAGLEWAIRYHPEGDADEVTDDVAVFVVLVTKDATAWAHVEFRLLDQAAGEMVTFFGEKDPILFDSGSEDLSTWGTGELAARSFLDGSPYVAGDCLKIECAVDVCRDRLTFHHDTPPSGEPFRQYPADDEPADVTFKIAGETFPAHVSVLAARAPGLLNNTTSQAATITIDDDDDDTPAAAAAFGALLHFAYTDTLPVASGLDGAGHTALLGRLLVAAGRYGMARLGAICERAMCRSLDAGTAADTLAMADGTASTR

SEQ ID NO: 117036 - protein, 196 aa, Oryza sativa
  Clone ID: PAT_MRT4530_20480C.1.pep
AGALDLSFAAQPGPRDATPCTRACSAAPAPARAGDGVTTLPLSPSSFSQRATKLRTWRSSSEQLKGDEARRGPQRRAPRRIRLAAASLLFFPPSPDLQSPATVVSHLLSPASDPDLMQRATGKGKKRGEMGGVTSSRGRGATGRWAHRRRAEGSDRRASAAASGELLKATTQRRSPFLFPLSFFRFLFSFVIKKSL

SEQ ID NO: 117037 - protein, 62 aa, Oryza sativa
  Clone ID: PAT_MRT4530_20481C.1.pep
MLRQACPRRRPPILEGQELHELERKLCVVALWCIQTKPHDRPAMSEVVGMLEDGADSLQKNA

SEQ ID NO: 117038 - protein, 142 aa, Oryza sativa
  Clone ID: PAT_MRT4530_20482C.1.pep
SFWKYYASWEHDQCNNGNWTFLNKYSSSSSLHCHDQLLYIVESLASANLDLSSLFQVIPVVSITGAIFARCMILAHAFFVLVSVIVISRVVIRLISSLMKRFGHLVSKRLHLGACGVCILFNIAFAAMYASQGCLMPSTYGR

SEQ ID NO: 117039 - protein, 55 aa, Oryza sativa
  Clone ID: PAT_MRT4530_20483C.1.pep
FERVTFGKGSGPPARGNHKMGAHQIKAYDKIQLGGGPKNTKGPKRRGKGNGGKKI

SEQ ID NO: 117040 - protein, 269 aa, Oryza sativa
  Clone ID: PAT_MRT4530_20484C.1.pep
MQATAALFLVRPLPRPHYRCLHGLRGGVSLAPPRRRLVARGPRCSMSLSIGGGAGAGAGGDRGFSYEHVPVFPRYRIRDPYKLLGVDRDAAEEEIRSARNFLIQQYAGHEPSEEAIEGAYEKIIMKSYQQRKKTKINLKTKLKKRVEESPSWVKALLGYFEVPQMDIISRRLFFFAFIAGWSIATSAENGPAFQLAISLFSCIYFLNDKMKNLMRASTTGFGVLVGGWIIGSLLVPLIPTFIIPPSWSLELLTSLVAYVFLFLGCTFLK

SEQ ID NO: 117041 - protein, 575 aa, Oryza sativa
  unsure (1)..(575): unsure at all Xaa locations
  Clone ID: PAT_MRT4530_20485C.1.pep
MQDVPSPLPALSTAYQPLPSLYLGFLAIWAASGFSWAFSSWRSRHFQGRILFQTASFVSFMLISHGYCIMCERLSIRERRTTAGLGCLLYLSLIGYKAAVPYFTVFLLINYFMSFYIIFRRTSQNLMVLREQLNFIEEEDIHSLHGALNTKYTMFKRFQGTMQVAVVAFIMVYMRADDTPDNYWXMDAADFKGLVSDHWHVGVXHGLERRRQRRLILGKNRFDRQIPPELTNCTSLQFLDMSTNVFGGNMQEILGKFVTLRYLVLHHNNYTGRIVSFGVLRLPLFARLNLSFNQFYGELPLEVADMKSLKYPMLLANNFSGGIPATYPPFNFVYTDSDPELLSCENPKCGGGGGKCSAFHMSATSSSSPSSGCSSSCVTGNSPTKGSLSLGDLDAVEVLPASATAGWSSARQKRKWSQGTGSATAAIARDNNGGSGGWAQQWRRTGAERRGTATAAGAFPKAMSLADYLKLEGSDINLNINTYYYLVALGEGGIVVEGQTSAEKPHQHKQMKHVDPKIDEKYVEFKQFDIVGDHSDHFYSNPRERKVQVVNEPGKDWVKRIQHEWKVLEKDLPGW

SEQ ID NO: 117042 - protein, 502 aa, Oryza sativa
  Clone ID: PAT_MRT4530_20486C.1.pep
MAPPSRHVDAVAAVLPVLLTILLPSAAAIGVNYGTKGDNLPPPATVAKFLANRTRIDRVKLFDTNPDIVKAFAGTGITVMVTAGNGDIPTLGTKDGAAAWVAANIAPYYPATDISLVAVGNEIINTADNALIGGLVPAMRTLRAALVAAGFRRIRVASTPHSLGILSVSSPPSASRFLDVLDRTFFAPMLEFLRKTKSPFVVNPYPYFGYNGDTIPYALARRPNPGVLDPGTGITYTSMLEAQLDSVFSAMKKLGFEDVDITVGETGWPTKAEPGQAGVSVAEAAEYNRYLIGEASSGSGTPLMPKRTFETYIFGLFNENLKPGPIAERNFGLFKPDLTPMYDVGLMKDTGKSSASAPAPAKGGNASGAAVTKRDSESEAAAPADEASAPAPSSVGKKVSTKATAPAPSDDGSASPEPSEGESADEKNPEEEEEEEGDDAAATTTPGGDGDSPETEAAGDDAKESEGKNNPHGHGDSSEAISVMFSVPSMLTIALSAILLHL

SEQ ID NO: 117043 - protein, 1212 aa, Oryza sativa
  unsure (1)..(1212): unsure at all Xaa locations
  Clone ID: PAT_MRT4530_20487C.1.pep
MDDDVDAGEIYAVDRQREEGSASAAAFSRSPSTGRVDDDDDDLLTYGRSARRMAALPAPAMPEGTELRRPVGGDVVGDDDYLRFLYKFKERFDRVGIKLPTIEVRYKNLNVEAESYVGSRGLPTILNTYANIXRMTLLLGSPGSGKTSLLLALAGTLPSTVXIRETINFSAKCQGVGHHYDLFLELLRREEEENITPDPETDIYLKAATTGEEKAEIVTNHILKILRLDICADTIVAPNVDSAAEMLVTLGRALFMDEISNGLDSSTTFQIVNTIQQTIHVLGGTAVIALLQPAPETYELFDDIILLSDGQVVYSGPRDHVLEFFKSLGFKCLERIGVADFLQEVTSRKDQKQYWIHGDDTYRYIPVTVIAEAFQCFHVGQAIRSELAIPFDNSKSHIAALKTSKHGVNLKKILKANIDREILLLKRKSFLYIFNALQLTLVAIIAMSVFIHTNMHHDSIENGRMYMGVQFFGTLAIMFKGLAEMGAALANLPVFFKQRDLLFYPAWTYSLPSWIIKTPISFLNTIIWVSITYYVIGFDPNIERCFRQFLVLFVMSEAICGLFRFIAALTRHPVVASTVSEFCILIVMVSSGFILSRDEVKKWLIWEYWTSPLMYALNALAVNEFLSPSWNEALPGFREPLGRLVLESRGVFPEAKWYWIGLGALLGYVLLFNILYTICLSILTLLKRNVREMSQETLQIKLENLTGYDQEPSSGGRVTNDKRYTEGGNNDEATSSNANHNSSPARKGSILPFVPVYMTFEDIRYSIDMPKALKVQGMAGSRLELLKDLSGSFRPGVLTALMGISGAGKTTLLDVLAGRKTSGHIHGNITVSGYPKKQETFSRVSGYCEQNDIHSPNLTVYESLMFSAWLRLPAEIDSMARKRFIDEFMELVELFPLKDALVGLLGLSGLSTEQRKRLTIAVELVANPSIIFMDEPTSGLDARAAAIVMRTLFLMKRGGEAIYVGPLGQHSCELIKYFEKHAIELLSFLKSIEGVRKIKHGYNPSTWMLEVTCTLQEQITGVNFTQVYKNSELYRRNKNLIKELSTPHDGSSDLLFPTKYSQTFVIQCLACLWKQRLSYWRNPPYIAVNFFFTVVIALLFGTMFWGVGRKRERASHMYSPLPYALGQRIPIWWRWYYWICPVAWTINGLVTSQFGDVDDKFDNGVRVSDFVESYFGYNLDLLWVAAMAVVSFAILFAILFGFSLKLFNFQKR

SEQ ID NO: 117044 - protein, 112 aa, Oryza sativa
  Clone ID: PAT_MRT4530_20488C.1.pep
KGGGGPPPKMGGGPPQRPPGVYPLISPPIIFWDFLRKKNFPPGNPFPWWKASQGSSPQQKKGPPCRRGPRIPERAPGARGGKPPGEPRGGVPHKTGANPEGWPKKRRRGLFF

SEQ ID NO: 117045 - protein, 114 aa, Oryza sativa
  Clone ID: PAT_MRT4530_20489C.1.pep
MDDDVDAGEIYAVDRQREEGSASAAAFSRSPSTGRVDDDDDDLLTYGRSARRMAALPAPAMPEGTELRRPVGGDVVGDDDYLRFLYKFKERFDRKPPLEIYIFAQTVFQGNHQG

SEQ ID NO: 117046 - protein, 300 aa, Oryza sativa
  Clone ID: PAT_MRT4530_2048C.1.pep
MAAIYSLLKHASCPESIFFHFLAAADGGEGCGGGVGELRTAVAASFPSLRFEIYPFRADAVTGLISASVRAALEAPLNYARNYLADLLPKCVPRAIYLDSDVLAVDDVRRLWETRLPAAAVVAAPEYCHANFSRYFTETFWSDPQLGDRVFAGRRRAPCYFNTGVMVIDLRRWRVGNYRRRIEVWMELQKEKRIYELGSLPPFLLVFAGEVEAVDHRWNQHGLGGDNVLGSCRPLHKGPVSLMHWSGKGKPWDRLDAGKPCPLDHTWKSYDLYIAEGDSSSASAPFALSSSALPAAAFSW

SEQ ID NO: 117047 - protein, 1158 aa, Oryza sativa
  unsure (1)..(1158): unsure at all Xaa locations
  Clone ID: PAT_MRT4530_20490C.1.pep
MDRMMFRLYRVGIKLPTIEVRYKNLNVEAESYVGSRGLPTILNTYANIXRMTLLLGSPGSGKTSLLLALAGTLPXNRKIRETINFSAKCQGVGHHYDLFLELLRREEEENITPDPETDIYLKAATTGEEKAEIVTNHILKILRLDICADTIVAPNVDSAAEMLVTLGRALFMDEISNGLDSSTTFQIVNTIQQTIHVLGGTAVIALLQPAPETYELFDDIILLSDGQVVYSGPRDHVLEFFKSLGFKCLERIGVADFLQEVTSRKDQKQYWIHGDDTYRYIPVTVIAEAFQCFHVGQAIRSELAIPFDNSKSHIAALKTSKHGVNLKKILKANIDREILLLKRKSFLYIFNALQLTLVAIIAMSVFIHTNMHHDSIENGRMYMGVQFFGTLAIMFKGLAEMGAALANLPVFFKQRDLLFYPAWTYSLPSWIIKTPISFLNTIIWVSITYYVIGFDPNIERCFRQFLVLFVMSEAICGLFRFIAALTRHPVVASTVSEFCILIVMVSSGFILSRDEVKKWLIWEYWTSPLMYALNALAVNEFLSPSWNEALPGFREPLGRLVLESRGVFPEAKWYWIGLGALLGYVLLFNILYTICLSILTLLKRNVREMSQETLQIKLENLTGYDQEPSSGGRVTNDKRYTEGGNNDEATSSNANHNSSPARKGSILPFVPVYMTFEDIRYSIDMPKALKVQGMAGSRLELLKDLSGSFRPGVLTALMGISGAGKTTLLDVLAGRKTSGHIHGNITVSGYPKKQETFSRVSGYCEQNDIHSPNLTVYESLMFSAWLRLPAEIDSMARKRFIDEFMELVELFPLKDALVGLLGLSGLSTEQRKRLTIAVELVANPSIIFMDEPTSGLDARAAAIVMRTLFLMKRGGEAIYVGPLGQHSCELIKYFEKHAIELLSFLKSIEGVRKIKHGYNPSTWMLEVTCTLQEQITGVNFTQVYKNSELYRRNKNLIKELSTPHDGSSDLLFPTKYSQTFVIQCLACLWKQRLSYWRNPPYIAVNFFFTVVIALLFGTMFWGVGRKRERASHMYSPLPYALGQVWFFGIIVFTHEARYNVSRLCSISTKLKPLRIPIWWRWYYWICPVAWTINGLVTSQFGDVDDKFDNGVRVSDFVESYFGYNLDLLWVAAMAVVSFAILFAILFGFSLKLFNFQKR

SEQ ID NO: 117048 - protein, 401 aa, Oryza sativa
  Clone ID: PAT_MRT4530_20491C.1.pep
MAESSESAWPQQSQQLQISSTMPAGSAWPEEENLENLEQPLPLLMPSSEDHREQQLVPVPWLQQDQDQEWHEQEQFLPLKNQNQEQLQDQQPLQDQEETRRYLGVPGIRFVPSDIELILDFLRPKLRGEQLPSYSYMHVCDVYSDHPKELTSKLGPSREGNWYMFSPRNRKYNKGKRPSRSTGQLGFWKSTTKNEAVLDALSDNMLIGYKACLTYHEYDESMPTPKLKKENAIKTPWKMWEFVCSNSNRPFDAEEEPMRLNDWVLCKVTNKDNKVTTKKFKPQRSKKPKKPKKLQQEEQPQNQGIVIRQPSESGSASSSHQEIPGSSLPGAGGDAAAAAATAAAVVDPMPLHMIPPSSWNYFSTGVTADGIVMDDSTGVDSYGCVDGAGALNFQRNIFYHR

SEQ ID NO: 117049 - protein, 542 aa, Oryza sativa
  Clone ID: PAT_MRT4530_20492C.1.pep
MGSDSPPKKWGLREQREAYLRWFSLADDDGDGRVTGKDALKFFAMSNLSRPELKQVWAIADSKRQGYLGFSEFMTAMQLVSLAQAGNEISQDTLAHADLETLLPPTMEGLDKKLKNNSMSKSNSDIVVRHPSELPASANWFNSKSGKKIPLRSVTSIIDGLKKSYIEKLRPLEKTYQFDDFVSPLLTSSDFDAKPMVMLLGQYSTGKTTFIKHLLKTNYPGAHIGPEPTTDRFVVITSGPDERCIPGNTIAVQADMPYSGLSSFGTAFLSKFECSQMPHPLLDHITFVDTPGVLSGEKQRTQRSYDFTGVTSWFAAKCDLILLLFDPHKLDISDEFKRVIGSLKGHDDKIRIVLNKADQVDAQQLMRVYGALLWSLGKVLNTPEVMRVYIGSFNDKPIRETVAGPLGKELFEKEQEDLLSDLNDIPKKACDRRINEFVKRSRSAKVHAHIISHLKKEMPALMGKAKAQQRLLDTLDEQFAKVQKELHLPAGDFPSVDEYRETLSAYNFDKFERLKPKLVQGVDDMLAYDIPDLLKSFRNPYE

SEQ ID NO: 117050 - protein, 356 aa, Oryza sativa
  Clone ID: PAT_MRT4530_20493C.1.pep
KVSGFWGKEGHKPHCIISPNLNVGGALDQKASNGNTGILINGREITKSELQMLKLAGVQCAGKPHFWVNADGTYQEEGQKTVKGKIWDKPIVKLLSPVLSLPMPPTRPNQCGEEPVNVVNRPIPDYLEQRTIQKLLLVGSGTNTILKQAKFLYKSRPFSVEECEDLRLIIQSNIYNYLGILLEGRERFEEEAIADRRTTCQSDPSSSGHCEPELCNDITEYYIAPRLKAFSDWILKAMAIGNLEDIFPAASREYAPMVEELWKDPAIQATYNRRSELPFLPSAASYFLDKAVDISRTEYELSDMDILYADGITSSDGLASTDFSFPQLALDGRGFDEPDPQDTLLRSVLKSLKRAW

SEQ ID NO: 117051 - protein, 157 aa, Oryza sativa
  Clone ID: PAT_MRT4530_20494C.1.pep
VRFSTNAPSRVRFFFWLAARGRCQTADNLAKKGWPHEDSCALCMREQEDCHHLFVTCEFSGRVWELMRAWISVDFPIPGQIDCSLIDWWFEARRCFRTGYREIFDAVLMLVCWLIWKERNARIFEQRLRSPEQLVEDIKEEINVWRSAAVFKEVQHQ

SEQ ID NO: 117052 - protein, 826 aa, Oryza sativa
  Clone ID: PAT_MRT4530_20495C.1.pep
MAEEKESFEGQWAPSDVTEENLKEMVAHGVLPAKEIIGWRPACGEAFPTPDTHEIVVFSHFFYGGFALPTSKFFRGILNFYGISLHHLNPNSIVHIANFVHVCEAFLGIKPHFALFRRIFFLKPQPNKNKPCVVGGAGFQLRGTLSQKYFSMPFKTSNKGWHANWFYVQNPEPALPGYTCLPPVYQDTWNSLPIGDEAVQALELLDRMLNLKEQGLQGEQITRHFIKCRLAPIKERSRTAFEFDGKHDPNREEPDSLDFKIMKERMYKIFSNAIVVSYSHQLPVVPYNAFNPPPQEYALMKSDPPVTHRRSPRQHTAQGGGGPTIRPDPQPQTSKLTGQTGPRKRKLVLDDDEGDDDKSGDKGSPNKPPKRTMPRKKLAGRAMPKIRTSSRKPSDIDPSGKDPDPAMTEQNISKDPEPTAENQPTAESQPTGAHTSGDRTNPSDLPPTGNQSATTETATTQEPPTGNQSDAGPDQEIPEVEAQTTTSQGPEAGNDSIIGSPNKEQRSPHAQLGTSSGPSGDDGEEIPRIKATDDSRPPILIKWWDENSQAAGIVINRQKEDEEVCQLKKALGEATRIVNRIHLRNEAKTATLERLVPHLGTLEAVRDQLHEAKEHAKKTEKELRDRIAQLQDSNYELSGSSKAQAARMEQMAKQIEALERDKTELAAQRDSALKEVEDRKIKSQAQFDVLVGKIKRLEGARDNVANAAAPIIQAMFLNNGGPSALDATEIFDKLSVAPEVYFKNIKKAGSMGAGMALAMTKSLYPRIEVDTIDGFADGTSEEAALDLISSAQNAADKIASDVVEQFRNNDLQPSNEDSDDERTDSD

SEQ ID NO: 117053 - protein, 82 aa, Oryza sativa
  Clone ID: PAT_MRT4530_20496C.1.pep
PPGRSRPPPSPSPRAMPSRRRSRRTRPPRSPPTRRWSPSAPSRAAPARGRTPLAPCPKARWIIHRSSASTSSRRSRSPRRRS

SEQ ID NO: 117054 - protein, 238 aa, Oryza sativa
  Clone ID: PAT_MRT4530_20497C.1.pep
MDWYAWLAKTGLAPALAYEYGRLFNQNELERGDAAHFDHDLLKSMGIAVAKHRLEILKLAKKDSSSAADAGGGDSSSSSYAQLIARKAGRCIARCARRLARPRGVGGGRGSSVTVVPRICSGDDAVRVGAVQAAATRRRRSVKKMVLMITDGGATAARGGVGFAAGRFSGSQKASLMFHDCYEEEDDDYDHEEEARCGDGAEGGDEDAEEERCSDGGGGGGTDVEIKWDSMFQDLKPT

SEQ ID NO: 117055 - protein, 58 aa, Oryza sativa
  Clone ID: PAT_MRT4530_20498C.1.pep
GRAPTSSTPWYAGTLSGILLDACQFRRTSHSHTHSEINLHRFNYSHLLCSMNWYVLMH

SEQ ID NO: 117056 - protein, 812 aa, Oryza sativa
  Clone ID: PAT_MRT4530_20499C.1.pep
MAEERESFEGQWAPSDVTEENLKEMVAHGVLPAKEIIGWRPASGETFPTPDTHEIVVFSHFFYGGFALPTSKFFRGILNFYGISLHHLNPNSIVHIANFVHVCEAFLGIKPHFALFRRIFFLKPQPNKNKPCVVGGGAGFQLRGTLSQKYFSMPFKTSNKGWHANWFYVQNPEPALPGYSCLPPVYQDTWNSLPIGDEAVQALELLDRMLNLKEQGLQGEQITRHFIKCRLAPIKERSRTAFEFDGKHDPNREEPDSLDFKIMKERMYKIFSNAIVVSYSHQLPVVPYNAFNPPPQEYALMKSDPPVSQRRSPRQHTAQGGGGPTIRPDPQPQTSKLAGQTGPRKRKLVLDDDGGDDDKSGDKGSPNKPPKRTMPRKKLAGRAIPKIRTSSRKPSDIDPSGKDPDPAMTEQNISKDPEPTNENQPTAESQPTGAHASGDRANPSDLPPTGNQSATTETATTQEPSTGNQSDAGPDPEIPEVEAQTTTSQGPEVGNDSIAGSSGPSDDDGEEIPRIKATDDSRPPILIKWWDENSQAAGIVINRQKEDEEVCQLKKALGEATRIVNRIHLRNEAKTTTLEKLVPHLGTLEAVRDQLHEAKECAKKTEKELRDQIAQLQDANFELSGSSKAQAARMEQMARQIEALERDKTELAAQRDSALKEVEDRKIKSQAQFDVLVGKIKRLEGARDDVANAAAPIIQAMFLNNGGPSALDATEIFDKLSVAPEVYFKNIKKAGSMGAGMALAMTKFLYPRIEVDTIDGFADGTSEEAALDLISSAQNAADKIASDVVEQFRNNDLQPSNEDSDDERTDSD

SEQ ID NO: 117057 - protein, 40 aa, Oryza sativa
  Clone ID: PAT_MRT4530_2049C.1.pep
PSFVRSSRLDSTTVVAYTTTLAVACRARRAALMDRPRRRP

SEQ ID NO: 117058 - protein, 297 aa, Oryza sativa
  Clone ID: PAT_MRT4530_204C.1.pep
MATTVDWCGRGSNLPAAMYDMVVDSKELMGALAPSMVSFSYPCSEQSASSLLAGANYLTPAQVLHVQAQLQRLRRPGAASGCLAAAPPLPMKRHGAVAVAAAAAARAPVKLYRGVRQRHWGKWVAEIRLPRNRTRLWLGTFDTAEEAALAYDSAAFRLRGESARLNFPELRRGGAHLGPPLHAAVDAKLHAICHGMDLPQPQPQTQSNATTTTMSTTATNTPSPFFSSESPVVKSEPVCSASESSSSADGDVSSTGSSDVVPEMQLLDFSEAPWDESESFLLHKYPSLEIDWDAILS

SEQ ID NO: 117059 - protein, 645 aa, Oryza sativa
  Clone ID: PAT_MRT4530_20500C.1.pep
MAEERESFESQWATSDVTEENLKEMVAHGVLPAKEIIGWRPAHGEAFPSPDTHEIVVFSHFFYGGFALPTSKFFRGILNFYGISLHHLNPNSIVHIANFVHVCEAFLGIKPHFALFRRIFFLKPQPNKNKPCVVGGAGFQLRGTLSQKYFSMPFKTSNKGWHANWFYVQNPEPALPGYTCLPPVYQDIWNSFPIGDEAVQALELLDRMLNLKEQGLQGEQITRHFIKCRLAPIKERSRTAFEFDGKHDPNREEPDSLDFKIMKERMYKIFSNAIVVSYSHQLPVVPYNAFNPPPQEYALMKSDPPVSQRRSPRQHTAQGGGGPTIRPDPQPQTSKLTGQTGPRKRKLVLDDDEGDDNKSGDKGSPNKPPKRTMPRKKLAGRAMPKIRTSSRKPSDIDPTGKDPDPAATEANVSKDSEPTAESQPTAESQPTGAHASGDKANPSDQPPTGNRSATTEAATTQEPPTGNQSDVGPDQEIPEVEAQTTTSQGPEAGNDSIIGSPNKEQGSPHVQLGTPSGPSGDDGEEIPRIKATDDSRPPILIKWWDENSQAAGIVINRQKEDEEVCQLKKALGEATRIVNRIHLRNEAKTATLERLVPHLGTLEAVRDQLHEAKEHAKKTEKELRDRIAQLQDSNYELSGSSKGNP

SEQ ID NO: 117060 - protein, 826 aa, Oryza sativa
  Clone ID: PAT_MRT4530_20501C.1.pep
MAEERESFESQWAPSDVTEENLKEMVAHGVLPAKEIIGWRPACGEAFPTPDTHEIVVFSHFFYGGFALPTSKFFRGILNFYGISLHHLNPNSIVHIANFVHVCEAFLGIKPHFALFRRIFFLKPQPNKNKPCVVGGAGFQLRGTLSQKYFSMPFKTSNKGWHANWFYVQNPEPALPGYTCLPPVYQDIWNSLPIGDEAAQALELLDRMLNLKEQGLQGEQITRHFIKCRLAPLKERSRTAFEFDGKHDPNREDPDSLDFKIMKERMYKIFSNAIVVSYSHQLPVVPYNAFNPPPQEYALMKSDPPVSQRRSPRQHTAQGGGGPTIRPDPQPQTSKLAGQTGPRKRKLVLDDDEGDDDKSGDKGSPSKPPKRTMPRKKLAGRAMPKIRTSSRKPSDIDPSGKDPDPAMTEQNISKDPEPTTENQPTAESQPTGAHASGDRANPSDLPPTGNQSATTETATTQEPPTGNQSDAGPNQEIPEVEAQTTTSQGPEAGNDSIAGSSGKEQRSPHAQLGTSSGLSGDDGEEIPRIKATDSSRPPILIKWWDENSQAAGIVINRQKEDEEVCQLKKALGEATRIVNRIHLRNEAKTTTLEKLVPHLGTLEAVRDQLHEAKECAKKTEKELRDRIAQLQDANFELSGSSKAQATRMAQMEKQIEALKKDKVELAAERDSALKEVEDRKIKSQAQFDVLVGKIKRLEGARDNVANAAAPLIQAMFLNNGGPSALDATEIFDKLSVAPEVYFKNIKKAGSMGAGMALAMTKSLYPRIEIDTIDGFADGTSEEAALDLISSAQTAADKIASDVVEQFRNNDLQPSNDESDDERTDSD

SEQ ID NO: 117061 - protein, 77 aa, Oryza sativa
  Clone ID: PAT_MRT4530_20502C.1.pep
VIVRNLASVRPRASSDFIPRQIMIEPADKGKLKKPYWRWKLVKKKIQKVFTENIHIYIHLYSKHHYCIIMSTLHVQP

SEQ ID NO: 117062 - protein, 428 aa, Oryza sativa
  Clone ID: PAT_MRT4530_20503C.1.pep
DKELAEETTEGETTAEVQVAETTSTEKIVEDKELAEETTEGEATAEVHIEETSTTERTVEDKVVPEETTEGEATAEVLEECTAIEKIVEDNTIAEEITEGETVAEVHVEVATAIDKAVEENTLAEETAKGETTPEVHVEETTTAEESVGDKAVDETTKGETTAEVYAEESTEKTVEDTTVEAPDEKTKTANDPVEDATVEEPDKKTAANDPAEDATVEEPDKKTAANDHVEDATLEEPDKKTAANDHVEDVTVEEPDKKTAANDPVEEVIPEETDKNTTTNDPVEDVTIEEPDMKTEANDPVEEATVEEPAVEAGTIEEIATAEARDEKTMITEETAQDPMVEDEKTMTTEETVQEPMVEDEKTVTTEETVQDPMVVDDKTMTTEKTVQDSMVEEGGTNIAAAEETVEHAAATAEALAGQASSTEQNG

SEQ ID NO: 117063 - protein, 784 aa, Oryza sativa
  Clone ID: PAT_MRT4530_20504C.1.pep
MAEERESFEGQWASSDVTEEDLKEMVAHGVLPAKEIIGWRPAHGEAFPSPDTHEIVVFSHFFYGGFALPTSKFFRGILNFYGISLHHLNPNSIVHIANFVHACEAFLGIKPHFALFRRIFFLKPQPNKNKPCVVGGAGFQLRGTLSQKYFSMPFKTSNKGWHANWFYVQNPEPALPGYSCLPPVYQDTWNSLPIGDEAVQALELLDRMLNLKEQGLQGEQITRHFIKCRLAPIKERSRTAFEFDGKHDPNREEPDSLDFKIMKERMYKIFSNAIVVSYSHQLPVVPYNAFNPPPQEYALMKSDPPVTQRRSPRQHTAQGGGGPTIRPDPQPQTSKLTGQTGPRKRKLVLDDDEGDDDKSGDKGSPNKPPKRTMPRKKLAGRAMPKIRTSSRKPSDIDPSGKDPDPGMTEQNISKDPEPTVENQPTTESQPTGAHASGDRADPSDLPPTGNQSATTETATTQEPPTGNQSDAGPDQEIPEVEAQTTTSQGPEAGNDSIAGSSGPSGDDGEEIPRIKATDDSRPPILIKCRTEPRSIMQRIHLRNEAKTTTLEKLVPHLGTLEAVRDQLHEAKECAKKTEKELRDRIAQLQDANFELSGSSKAQAARVEQMAEQIEALERDKTELAAQRDSALKEVEDRKIKSQAQFDVLVGKIKRLEGARDDVANAAAPIIQAMFLNNGGPSALDATEIFDKLSVAPEVYFKNIKKAGSMGAGMALAMTKSLYPRIEVDTIDGFADGTSEEAALDLISSAQNAADKIASDVVEQFRNNDLQPSNEDSDDERTDSD

SEQ ID NO: 117064 - protein, 53 aa, Oryza sativa
  Clone ID: PAT_MRT4530_20505C.1.pep
QPVAGGRLGAVGGGGGGQGATRRCRRWRRRARCDEEELPVGSVWSTAQEGWLV

SEQ ID NO: 117065 - protein, 530 aa, Oryza sativa
  Clone ID: PAT_MRT4530_20506C.1.pep
HEIVEDKGTAEVLARETGDSITGPGALDEKTEKEATAEALADKTTEGEITAEVQVEETTTTEKIVEDKELAEETTEGETTAEVQVAETTSTEKIVEDKELAEETTEGEATAEVHIEETSTTERTVEDKVVPEETTEGEATAEVLEECTAIEKIVEDNTIAEEITEGETVAEVHVEVATAIDKAVEENTLAEETAKGETTPEVHVEETTTAEESVGDKAVDETTKGETTAEVYAEESTEKTVEDTTVEAPDEKTKTANDPVEDATVEEPDKKTAANDPVEDATVEEPDKKTAANDPVEDATVEEPDKKTAANDPAEDATVEEPDKKTAANDHVEDATLEEPDKKTAANDHVEDVTVEEPDKKTAANDPVEEVIPEETDKNTTTNDPVEDVTIEEPDMKTEANDPVEEATVEEPAVEAGTIEEIATAEARDEKTMITEETAQDPMVEDEKTMTTEETVQEPMVEDEKTVTTEETVQDPMVVDDKTMTTEKTVQDSMVEEGGTNIAAAEETVEHAAATAEALAGQASSTEQNG

SEQ ID NO: 117066 - protein, 811 aa, Oryza sativa
  Clone ID: PAT_MRT4530_20507C.1.pep
MAEERESFEGQWASSDVTEENLKEMVAHGVLPAKEIIGWRPAHGEAFPSPDTHEIVVFSHFFYGGFALPTSKFFRGILNFYGISLHHLNPNSIVHIANFVHACEAFLGIKPHFALFRRIFFLKPQPNKNKPCVVGGAGFQLRGTLSQKYFSMPFKTSNKGWHANWFYVQNPEPALPGYSCLPPVYQDTWNSLPIGDEAVQALELLDRMLNLKEQGLQGEQITRHFIKCRLAPIKERSRTAFEFDGKHDPNREEPDSLDFKIMKERMYKIFSNAIVVNYSHQLPVVPYNAFNPPPQEYALMKSDPPVTQRRSPRQHTAQGGGGPTIRPDPQPQTSKLTGQTGPRKRKLVLDDDEGDDDKSGDKGSPNKPPKRTMPRKKLAGRAMPKIRTSSRKPSDIDPSGKDPDPAMTEQNISKDPEPTAENQPTAEGQPTGAHTSGDRTNPSDLPPTGNQSATTETATTQEPPTGNQSDAGPDQEIPEVEAQTTTSQGPEAGNDSIAGSSGPSGDDGEEIPRIKATDDSRPPILIKWWDENSQAAGIVINRQKEDEEVCQLKKALGEATRIVNRIHLRNEAKTTTLEKLVPHLGTLESVREQLHEAKEYAKKTEKELRERIAQLQDSNFELSGSSKAQAARMEQMAKQIEALERDKTELAAQRDSALKEVEDRKIKSQAQFDVLVGKIKRLEGARDNVANAAAPIIQAMFLNNGGPSAFDATEIFDKLSVAPEVYFKNIKKAGSMGAGMALAMTKSLYPRIEVDTIDGFADGTSEEAALDLISSAQNAADKIASDVVEQFRNNDLQPSNEDSDDERTDSD

SEQ ID NO: 117067 - protein, 811 aa, Oryza sativa
  Clone ID: PAT_MRT4530_20508C.1.pep
MAEEGESFESQWATSDVTEENLKEMVAHGVLPAKEIIGWRPAHGEAFPSPDTHEIVVFSHFFYGGFALPTSKFFRGILNFYGISLHHLNPNSIVHIANFVHACEAFLGIKPHFALFRRIFFLKPQPNKNKPCVVGGAGFQLRGTLSQKYFSMPFKTSNKGWHANWFYVQNPEPALPGYSCLPPMYQDTWNSLPIGDEAVQALELLDRMLNLKEQGLQGEQITRHFIKCRLAPIKERSRTAFEFDGKHDPNREEPDSLDFKIMKERMYKIFSNAIVVSYSHQLPVVPYNAFNPPPQEYALMKSDPPISQRRSPRQHTTQGGGGPTIRPDPQPQTSKLAGQTGPRKRKLVLDDDEGDDDKSGDKGSPNKPPKRTMPRKKLAGRAMPKIRTSSRKPSDIDPSGKDPDPAMTEQSISKDPEPTAENQPTAESQPTGAHASCDRANPSDPPPTGNQSATTETATTQEPPTGNQSDAGPDQEIPEVEAQTTTSQGPEAGNDSIAGSSGPSGDDGEEIPRIKATDDSRPPILIKWWDENSQAAGIVINRQKEDEEVCQLKKALGEATRIVNRIHLRNEAKTTTLEKLVPHLGTLEAVRDQLHEAKECAKKTEKELRDRIAQLQDSNYELSGSSKAQATRIAQMEKQIEALKKDKTELAAERDSALKEVEDRKIKSQAQFDVLVGKIKRLEGARDDVANAAAPIIQAMFLNNGGPSTLDATEIFDKLSVAPEVYFKNIKKAGSMGAGMALAMTKSLYPRIEVDTIDGFADGTSEEAALDLISSAQTAADKIASDVVEQFRNNDLQPSNDDSDDERTDSD

SEQ ID NO: 117068 - protein, 152 aa, Oryza sativa
  Clone ID: PAT_MRT4530_20509C.1.pep
MEARRLHVLETVMGRRGHQSTEVLKKKTAARLWLKLEQICKTKDLTSKMHRKQKLFLHKLQDDGSAMDHLSTFKKIVANLESMECIWGNLRTNVQKFSFYTVDRIGDQESDWKKRIEEDKRSRRSGGLVFPSYSQKFSNWRIKTIFSAKAYN

SEQ ID NO: 117069 - protein, 115 aa, Oryza sativa
  unsure (1)..(115): unsure at all Xaa locations
  Clone ID: PAT_MRT4530_2050C.1.pep
LLPVVDKQPPRPAGPLVXPQGPFPPPXEEMASALSTGPGPVSKKXRVNRCFRFRKRFGLPGFRCRFGPLFFGEPRFFGPPGCSFDFKLAGRGALPRGNPVVGAAKIVWFFEATQI

SEQ ID NO: 117070 - protein, 312 aa, Oryza sativa
  Clone ID: PAT_MRT4530_20510C.1.pep
MSTGQVHRGREGAAVESHGEDLLSVLPDEILLHIRGGGVLDLEEGWRDVLAGVAKLKSIHTDSDFGGFSPDEYMHIYTLVYYMCTQKGHKDYPKELYHLCKQALDDHLDSIDTSDKGMALVKHGTDTAKSRKDKKNEVMVGFPINLISGSRVVDEILGRVPVKAPFTDSTFEFGNSSCNPPDSFGYIPTTSKSFAERLMAPENEDLVVMLSLDLAEELETIDEPSTKEVVRLPSRKQPVYSAGIEGGCVPSNGSIGCLLSAGVNALEVVDVMVLRTTGVAASMSGLVRPTMHHVVSTLAEAQLSQTEPRSPG

SEQ ID NO: 117071 - protein, 804 aa, Oryza sativa
  Clone ID: PAT_MRT4530_20511C.1.pep
MAEERESFEGQWASSDVTEENLKEMVAHGVLPAKEIIGWRPAHGEAFPSPDTHEIVVFSHFFYGGFALPTSKFFRGILNFYGISLHHLNPNSIVHIANFVHACEAFLGIKPHFALFRRIFFLKPQPNKNKPCVVGGAGFQLRGTLSQKYFSMPFKTSNKGWHANWFYVQNPEPALPGYSCLPPVYQDTWNSLPIGDEAVQALELLDRMLNLKEQGLQGEQITRHFIKCRLAPIKERSRTAFEFDGKYDPNREESDSLDFRIMKERMYKIFSNAIVVSYSHQLPVVPYNAFNPPPQEYALMKSDPPVTQRRSPRQHTAQGGGGPTIRPDPQPQTSKSTGQTGPRKRKLVLDDDEGDDDKSGDKGSPNKPPKRTMPRKKLAGRAMLKIRTSSRKPSDIDPSGKDPDPAMAEQNISKDPEPTAESQPTAKSQPTGAHASGDQANPSDQPPTGNQSATTEAATTQEPPTGNQLDASPDQEIPEVEAQTTASQGPEAGNDSITGSPGKEQRSPHAQLGTSSGPSGDDGEEIPRIKATDDSRPPILIKWWDENSQAAGIVINRQKEDEEVCQLKKALGEATRIVNRIHLRNEAKTTTLEKLVPHLGTLEAVRDQLHEAKEHAKKTEKELRDRIAQLQDANFELSGSSKAQAARMEQMKKQVEALERDNVELAAQRDSALKEVEDRKIKSQAQFDVLVAMFLNNGGPSALDATEIFDKLSVAPEVYFKNIKKAGSMGAGMALAMTKSLYPRIEVDTIDGFADGTSEEAALDLISSAQTAADKIASDVVEQFRNNDLQPSNDDSDDERTDSD

SEQ ID NO: 117072 - protein, 49 aa, Oryza sativa
  Clone ID: PAT_MRT4530_20512C.1.pep
FLYSARRSTWYMIVQTITCKCVNTRVTTTLQQNLMLQTNIITHYQRFHK

SEQ ID NO: 117073 - protein, 822 aa, Oryza sativa
  Clone ID: PAT_MRT4530_20513C.1.pep
MAEERESFEGQWAASDVTEENLKEMVAHGVLPAKEIIGWRPAYGEAFPSPDTHEIVVFSHFFYGGFALPTSRFFRGILNFYGISLHHLNPNSIVHIANFVHACEAFLGIKPHFALFRRIFFLKPQPNKNKPCVVGGAGFQLRGTLSQKYFSMPFKTSNKGWHANWFYVQNPEPALPGYSCLPPVYQDTWNSLPIGDEAVQALELLDRMLKLKEQGLQGEQITRHFIKCRLAPIKERSRTAFEFDGKYDPNREESDSLDFRIMKERMYKIFSNAIVVSYSHQLPVVPYNAFNPPPQEYTLMKSDPPVTQRRSPRQHTAQGGGGPTIRPDPQPQTSKSTGQTGPRKRKLVLDDDEGDDDKSGDKGSPNKPPKRTMPRKKLAGRAMPKIRTSSRKPSDIDPSGKDPDPAMAEQNISKDPEPTAESQPTAKSQPTGAHASGDQANPSDQPPTGNQSATTEAATTQEPPTGNQSDAGPDQEIPEVEAQTTASQGPEAGNDSIAGSPGKEQRSPHAQLGPSGDDGEEIPRIKATDDSRPPILIKWWDENSQAAGIVINRQKEDEEVCQLKKALGEATRIVNRIHLRNEAKTTTLEKLVPHLGTLEAVRDQLHETKELAKKTEKELRDRIAQLQESNYELSGSSKAQAARMEQMAKQIEALERDKTELAAQRDSALKEVEDRKIKSQAQFDVLVGKIKRLEGARDDVANAAAPIIQAMFLNNGGPSALDATEIFDKLSVAPEVYFKNIKKAGSMGAGMALAMTKSLYPRIEVDTIDGFADGTSEEAALDLIGSAQTAADKIASDVVEQFRNNDLQPSNDDSDDERTDSD

SEQ ID NO: 117074 - protein, 44 aa, Oryza sativa
  Clone ID: PAT_MRT4530_20514C.1.pep
MAAATHVAALLCVASIAAFPSPPRRGYPIIGSSENVHRVTELKL

SEQ ID NO: 117075 - protein, 429 aa, Oryza sativa
  Clone ID: PAT_MRT4530_20515C.1.pep
MKSSSGEHGRKPNSNMRLSKGSMLSGAMSLASQPSLRSLPSLDVHDLNTSPSLHQFIATIKGHSSASAYVSALAVDGDSLYIASSDGSIRLWALDGARRSQEEQQQDDGCSSSSSSTTVADTDSSVKSLLATGNGGLLLSSHQDGKIRAWRAGSRRRDGETRPQLVLRAVLPTAVDRLRTCLLPWSYVEIRRHRRCTWVHHVDAVTALAVSPDGALLYSASWDRSIKVWSLPGFRCVESIAAAHDDAINALAVSPDGRVYTGSADKKIKAWTRGPGQRKHALVGTMERHRSAVNALALGANGKVLYSGACDRSVVVWESAGGGDGGMEATGTLRGHARAILCLAAAGELVCSGSADRTVRVWRRGGAENNGYTCLAVMESHGAAVKSLALVRGGRDDDGSCSSEGSSALVCSGALDGDVKIWSVFIPGR

SEQ ID NO: 117076 - protein, 65 aa, Oryza sativa
  Clone ID: PAT_MRT4530_20516C.1.pep
NIQSGTASAFVLLSTRLIFLKNRWWLAFGSTARAERRRLIYPSHLRAWNVLVDLVPTIEYTSRFR

SEQ ID NO: 117077 - protein, 62 aa, Oryza sativa
  unsure (1)..(62): unsure at all Xaa locations
  Clone ID: PAT_MRT4530_20517C.1.pep
IKVKLRSNPNIDAPYCYLSRLESSHGELTIGCNIKSMRRDEWTTVEQDIXLKAASIVKQYES

SEQ ID NO: 117078 - protein, 352 aa, Oryza sativa
  unsure (1)..(352): unsure at all Xaa locations
  Clone ID: PAT_MRT4530_20518C.1.pep
LDNQVLDHLCGGLVEEEQKLDFIALLETGKNNFSDSWLKKICRGRDFLWHWTRPRGRAGGILLGINLDFFDIASIDEGEFYIKFHVRNKTDDVQWCIVAVNGAAQEEYKESFLTELVNACSRDSLPMVIGGDFNIIRNPQEKNNDRYNDKWPFLFNAVIDSLNLREIELSVRKFTWANNLQIPTYEKLDRVLVSTEWELKNPLAXSQTLSRELSDHTPLLLDXDKEHILIXPPLFKFELGWLLREDFYGLVENIWKKEDRGVTKMEKWQNKIRSLCQFLRGWAKNVSGSYKKEKVKLLALTGDLDKIAETRLLISEELDRKNAMKDRLAKLLREEELKWYQRANTNRVLEGD

SEQ ID NO: 117079 - protein, 90 aa, Oryza sativa
  Clone ID: PAT_MRT4530_20519C.1.pep
RRRRRRRARSAWLPPSAAAPACPSPPPVAAAGAVVPASCGRPSPSVGRSVATASTSRSSVASCPPPLQLFLLSLSLSKAPVFLSLSLQAS

SEQ ID NO: 117080 - protein, 406 aa, Oryza sativa
  unsure (1)..(406): unsure at all Xaa locations
  Clone ID: PAT_MRT4530_2051C.1.pep
MADAEAETHNAGGGELLVWPWTGILATTTDDDDATADAASTLAFHAHQHFAGVPTTALQEATAGDGHHHHFLVLHFGKSWAGLRDAMSLPGRFPGAGRREWRRRRRGEGATAGAVGGCHLRRGVRLARRGGRPARRRRLGREVPEGCRRRGEERGGRREGRREXQDMEAIYAKLNQLEKQLEQRQSLESIIRQMNMNLQAGGSLRKEDHEHIYSIMICLRTIVDEEKEMLVDSCAEIMKRLRTNSDELKEYRQELIKGVENMTITTSTIIGIKRMGELDERPFHLACKRKHREDDPRGKAAMLISYWQEELKNPSWHPFKIIQVDGEDKGVVDEDDQKLRQLCKDYGDSVCNAVKAAMAELNEYNPRGRHTMNELWNFREGRKATTKEVVKYISDQLKTNSSQSDN

SEQ ID NO: 117081 - protein, 138 aa, Oryza sativa
  Clone ID: PAT_MRT4530_20520C.1.pep
MERKDGETPVENSAVGDAKEEEKQPRQEKKPFGIDAYLEKWTAAEQEAAKAFLRALIADAHQYMEMTEEEVVEEYRRAGKLHRYDPDTEWQKRYARVARAHPPPPCVMALIPKLEQYLKLLDEDDEQDYLKLLNEDDE

SEQ ID NO: 117082 - protein, 144 aa, Oryza sativa
  unsure (1)..(144): unsure at all Xaa locations
  Clone ID: PAT_MRT4530_20521C.1.pep
ANPPKPPPPPPPPKFSTRNAGSXKRAPQVAELYHSLMRRDSKKDTSGSGICETANSANVRSSMIGEIENRSSHLQAIKADVETQVDERAVLKHFDWPERKADTLREAAFGYQDLKKLESEVSNYKDDPRLPCDIALKKMVTISE

SEQ ID NO: 117083 - protein, 798 aa, Oryza sativa
  Clone ID: PAT_MRT4530_20522C.1.pep
MKEDIMFDNQTKPCRSRVDSKSNINVLKPKFGSSWGSQIVKGFTADKKTKKTAAAASKKPPLASVENVNTSNQQIPYHSRVKRSLMGDFPCSPAGAQVHPHVFDCHGIRSPASHDLFLELDHLREQLRESKERELALQSELRQCRENPRVSELEKDLDSRKNEIDRLVRLKTSLEVEKTSLSEQLSALSCMVEQHEENARLDGHGNRVSSMNGGNASSSENLEIEVVELRRLNKELQFQKRNLAIKLSSAESKLAVIEKNAESEIVAKVQAEASLLRHTNANLSKQVEGLQMSRLTEVEELAYLRWINSCLRHELSNSDQAARAMTDADYNDEIACHVDDCDGDARLDQNSSDHKKFSIAERIKQWSQNDKNCEASKKEALLDRAWIEAAECRSPTRRHSLGGPKGCAQEFSIVKRRQSDTFICLPEATDEAISCNKDETIREKRELLVDKYDFGRSESSRFLLGKSEVCKSQSMDVEKRALRIPNPPPRPSVSVPHSGPSNGSAANPPKPPPPPPPPKFSTRNAGVMKRAPQVAELYHSLMRRDSKKDTSGSGICETANSANVRSSMIGEIENRSSHLQAIKADVETQGEFVKSLIKEVTNAAYKDIEDVVAFVKWLDDELGFLVDERAVLKHFDWPERKADTLREAAFGYQDLKKLESEVSNYKDDPRLPCDIALKKMVTISEKTERSVYNLLRTRDATMRQCKEFNIPTDWMLDNNLIGKIKFSSVKLAKMYMKRVAMELQYMGPLNKDPALEYMLLQAVRFAFRMHQFAGGFDPETMDAFEELRNLVHVRNSTQ

SEQ ID NO: 117084 - protein, 90 aa, Oryza sativa
  Clone ID: PAT_MRT4530_20523C.1.pep
GGACGRRLSPLCQRHRRSCRRGARWRGGCIPESAPSVVTILSSAHSADGDPPYWRVLLLTSLRAATTTTPDVDGRVSLCTALGFPGRLVR

SEQ ID NO: 117085 - protein, 57 aa, Oryza sativa
  Clone ID: PAT_MRT4530_20524C.1.pep
NKNTLPGEEIYGRLFFLFLSLPSRSCYFNLLLFGLLIKFHWPLFFNSVPDKPFSFSN

SEQ ID NO: 117086 - protein, 56 aa, Oryza sativa
  Clone ID: PAT_MRT4530_20525C.1.pep
LSSGAVHPIRSYASLSRKYQISITLSYHASCWSLEMKFSYVARFLDTEPDIYSDQI

SEQ ID NO: 117087 - protein, 86 aa, Oryza sativa
  Clone ID: PAT_MRT4530_20526C.1.pep
MVRTGTMFREKQRSSAVGIPCEKAARPGRKQQERAGLGCAQEIETGCHTEMVVFKRSDQRGVGGLTGGRRAVQPAATGLRHRLRSR

SEQ ID NO: 117088 - protein, 237 aa, Oryza sativa
  Clone ID: PAT_MRT4530_20527C.1.pep
MAARGWEEALDLDDSHSAVAEAAWPWPESAHLALSPPSAVLVVVVAGVEEDRALVFTVHDLVVLALHVCWAAPRSPASPFRHWHTCRRGSAFAACVGCAVHGATPSISPVAFGHARPRLPFTFRYRRSDRERRRCPHNILVVANDLIATTDDLLSMHDPHLIGCGVVITGCTSMLHATTTTSVRPVGPVVPGLLSIGILGGRAWGLLHKPPRQPPSAPDALPPASLRLLRTPPLVGL

SEQ ID NO: 117089 - protein, 47 aa, Oryza sativa
  Clone ID: PAT_MRT4530_20528C.1.pep
PRGRGHLGLPHNFGPVPAGVPAIPIERRLTARGNHGHSLSLYQIVLL

SEQ ID NO: 117090 - protein, 33 aa, Oryza sativa
  Clone ID: PAT_MRT4530_20529C.1.pep
MARAQLVLVALVAALLLAAPYAFVVITCGQCNS

SEQ ID NO: 117091 - protein, 542 aa, Oryza sativa
  Clone ID: PAT_MRT4530_2052C.1.pep
MAIFLVLALSIAQLLPSLVAGTGRPRVIIVGAGISGISAGKRIWEAGIADVLILEATDRIGGRMHKQSFAGVNVEIGANWVEGVNGEKKNPIWPIVNSTLKLRSFRSDFDSLAQNVYKDGGLCDEAYVQKRMDRADEVDKSGENLSATLHPSGRDDILPNGPSSPVDMAVDYFTYDYEFAEPPRVTSLQNTVPLPTFTDFGDDTYFVADQRGYESVVHHLAGQYLNADKSGNIADARLKLNKVVREISYSSTGVTVKTEDNSTYQADYVMVSASLGVLQSDLIQFKPQLPSWKILAIYQFDMAVYTKIFVKFPKKFWPEGAGREFFLYASTRRGYYGVWQEFEKQYPDANVLLVTVTDEESRRIEQQPDSQTKAEIMEVVRCMFPDEDVPDATDILVPRWWSDRFFRGSFSNWPIGVSRYEYDQLRAPVGRVYFTGEHTSERYNGYVHGAYLAGIDSAEILINCAQKKMCKYNVGGKHGYSSADGLFHLAVLRSPEANLLERRADCGGAVCWLPRSIGKNGLLGLLAFQNASFDACNLFQAH

SEQ ID NO: 117092 - protein, 97 aa, Oryza sativa
  Clone ID: PAT_MRT4530_20530C.1.pep
MVGRVDLDCYCPFHPLRGLPPSCVSYPTSIATPPPLQPPLLLSLFFDIRHLFLSSPTSAATPSILPRSAVIARLLSDLHQAEDIAQSQDDLSSLNYI

SEQ ID NO: 117093 - protein, 139 aa, Oryza sativa
  unsure (1)..(139): unsure at all Xaa locations
  Clone ID: PAT_MRT4530_20531C.1.pep
PRRNCRVPPRLWYEVCTALAHAGAIEELTLDNGEGPTFGIHLGTTYSCVGRRQHNRVXIMVNDQSNRTTPCYVGFTNSDRLIGNAAKNHVCMNPINNVCDAKRFISRRVSDAFVXSDIKILSFKGIGGPGDKPMIGVQY

SEQ ID NO: 117094 - protein, 195 aa, Oryza sativa
  unsure (1)..(195): unsure at all Xaa locations
  Clone ID: PAT_MRT4530_20532C.1.pep
MWPQVIAGSCIEMIGPKRGISMSCSVVXEFDMRIKKGDREEDDLELIDGALEYSQITTPAMRPMTSRVSGNCGAVDITLAYLYQAVEATIEVSISKVPRGFQFISECVCSYXKVRQEIQLFDGMVGEPCGLRRYVVVVASDTWMHLKFKVCEKGSKNDVGHYCSFKANRHGFASQQIVVEPGAITVKVNWSVIPL

SEQ ID NO: 117095 - protein, 78 aa, Oryza sativa
  unsure (1)..(78): unsure at all Xaa locations
  Clone ID: PAT_MRT4530_20533C.1.pep
SKVVFVCRKNHRSTVYCYGRSWTMXELPMFGCTDAAQVLKELEKAKKAYPDALARIVGFDNVRQVQLISFIAYKPPGG

SEQ ID NO: 117096 - protein, 81 aa, Oryza sativa
  Clone ID: PAT_MRT4530_20534C.1.pep
RESHKIFEGRGLQGEETGRGNMGPTLGDILFLRTPFKGKMLGPQPPGPSEGKKKANWQDQNDGGSIKRLWGGKGADLWSLK

SEQ ID NO: 117097 - protein, 454 aa, Oryza sativa
  Clone ID: PAT_MRT4530_20535C.1.pep
MDSLGVLLVAPMNAYLEQELDRRCRLFRLWESPADRRDDYLRAHASSIRAVVPYALQGVDAAMIDALPSLEIVSSFSVGIDRVDLDACLRRGVRVTNTPDVLTDDVADLAVGLAIAALRKIPQADRYVRAGKWKSKGDFTLTTRFSGKRVGILGLGRIGLAVAKRAEAFDCPISYHSRSEKPFPKYKFYPNVVDLAANCDVLVVACSLNPETRHIVNRKVIDALGPEGVLINIARGAHVDEPELISALLEKRLGGAGLDVFEDEPFAPEQLFELDNVVLVPHFSGKRVGIIGLGRIGLAVAKRVEAFDCPVNYYQRTKQDHPGYTYYPSVVELAASSDVLVVACPLNEHTRHIVNREVMEALGPRGVLINIGRGPHVDEAAMVAALADGRLGGAGLDVFEDEPNVPEALLGMDNVVLVPHVGSATHETRTAMADLVLGNLEAHVAGKPLLTQVV

SEQ ID NO: 117098 - protein, 56 aa, Oryza sativa
  Clone ID: PAT_MRT4530_20536C.1.pep
LLLVFLNDITRNIIPSNSAEILLVYYGYRVHPQAHGYTIVACHPRVFQGYRIYFIP

SEQ ID NO: 117099 - protein, 323 aa, Oryza sativa
  Clone ID: PAT_MRT4530_20537C.1.pep
MAASSVASTLLLSLSSSSSPFLSPTSVSFLPSAAAAASSSPRVAVAAGKQKAAISVLRALRAEAATLPVLSFTGEKVGEVALDLKSAPPSTARAVVHRAIITDRQNKRRGTASTLTRGEVRGGGRKPYQQKKTGKARRGSMRTPLRPGGGVIFGPKPRDWSIKINRKEKRLAISTALASAAVADDAFVVEEFDEEFAAGPKTRDFVAALQRWGLDPKEKAMFFATDFADNVRLSGRNIGSLKMLTPRTLNLYDILDARKLFFTPAAINYLNSRYGATVFDEYEDDTNGEDDGEEEAEELQEGEGSAEEAAQDEAAETEADSNS

SEQ ID NO: 117100 - protein, 82 aa, Oryza sativa
  Clone ID: PAT_MRT4530_20538C.1.pep
PGGGGFPPRFAPPKVPGVDEVPGDPLFQGKAAPAGVLRFSLEAFPNQIDPVFVFSSKRALGAIFLAGKPPKKVTVEVQKVFL

SEQ ID NO: 117101 - protein, 362 aa, Oryza sativa
  Clone ID: PAT_MRT4530_20539C.1.pep
MAAASGRRRAAAFAVVICAALLLLSSAVERAAAQVPCSQCDQACKESCKGYGRDSSSCSAPCGDPSNKDGCESCLEAYYSKCVNYCGPSCHGNMSSTVEVRSAAGRGDTGTGGCGEGDRSARTPVAKVIIGETGDRRRVDEKSADRRRVDGQSVGQLRVDRESAGRRRVKGSPATGTSMGSRRRLAGRLGKIDLGVDAICGASLTRFGAPSPCAFLLRRARLSSVAVSPRVVTALRPPTAAAPRLPLWPYAHEPPPPPCARPNSNSQLPPPLLWPLAPSPFASYVVLVLLQSSAVERAEAQAAGPQAAPMACSQCDQMCNSSCEGAGSEPCSYACGSCQGCMQAYFYRCLPRCGDYCRSNCV

SEQ ID NO: 117102 - protein, 223 aa, Oryza sativa
  Clone ID: PAT_MRT4530_2053C.1.pep
MHEELNAHGLGSPTTIFTNLAYAAVRNVPYVVREYHVTGLCTPPIPHNPNQPVLHPMHACMGLAILTAAQVGPGCHPVQGQSTLYSLTRCILSDLLMCCCNRGGSAQLIIDAVETEKPRAMQPSCQQRTDHTSETSTDTASIRDRGNSARLHERTRPTPTKRTGNKKTRQLASKPCSFATGKIRENPRQCVVAAINRQIHAVLRCRIANSVGLAQNGTRWYSW

SEQ ID NO: 117103 - protein, 123 aa, Oryza sativa
  Clone ID: PAT_MRT4530_20540C.1.pep
SGSETGKVKGKGGRKEIRPTRRQAAAALLLLVGKGTPVGAGWLCLQGHVLLLQGERPLIILGSSPFPLQGFKNRRGPGYRHPAVRRLPAVTAVTAQNRDKFTNRNLNSKIRANRAVWRGYRAV

SEQ ID NO: 117104 - protein, 77 aa, Oryza sativa
  Clone ID: PAT_MRT4530_20541C.1.pep
EHLHATWHIRASVTSHRANDGVTNARLPPDKHFELISPGMLTDAQPLDSLIDRAINLNLAACPPRRGDFQVHDRTEP

SEQ ID NO: 117105 - protein, 434 aa, Oryza sativa
  Clone ID: PAT_MRT4530_20542C.1.pep
MAAANAPIAMREALTLTSLGIAPQFVTFTHVTMESEKYICVRETSPQNSVVIVDMAMPAQPLRRPITADSALMNPNTRILALKAQIPGTTQDHLQIFNIEAKTKIKSHQMPEQVVFWKWITPKLLGLVTQTSVYHWSIEGDSEPAKMFDRTANLANNQIINYRCDPSEKWLVLIGIAPGAPERPQLVKGNMQLFSVDQQRSQALEAHAASFASFKVVGNENPSTLICFASKTTNAGQITSKLHVIELGAQPGKPGFSKKQADLFFPPDFQDDFPVAMQISQKYGLIYVITKLGLLFVYDLETAAAVYRNRISPDPIFLTAESSASGGFYAINRRGQVLHATVNDATIVPFVSSQLNNLELAVNLAKRANLPGAENLVVQRFQELFAQTKYKEAAELAAESPQGLLRTPDTVAKFQIIEISVTLTIAISAMRLLW

SEQ ID NO: 117106 - protein, 103 aa, Oryza sativa
  unsure (1)..(103): unsure at all Xaa locations
  Clone ID: PAT_MRT4530_20543C.1.pep
XXPPDQXLXSXXMXXGLRGIPGCGSSSISSCPSALXXSXLPSAPSTHPSPLLYVLLXGSRTGSLQXEWWWXHCGXQAXPCCXYXCSYVXVSGRWSXLLFFXVF

SEQ ID NO: 117107 - protein, 88 aa, Oryza sativa
  unsure (1)..(88): unsure at all Xaa locations
  Clone ID: PAT_MRT4530_20544C.1.pep
GQTMGGFIAELSHMAFVIGFPREPQYTSIHPLSGEFPHQVRLXVHGIPSYMPNMEVTACKGTLEHACEEAALRMMANLRELQDDTLNT

SEQ ID NO: 117108 - protein, 63 aa, Oryza sativa
  Clone ID: PAT_MRT4530_20545C.1.pep
MATELGFGLAKEKDGDEKKTGSPYRMQEKNRNEKRQLKKPENIKLRRKISGRTIKNRMKKAGK

SEQ ID NO: 117109 - protein, 570 aa, Oryza sativa
  unsure (1)..(570): unsure at all Xaa locations
  Clone ID: PAT_MRT4530_20546C.1.pep
MATGQIFSKTTQALFYNYKQLPIQRMLDFDFLCGRETPSVAGIINPGSDGFQKLFFGQEEIAIPVHPTIEAACNAHPTADVFINFASFRSAAASSMSALKQPTIRVVAIIAEGVPESDTKQLISYARANNXLIIGPATVGGIITGXNTDARYTDGIYEGIAIGGDVFPGSTLSDHILRFNNIPQVKMMVVLGELGGKDEYSLVEALKQGKVQKPVVAWVSGTCARLFKSEVQFGHAGAKSGGELESAQAKNQALKDAGAVVPTSYEALETAIKETFEKLVEDGKISPVTEITPPPIPEDLKTAIKSGKVRAPTHIISTISDDRGEEPCYAGVPMSTIIEQGYGVGDVISLLWFKRSLPRYCTQFIEMCIMLCADHGPCVSGAHNSIVTARAGKDLVSSLVSGLLTIGPRFGGAIDDAARYFKDAYDRNLTPYEFVEGMKKKGIRVPGIGHRIKSRDNRDKRVQLLQKYAHTHFPSVKYMEYAVQVETYTLSKANNLVLNVDGAIGSLFLDLLSGSGMFSKQEIDEIVEIGYLNGLFVLARSIGLIGHTFDQKRLKQPLYRHPWEDVLYTK

SEQ ID NO: 117110 - protein, 234 aa, Oryza sativa
  unsure (1)..(234): unsure at all Xaa locations
  Clone ID: PAT_MRT4530_20547C.1.pep
MATGQIFSKTTQALFYNYKQLPIQRMLDFDFLCGRETPSVAGIINPGSDGFQKLFFGQEEIAIPVHPTIEAACNAHPTADVFINFASFRSAAASSMSASKQPTIRVVAIIAEGVPESDTKQLISYARANNKVIIGPATVGGIQAGAFKIGDTAGTIDNIIQCKLYRPGSVGFVSKSGGMSNEMYNTIARVTDGIYEGIXIGGDVFPGSTLSDHILRFNXIPQVXMMVVLWGAGG

SEQ ID NO: 117111 - protein, 136 aa, Oryza sativa
  unsure (1)..(136): unsure at all Xaa locations
  Clone ID: PAT_MRT4530_20548C.1.pep
HASGKVRAPTHIISTISDDRGEEPCYAGVPMSTIIEQGYGVGDVISLLWFKRSLPRYCTQFIEMCIMLCADHGPCVSGAHNSIVTARAGKXPCFSLVSGLLTIGPRFGGAIDDAARYFKDAYDRNLTPYEFVEGMK

SEQ ID NO: 117112 - protein, 60 aa, Oryza sativa
  Clone ID: PAT_MRT4530_20549C.1.pep
CLHADSKLHVSVLVLSWIKNDKIQCMIEKQARTKLTVDASDAIYHLSASVSRVLACLTVT

SEQ ID NO: 117113 - protein, 397 aa, Oryza sativa
  unsure (1)..(397): unsure at all Xaa locations
  Clone ID: PAT_MRT4530_2054C.1.pep
KLRNFRSDYDYLSQNVYKEDGGVYDEAQAQKIIDRAHEVNENGEKLSATLPPSGRDDMSILTMQRLIARLPNGPSSPVDMVVDYFPYDYEFAEPPRVTSLRNAVPLPTFTDFGDDVYFVADQRGYEAVVHYLAGQYLDADDSGNVADPRLQLNKVVREISYSSTGVTVKTEDGSAYQADYXVMVSASLGVLQSDLIQFKPQLPSWKILAIYQFDMAVYTKIFVKFPKRFWPEGAGREFFLYASTRRGYYGVWQEFEKQYPDANVLLVTVTDEESRRIEQQPDSQTKAEIMEVLRSMFPDQDVPDATDILVPRWWSDRFFQGTFSNWPIGVSRYEHDQLRAPVGRVYFTGEHTSERYNGYVHGAYLAGIDSAEILIXACAQNQMCKYHVQRKHDFMME

SEQ ID NO: 117114 - protein, 87 aa, Oryza sativa
  unsure (1)..(87): unsure at all Xaa locations
  Clone ID: PAT_MRT4530_20550C.1.pep
LRVEDDETNPTVLTTTTNDERRRPATRRATAAARVVGXTASTAHLTATTASGDDGRSGAAARLTSAGGGKRTKRRGDDSTAQLWLML

SEQ ID NO: 117115 - protein, 185 aa, Oryza sativa
  Clone ID: PAT_MRT4530_20551C.1.pep
DAASPMTMQHTSEPCSSIAKSTGEQLAYTFSAPCVGEPLPLLPIMKNAGEPLASHFSALHRLRGTAANHTSLLSATRRASRCHPAPTLSACCRDDRRCSLSARCKRHSRPPSAPPLPSFVRATTAAPTFRSRRRGRSLPRTPQPPPPPSRMQQASPPPLMCHALNQEARTQLLKLSEVMVEVFLV

SEQ ID NO: 117116 - protein, 51 aa, Oryza sativa
  unsure (1)..(51): unsure at all Xaa locations
  Clone ID: PAT_MRT4530_20552C.1.pep
AISWMCPQSLNAPFPSHCRNEANLXPINMRLHGGRVLNLSNYMVEDDILMC

SEQ ID NO: 117117 - protein, 50 aa, Oryza sativa
  Clone ID: PAT_MRT4530_20553C.1.pep
QQTFVLCHFRGGSRWELTACRAECTTNQTQGSSRRGIVAAPCRPCTAQTP

SEQ ID NO: 117118 - protein, 373 aa, Oryza sativa
  Clone ID: PAT_MRT4530_20554C.1.pep
MRRVTVLVLLLACAAARAAAAVVTDGLLPNGNFEEGPPKSDLVNGTVVRGANAIPRWETSGFVEYIESGHKQGDMLLVVPQGAHAVRLGNEASIRQRLAVTRGAYYAVTFSAARTCAQAEQLNVSVSPEWGVLPMQTIYGSNGWDSYAWAFKAKMDEVALVIHNPGVEEDPACGPLIDGVAIRALYPPTLAKGNMLKNGGFEEGPYFLPNASWGVLVPPNIEDDHSPLPAWMIMSSKAVKYVDAAHFAVPQGARAVELVGGKESALVQEVRTVPGWTYRLSFAVGDARDGCAGSMVAEAYAARASIKVPYESKGTGGYKRAVLEFAAIANRTRVVFQSTFYHTMTDGSLCGPVIDDASLVGLRKKTAGRRLLL

SEQ ID NO: 117119 - protein, 114 aa, Oryza sativa
  Clone ID: PAT_MRT4530_20555C.1.pep
MALNGSTHQRRRGTLVLPLRLRAIGFGTARRRRSGGGTIGCAPGVEPPRGSGLAVGAWVSTEATQEEEVVVVSLVRRRRRRRRCWDAAVVQRHRRRNRTPMCERKRGALRWGER

SEQ ID NO: 117120 - protein, 35 aa, Oryza sativa
  Clone ID: PAT_MRT4530_20556C.1.pep
SFPSRWQCLSLILIYNLISCVPDMAPLTAFRSSVK

SEQ ID NO: 117121 - protein, 121 aa, Oryza sativa
  Clone ID: PAT_MRT4530_20557C.1.pep
MAAASAAAQAEGTVIAIHSLDEWTIQIEEANSAKKLVVIDFTASWCGPCRIIAPVFADLAKKHTNAVFLKVDVDELKPIAEQFSVEAMPTFLFMKEGDVKDRVVGAMKDELASKLELHMAM

SEQ ID NO: 117122 - protein, 729 aa, Oryza sativa
  Clone ID: PAT_MRT4530_20558C.1.pep
MGTEAEAAEVVESVSDLAVQDPPGEEFSAADLRWVKYASSEHQRDDVALIPYERMDAFIAGECSNPECPTRFHIERGRKRDRGTLREVRSDDYLLYRMYWCSFGPENYGEGGTILPSRKYRLNTRNRAARPQSMRGCTCHFAIKRLYARPSLVLIIYHERRHINKSGFICHGPLDRDAIGPGARRVPYVGSEIQQQTMSLIYLGVPEENILQTHMEGIHRYCGSDAKVDSLASQYVQKLGMIIKRSTHELDLDDQASIRMWVDRNKKSVFYYQDSTDTDAFVLGIQTEWQLQQMIRFGHQDLLASHSSFGVSKLKYPLHTLLVFDSRQHALPVAWIITRSVTKQDTLRWMKALTERIYSVDSTWRIGGFVIDDPASELDPIRDVFSCPILFSLWHIRRTWLKNIIKKCSNSEVQREMFMQLGKVMYSIWSEKNPMDALEQLFQDFVDQTTFIQYFKSFWVPKLEMWIDTIRSLPLASQESSGTIEGYHLKLKVKAYDDSQLDALQRVDWLVHKLTTELHSSYWLNLYADESGSFPEVKAEYIASTSWHRALQIPDDAVIFDDKEPFSAKVTSQKDTSQMWTVWNPGSEFSLCDCSWSMQGNLCKHIIKVNMMCGPRKDFQPSLSFQSFQRVLLDLWQKPMDDSFSLDLSVAWVMQMQERIQKVTELATADGIAEVSNRLPIQWTNKKGRKVAAKRTSPLRVLPHSNGIVQKDFTPKKNRKRKRLSTVSG

SEQ ID NO: 117123 - protein, 73 aa, Oryza sativa
  Clone ID: PAT_MRT4530_20559C.1.pep
PKPCVFAPRWFCLCFLPPRLLLLVWSTPSLGLSLECYSRNLVVSLCDSITPQMTLKKVCTKTPTLFQCVPCKC

SEQ ID NO: 117124 - protein, 79 aa, Oryza sativa
  Clone ID: PAT_MRT4530_2055C.1.pep
MGRLRTVGLEQVAGVKRGILKGQQAQEPVLSDRSRKPTDSAAAVRTTLEQIGLRRPENREMKQALQEKRCPACREHPMD

SEQ ID NO: 117125 - protein, 112 aa, Oryza sativa
  Clone ID: PAT_MRT4530_20560C.1.pep
MAAAECEDESPESAMVASGDVGSGPTVGHSGVEHAQERLILVQQQPAGILSPSPAGRRCLRPRRVLTVMNLMRSFNAQFQDAKFDQIPKRSKRLPSLFNAMGTILVIGLGMA

SEQ ID NO: 117126 - protein, 97 aa, Oryza sativa
  unsure (1)..(97): unsure at all Xaa locations
  Clone ID: PAT_MRT4530_20561C.1.pep
ERARRPEPQSTGPPTWTTTTTRTPARTTPPPPPPPPPPRSRCASPXAALQPRATPAAPASAPFPSAAAAAGVHRRRVRAAAAGGGRLLTAPREHLDP

SEQ ID NO: 117127 - protein, 99 aa, Oryza sativa
  unsure (1)..(99): unsure at all Xaa locations
  Clone ID: PAT_MRT4530_20562C.1.pep
VSLTCTLAMINVTPILVGCPLRVPVVMVIVVIGDWVLPILSLAAASSSAXVIDLLLQFHGSHCSPRFCGRYQLSAMMAFLSWFLTAASSLFNLWFIASR

SEQ ID NO: 117128 - protein, 80 aa, Oryza sativa
  Clone ID: PAT_MRT4530_20563C.1.pep
SGRGSGERVDVPPSLIMAAGRSGVKSAGLELYCCTSASCEAPLNAAPVRSGAMARWANRLGSAQALSNQVWVQRVERRQA

SEQ ID NO: 117129 - protein, 100 aa, Oryza sativa
  unsure (1)..(100): unsure at all Xaa locations
  Clone ID: PAT_MRT4530_20564C.1.pep
MTVVTVGMVGNTFQPSLGANLHRPAATXIQRHQGGFGRTPWLSRTRGRPNQPRFWLVAFSVASLLRLVNFGPIHRVNSEFLAHSYISLILDIVRLTYRLI

SEQ ID NO: 117130 - protein, 155 aa, Oryza sativa
  Clone ID: PAT_MRT4530_20565C.1.pep
MSAALSYIHPPASSSSSATAWRVCSGRSTVVGPGAQVVDARERRRRTDDGTGERGQTNWLMVNDDDNTADKAADGERTTSWLTWARERAVDDDDGGDDWKEDELRVGEPHTVSPAARHHHHLVAAAARYYHHLTTASRFTRSSRTTVARRTARMA

SEQ ID NO: 117131 - protein, 119 aa, Oryza sativa
  unsure (1)..(119): unsure at all Xaa locations
  Clone ID: PAT_MRT4530_20566C.1.pep
IKKETRFIPLHGNLRRQWDRSTTIASVLAGAEVAALVXGGGPCLPPRVTRALAKLAWYSSPRVPSVRRRSGRXVGCGCTDIGGSCGITSANLSGYNGMGSCGNGLLFKDGRGCGSCYEV

SEQ ID NO: 117132 - protein, 119 aa, Oryza sativa
  Clone ID: PAT_MRT4530_20567C.1.pep
GVACKSLTKESRRLLVTRDIFYTLSGTRTQSSMRESRLGKVHLSTDHRALDHQSTRSSWSIGAARVSLAMANTFCQTCLKKTKQIRTASQRKNLHRGSAQARQSSFQQGNGCMPEKKSW

SEQ ID NO: 117133 - protein, 128 aa, Oryza sativa
  Clone ID: PAT_MRT4530_20568C.1.pep
NLSQIVQIMCRIDGDMCNQTLGTSDGWLGVLYKQDTPATGHHNAEETCPPLHGHRAAAMSRSHIYHRCVERWERDRTNKVQMTKASPYAKAYLSGPERTTQQQFIASHEEKVLFAGSQILRPRYGRCA

SEQ ID NO: 117134 - protein, 49 aa, Oryza sativa
  unsure (1)..(49): unsure at all Xaa locations
  Clone ID: PAT_MRT4530_20569C.1.pep
SDSRSTTRPVQVLHLRNLPWECAEEELVQLXNQFRRIGNTKCGVRANRH

SEQ ID NO: 117135 - protein, 438 aa, Oryza sativa
  Clone ID: PAT_MRT4530_2056C.1.pep
SNMKTASHLPYTRNGLKFFMKRGGLTSGEVEGVCDRAARKYVARKMGLGGGRGMPPVVMRVDLMSAYAQHLRNIIKERVAHPTHYDTPLKGFKVIVNAGNGCGGFFTWDVLEKLGADTTGSLHLEPDGKFPHHMPNPEDTTAMSLTRDAVLDHGADLGVVFDTDVDRSGVVDATGAAINGDRLIALMSAIVLDEHPGTTVVTDARTSDGLTRFIQARGGHHCLYRVGYRNVIDKGVQLNADGVETHLMMETTGHGALKENNFLDDGAYMVVKIIIEMVRMRLVGLEGSVGTLIMDLEEPAESKLMRMNILGEAKYAKQRGTQAVETFRNHIQEGKLNGWVLDDCGDCSVSQGCLVDTNDDPFDVDAYMYRAKFFDEYKGELGWVHIRQSVHNPNIAINMQSSIPGGCKSMAKDLLDRYLLTSGVNEFVDITEVQKFVK

SEQ ID NO: 117136 - protein, 132 aa, Oryza sativa
  Clone ID: PAT_MRT4530_20570C.1.pep
LYLSSNKLNGGIPDTLGQCQNLVIVQMDKNNLSGNIPDSLGNLKSLSMLNLSYNSLSGTIPRSLNDFKFIAKLDLSHNYLQGEIPRTGILDNASVVSLDGNSGLCGGATYLHLPPCPSGPRKTERRYYLVKI

SEQ ID NO: 117137 - protein, 45 aa, Oryza sativa
  Clone ID: PAT_MRT4530_20571C.1.pep
MRKKAGAPHHHFGFGNSGEGGRVGHLAGLIGPGVGRGTWKRHCKS

SEQ ID NO: 117138 - protein, 144 aa, Oryza sativa
  Clone ID: PAT_MRT4530_20572C.1.pep
EEEINSHIVGKVDISVVEEADKAAAAWAIIEGSKFVEELVEGTPSFSTSKSCCEGGGRFDSWQRKGHEAKASDDAHQAVRDGGSMMSAASFAELAGFGMAEPWRRSNLLCLRWSGTVPASTVGERASARRRRCDRAPWEDLPAK

SEQ ID NO: 117139 - protein, 89 aa, Oryza sativa
  Clone ID: PAT_MRT4530_20573C.1.pep
RDNSGSADGSFFFFFFHFYFLPNQVGKSPNQSANLTNIPNSHHQIHITIIKLLMHTNQIHHNILRNFSNTSQIQTMNHKFLTSQSNTSQ

SEQ ID NO: 117140 - protein, 136 aa, Oryza sativa
  Clone ID: PAT_MRT4530_20574C.1.pep
FSRLLSTGTVLVSTSNKAPEDLNQDGMQREIFLDLLSKLDENCNKILVGTETDYRRLIPTDGLTQIHYFWPLTSDIRSMYEAMWHDITRQTGGNIISVTIPVMFGRYLEIPKSCNGVARYEGEYPFGPLPAAADFW

SEQ ID NO: 117141 - protein, 1141 aa, Oryza sativa
  Clone ID: PAT_MRT4530_20575C.1.pep
MHSRHQRLASLTKLLTSQVNVGRHRDALAFFSSMVSDPSLRPLSDPSLYAFPLALKSSSALRLPSAAAAADSLHALAAKCGFLSSPFFASALVASYGACASPALARRLFDELPHRNAIVCSAMISVHIRSGDLAGALRELDLMDVAPTASCFNSVIAAVAESGEHPARAIDLYRRMQRMGVLPSLITLLALVPSCTALGALSSIKEVHGFATRHGMFASCHLGSSLIEAYGRCGSLAGARNVFDQVQERDVVVWSSIVSAYAFHGHADVAMSLFRHMELDNVRPDGIMFLGVLKACGHAGHADDALKYFDVLTKIFGVEACGDHYSCLVDVLGRAGRLRQAYDVIQTMPVKVTAKAWGALLAACRKYGEVGLAEVAGRALFEIEPENAGNFVSLANIYSGMGMHDKAEQAVRSASSTTSGHQQMHVGHSTSQYHGWFRLPGRASQSTSHHPLSVQGTALLIFVIFSLSGIFSCCYHWDKLRAFLWSRHPDVILQEGQHTVISIASPSKTTSDHKNEKAEKECGLPVIMPGDRIPKFFARPCPHEKCLPAAEEEEAEPIPGVALMHTSYWWHLAILKYEPAIDGAYRGWRQFGWGFAVAMRADGCPLCWTAIRVQTVYDAYGPLTLYRDLVSQGKLQHDIYQENVATQLDNLLRRLEQYEMEMEDYHARLSMWENTREKQRRRLLVQEAEDKQRDGVWIDEKRGFLDKLVSRKRRGNIEPGVGKWVSYLNREKKLDTLVGQKPVAPIAPKGIYLYGNVGSGKTMLMDMFYGATEGLIKHRRRFHFHEAMLEIHDHMHDVWKRRDEDKSIESSAFSWISSLPFDGKIKEWLIGEEKYKQNTQQNHILLAVADKFLVDRQANKSGASILCFDEIQDGMQREIFLDLLSKLDENCNKILVGTETDYRRLIPTDGLTQIHYFWPLTSDIRSMYEAMWHDITRQTGGNIISVTIPVMFGRYLEIPKSCNGVARFDFEYLCGRPVGAADYIAIARNYHTIFISDIPAMSMKIRDKARRFITLIDELYNHHCRLVCLAASSIDDLFQGTDEGPLFDLESFQFEGEAEGAKLRRDVLAEGNVGAAPSPTGLVAILSGQEEMFAFRRAISRLIEMQTSLYLERVERVHSSLQQQSSVLTKSSTVSQSAPSV

SEQ ID NO: 117142 - protein, 149 aa, Oryza sativa
  unsure (1)..(149): unsure at all Xaa locations
  Clone ID: PAT_MRT4530_20576C.1.pep
IYFTEMKKFRKHQNMXFGHTXRIGCVRVEKLLRDSSGEVLLINANIGLCXTRGCDVFHRNEELQKAAKHDFWTYWSMVGESVSKNHSVTRATNFCQLMPTLAYIXHVGELFFXRNEKVQKVXDFWTYWSVLGASVSKNHSVTRAVNFYH

SEQ ID NO: 117143 - protein, 245 aa, Oryza sativa
  unsure (1)..(245): unsure at all Xaa locations
  Clone ID: PAT_MRT4530_20577C.1.pep
GIPGSTHASGEHKSQENGKMHACGHDAHTAMLLGAAKLLQKRKNELKGTVKLVFQPAEEGSAGAYYVLQEGVLDDVSAMFGMHVDPALPVGVVAARPGPFAATSGRFLATITGKGGHAAFPHDAIDPVVAASNAILSLQQIVAREIDPLQGAVVSITFVKGGEAYNVIPQSVEFGGTMRSMTDEGLAYLMKRIKEIVEGQAAVNRCXGGVDFMEESMRPYPAVVNDEGMYAHARALAERLLGAGG

SEQ ID NO: 117144 - protein, 222 aa, Oryza sativa
  unsure (1)..(222): unsure at all Xaa locations
  Clone ID: PAT_MRT4530_20578C.1.pep
MARQFYTDAIFHLHIIRTFLFLEKEDVALGLLMLSRDTGMWRSPVKAETFEKPEQKKKDEEDSALLQXSPPTAHLAPLTLAACGHGVRPRRHAEVRPRHDAAGGAGREGRHLSDAAAGGHGGAPQRLLQRSRRCSVASRRSRRRHCARSPTPPRPAATREQEGVSGRMVAYGDIDVVAAAAKEEHGAEVMSCSHLIGGGDVSAELPCVVFLEEDRGAKQLRG

SEQ ID NO: 117145 - protein, 72 aa, Oryza sativa
  Clone ID: PAT_MRT4530_20579C.1.pep
GRVGGRVGSTRRPRSRRRRRREGDHGLIDLSHLCVFNKFHSCTNKSVGNFCFLSLYSFEIFVRGCFFLLEIM

SEQ ID NO: 117146 - protein, 510 aa, Oryza sativa
  unsure (1)..(510): unsure at all Xaa locations
  Clone ID: PAT_MRT4530_2057C.1.pep
MAIFLVLALSIAQLLPSLVAGTGRPRVIIVGAGISGISAGKRIWEAGIADVLILEATDRIGGRMHKQSFAGVNVEIGANWVEGVNGEKKNPIWPIVNSTLKLRSFRSDFDSLAQNVYKDGGLCDEAYVQKRMDRADEVDKSGENLSATLHPSGRDDMSILSMQRLIARLPNGPSSPVDMAVDYFTYDYEFAEPPRVTSLRNTVPLPTFTDFGDDTYFVADQRGYEAVVHHLAGQYLDADKSGNIADARLQLNKVVREISYSSTGVTVKTEDNSTYQADYVMVSASLGVLQSDLIQFKPQLPSWKILAIYQFDMAVYTKIFVKFPKKFWPEGAGREFFLYASTRRGYYGVWQEFEKQYPDANVLLVTVTDEESRRIEQQPDSQTKAEIMEVVRCMFPDEDVPDATDILVPRWWSDRFFRGSFSNWPIGVSRYEHDQLRAPVGRVYFTGEHTSERYNGYVHGAYLAGIDSAEILINCXAQKKMCKYNVGRKHGFSDGMRNVRFHNLLIEQLS

SEQ ID NO: 117147 - protein, 123 aa, Oryza sativa
  Clone ID: PAT_MRT4530_20580C.1.pep
DGLTGPVSRSDRRDKAGLTGFNVWYLIIRGKHPRLVTLGGCRLLDGLWRCCPVTSPRRLWRRPGASCEWFGVHHLRSEGRTTLVIEALVVLSVGRLPPCHPLMKGACDGFVVERWSWARLNGD

SEQ ID NO: 117148 - protein, 435 aa, Oryza sativa
  unsure (1)..(435): unsure at all Xaa locations
  Clone ID: PAT_MRT4530_20581C.1.pep
MKEFVGGTAPSSTTSDPLADITNTNGLGFTNRRGKGRAKSLCVVRRNDEECHGSKENCDNSEQNTPIASNGAHGDVTNLTHAEVARKRARNWYTSLTQEQKDERNKKDHERRKRKKEESQVLKSATNSGVERSDASHLNITPRRLPFTIINNVAHYGPNEVPMSCVIQTTQNRDCQVXCNATLTPEQKQAKVXDRQRTRXQALTNEQRLEMNDRRRXVARQTLPDVEIHDMNARQRSRRQSVTPGERSAHLARRNELYAARRDKPCTQSIALECPEDCSSSLLNPTPSFETTGDVPATSSLQTELAADHLARSSNFDDGMDSFMDDDTDDEHYMFAGLGDDEDDEMVQSDDDDTQAPSSSIPDPFDFVYSNIPQSENVLKPEPDCKHCGAKRFQYEPPGFCCRDGEIKLVENETPPEIVSLRCHICLFDAIFYPP

SEQ ID NO: 117149 - protein, 40 aa, Oryza sativa
  Clone ID: PAT_MRT4530_20582C.1.pep
PSKGHRIRSLRRAKDGKVVILLLECYPECYRNPVFNLNVG

SEQ ID NO: 117150 - protein, 189 aa, Oryza sativa
  Clone ID: PAT_MRT4530_20583C.1.pep
MSVSGMAWAHAVMGWAAVAFALFVLAITTADASSSQGPCAAYGGGSGGATFMRAGAALVLLSATAQAVAATAARAAANGARFLSGFFALVAHFAGAYTAAVLSELVPVVVAAAGGVCAASGYKHMLERVSSPLFSSLSGGGGGGIRSEPRYVLADPRPPRPRAPRSLADLLSPFISSMVLRLSVGLLYV

SEQ ID NO: 117151 - protein, 388 aa, Oryza sativa
  Clone ID: PAT_MRT4530_20584C.1.pep
ALPIGGDRHGEQAGLGDAGTSPPRPHARRAPAHHRQGQPPPPPSKTPPPAPTPTAAAKPHSTQDVLSLPEVELMGVLDAGIHTARAAVAHVSEIACPPYQTALALLEAFRARGDGRLATTLRGLDEALHGGIPAGKLTEVAGPSGIGKTQFCLKLALLATLPECYGGLNGRVLYIDTESKFSSRRMIEIGEKSFPQIFRQEGLAQKMAGRILVLRPTSLSEFTKSLEQMKVTLLQHDVKLLVVDSMAALMSSSIAEFSQIPVVVTNQVRSQSNDDGYRYSFEVEKKYDSNNAEGFESHLVAALGIQWAHAVTIRLVFEAHSGHRYIKVAKSPMTPAVAFPFTVESSGIILLSDEGIDVPSPEITSIRCQGCNIRTEDISSVPRDGTNG

SEQ ID NO: 117152 - protein, 57 aa, Oryza sativa
  Clone ID: PAT_MRT4530_20585C.1.pep
MSLTFLMMRSCDEGPSGTSRFFNEESSHSEKSSDDEESDAPTENIPTDPDEAVDAAG

SEQ ID NO: 117153 - protein, 119 aa, Oryza sativa
  Clone ID: PAT_MRT4530_20586C.1.pep
MQCFVGIRGKGEALLNEEKEVEIYRSINRKSASDLQLHEKAQKSNLIITNGPRMYVTDLGAHMEVSRRKLRARRAHRGSADPLLSPIQSHFGQEIRETEEVAAGQKPGLLGHSRVRPNH

SEQ ID NO: 117154 - protein, 128 aa, Oryza sativa
  unsure (1)..(128): unsure at all Xaa locations
  Clone ID: PAT_MRT4530_20587C.1.pep
DAXXVDXXXLXVXIXXAVHTAXRXRXSVRXLTHHFQXVGGLLRXLXIPELXRHPXTRRXLDQLDXTLLRAXKLXRSCSXCXKQNAXQLXXIINGXTXXCKLXGXQXEIXRYIQLIPLXTLVGVLPTEV

SEQ ID NO: 117155 - protein, 92 aa, Oryza sativa
  Clone ID: PAT_MRT4530_20588C.1.pep
EKNGIPCPARSSIRGRIVSLFLIAFFAEYAAASINPDCSASNNSMDHSAQSNSNMTLYCQKPTVMNKSLTKIIQLATCGLESTTIFSHKFTK

SEQ ID NO: 117156 - protein, 59 aa, Oryza sativa
  Clone ID: PAT_MRT4530_20589C.1.pep
MVVVAGERKRRRRRKADKVGPTSSVSGPGGGLGILCGRNSVSGCQYKTECVAPLVMTDE

SEQ ID NO: 117157 - protein, 169 aa, Oryza sativa
  Clone ID: PAT_MRT4530_2058C.1.pep
MAEASRDDVNGHGMRMAESFPRRRVRASRGLVVANLHARGPKTADPPASSSAAVDLDSQGPMVANLMLLRPVTADSSCGGHIAVITIVVTVVITIVVVVVVTVIVAGPIDVPLTPKAHQLRAWSMTAVGRSGALAVIGRYGGGRPGEGGLGGGDGDGGESARSGGKEVE

SEQ ID NO: 117158 - protein, 79 aa, Oryza sativa
  unsure (1)..(79): unsure at all Xaa locations
  Clone ID: PAT_MRT4530_20590C.1.pep
ACAPLPFWNINAHSDAYITQGRAQGQGGNNNGKTVVNSELHRGQLLIIPQHYAHVXKAQKEGCAYIGFYTKSNSIVSHI

SEQ ID NO: 117159 - protein, 120 aa, Oryza sativa
  Clone ID: PAT_MRT4530_20591C.1.pep
MKNRNVSIKGNQHLVVYHIQRHNKVEARSSYEGLHCKTETEPPWESSRDALREPLWRRLGSTMGRSKRMGWAGCAMAMPSPAVLVPELSLWIPRELFEVNVHGRRSREAGSRQRRVETNS

SEQ ID NO: 117160 - protein, 81 aa, Oryza sativa
  Clone ID: PAT_MRT4530_20592C.1.pep
SHGEIVCLIACQRIARGEEEEEEEQEGGGGGSSNLFLWMMQNIWTRFSRNSMDSHSSQPTTATMGKELVERFPSLAFIFSD

SEQ ID NO: 117161 - protein, 130 aa, Oryza sativa
  Clone ID: PAT_MRT4530_20593C.1.pep
IGGRGRHGAAACASPRPAGGAGPRRGGATQGTAAPAAVPPAAAHPPPPPPPPPQQTPPGPAASWASASPAGATAPCRARGTTPTAAPAPAAAAAARPPPPPPPPPQPTPPAACSAGHRRSPSRCAASEEA

SEQ ID NO: 117162 - protein, 136 aa, Oryza sativa
  Clone ID: PAT_MRT4530_20594C.1.pep
DTWPACSDLRHITAIITGATSGIGAETARVLAKRGARLVLPARSLKAAAEARARLLAECPAAAGDVVVMPLDLSSLASVRRFAARFLALGLPLNLLINNAGKFADRFALSDDGVEMTFATNYLGHFLLTKLLMEKM

SEQ ID NO: 117163 - protein, 275 aa, Oryza sativa
  unsure (1)..(275): unsure at all Xaa locations
  Clone ID: PAT_MRT4530_20595C.1.pep
MSIEEALGRLKVVDGDEPRPLSGPITIGGKLHLTREQWEASXGDGRKGESSSPTGGHKPRKARGGVQLRGAQGVATGNHKPARDDTCRNCGKLGHWAKDCRQPRRGQAHVARVEEEEPALLLAHASIELPPAAPAAAAFLHLDEPKVLVSLCDGSSNDKADGWYLDTGATHHMTGRREFFTEFDSSVRGTVKFGDASGVEIKGVGSVTFTAKSGEHRLLTGVYYIPALRNSIISVGQLDENGSRVLVEDGLMRIWDRRRRLLAKVTRGTNRLYIC

SEQ ID NO: 117164 - protein, 353 aa, Oryza sativa
  Clone ID: PAT_MRT4530_20596C.1.pep
MLTSLRYLAGTAGASGFGSRATAEDATAACSDLRHITAIITGATSGIGAETARVLAKRGARLVLPARSLKAAAEARARLLAECPAAAGDVVVMPLDLSSLASVRRFAARFLALGLPLNLLINNAGKFADRFALSDDGVEMTFATNYLGHFLLTKLLMEKMAETAAATGVEGRIVNVSSTIHSWFAGDDAVGYIDAVTRRKIPYDPTRAYALSKLANVLHTRALADRLKEMKANVTANCVHPGIVRTRLIRERDGLVTNTVFFLASKLLKTIPQAAATTCYVAVHPAVAGVSGKYFADCNEASPSRLGSNADEAAKLWRFSDEVAAEEKEESVHAGSFRLQVQSSNADRGLAFA

SEQ ID NO: 117165 - protein, 78 aa, Oryza sativa
  Clone ID: PAT_MRT4530_20597C.1.pep
VVRCRLNDQPWTGWFMGSAEMPAEWTSVNNLHTCQNPTKHPEKWMALKRSDPHPWPSGRAAMPQMSMEHGSTQAYSKY

SEQ ID NO: 117166 - protein, 339 aa, Oryza sativa
  unsure (1)..(339): unsure at all Xaa locations
  Clone ID: PAT_MRT4530_20598C.1.pep
SPGCRLDSPSRSPAAPRRLPTASRAAPPAAGEQHLXEGGEPAAAAAAAKMSDDVIWHCIRHNHCSFMAKITTGIFCRNPYNATGICNRSSCPLANSRYATIRDHDGIFYLYMKTAERAHLPNKLWERVKLPRNYEKAMEVINKHLEFWPKLLVHKIKQRLTKMTQYRIRMRKLQLKVREKVMTMPRKETQRHLRRMDKAEKAAQLEKNIESELKERLKKGVYGDIYNYPFKEFDTILEMEKDDVAPTEEEEEEEVEYVEGDDEMDDMEDIEDFGGLPDDDEDDDNDGETDEDDLLDEPVAKKPKGRGSDLRSNIGKKSKKLITEVERDDDMGIRRRTRM

SEQ ID NO: 117167 - protein, 85 aa, Oryza sativa
  Clone ID: PAT_MRT4530_20599C.1.pep
MGTSCGHGARRMSTPHRWRKSAGCSSHRTSGSACLGSATADNDAAAAPPAAGSTLLCALADALWSHVFLLIFQDIMPRKRHVNAT

SEQ ID NO: 117168 - protein, 825 aa, Oryza sativa
  unsure (1)..(825): unsure at all Xaa locations
  Clone ID: PAT_MRT4530_2059C.1.pep
MASLSSSGTAAVNLSQGHSISEKLGKGNHALWKAQVSAAVRGARLQGYLTGAVKAPDAKISVTTDGKTVTKPNPTFEDWEANDQLVLGYILSSLSRDVLIQVATSKMAAEAWRAIEELYSNRTRARAVNTRLALTNTKKGTMKIAEYIAKMRALGDEMAAGDEDFSPIVSALCTKSDPITVGELCSQLLNFETLLDLYRSTGQGGAAFVANRGRGGGGGGGRGGNNATNNSNGGGGRGAPRGRGGGQIRGGRGRGTGGQDRRPTCQVCFKRGHTAADCWYRFDEDYVADEKLVATATNSYGIDTNWYIDIGATDHITGELEKLSTKEKYNGSEQIHTASGASMDISHIGHTTVHTPSRNIPLNNVLYVPQAKKSLVSASQLAADNSAFLELHSKFFSIKDQFTRDILLEGRCRHGLYPIHKPFGQSTSKQVLGAVKLPLSSTHHKGFKCLDVSSGRVYISRDVIFDENIFPFSTLHANAGARLKYEILLLPSSLTNYTANIGGVHVVEPVVNTPLPSGAELNPDATNNFSRENSAANEQGTQPEINMESAGHEAPDTDNLSASASGPDQGADNPGAVSGASGSDGGXGVDYEDTFSPIXRSMQQPPGFESSSKPNYVSSSTEKATTALLKDLNKEFALKDLGDLHYFLGIEVTKVSNGILLTQEKYANDLLKRVNMSNCKPVSTPLSVSEKLTLYEGSPLGPNDATQYRSIVGALQYLTLTRPDIAYSVNKVCQFLHAPTTDHWTVVKRILRYLNQCTSLRLNIHKSASTLVHGYSDADWAGSIDDRKSTGGFAVFLGSNLVSWSARKQPTVSRSSTEAEYKTRI

SEQ ID NO: 117169 - protein, 122 aa, Oryza sativa
  unsure (1)..(122): unsure at all Xaa locations
  Clone ID: PAT_MRT4530_205C.1.pep
MEEGDGVVMPSPAPTSPPSPPPPPPPPPRPSAPAATGGVAGRVGDSPSSPLESGPXSPPPSPSSFVSPTSPTPGAAGVPVSPSTCPTQPAPTVVSSPSAASREGHVSAVTPPPGSPQPQKAL

SEQ ID NO: 117170 - protein, 109 aa, Oryza sativa
  Clone ID: PAT_MRT4530_20600C.1.pep
LSHNVTGCRMYMRYQGGLRQWLASSSRSLIGHDSRLYSQFTPPHSMRNANLCNHHMEYPMSSLVDHEYPSRAVESLFPINDYAAGMHSHDISIHLLNFVLQPPRMHKRP

SEQ ID NO: 117171 - protein, 38 aa, Oryza sativa
  unsure (1)..(38): unsure at all Xaa locations
  Clone ID: PAT_MRT4530_20601C.1.pep
MGAIVLLLFLGGGLMPGSNGQXTPFSPRFSVYLACGAR

SEQ ID NO: 117172 - protein, 448 aa, Oryza sativa
  Clone ID: PAT_MRT4530_20602C.1.pep
MPTSQQDGGGGGERLFHGGGAGDGDGGGGGGAAAAAAARQVWVPGPVIVGAGPSGLATAACLKARGVPSLVLDKDATVAASWRERTYERLRLHLPRGFCELPLAPPFPPGTPPYPTRDQFVAYLDAYARAFAVEPRLGSRVRAASYDAAIGFWRVAAVDEAGGGGAGGETEFLSRWLVVATGENAVAAWPAEGVGAYRGAVMHTSSYKRGDEFAGKKVLVVGCGNSGMEVSLDLCNNGAATSMVVRDKIHVLPREILGISTFGLSVFLLKWFPIKWVDALLLIFSRLILGNIEKYGLRRPKIGPLQIKCSTGKTPVLDIGALKKIKNGEIKVVPAIHCFTEDGVEFVNGCREDFDAVIFATGYKSNVPSWLKEEEFFSESDGFPRKAFPHSWRGKNGLYATGFTKRGLQGTSYDAAMIAADIARRWTKSLAGPTAAADADHHETYIAN

SEQ ID NO: 117173 - protein, 349 aa, Oryza sativa
  Clone ID: PAT_MRT4530_20603C.1.pep
MLEECLIDQAPIISKDEKKGNDNGATTTQGLDKESAFHLNITTRGSFMHKTPSEGKVILDRIMENASFKNQSEEPLLEGNNVGIIYSPTIGVNIISESSAFAYLSDKATTPTDKFFKHPNGSLIEGYGIVQDGPIICDGKEAILDFHVIEIQEVDVLIGFSIEKLLINTPRLGCLEFSLGGRIHSRYPLTNRSYSLKDLKGINPVLCTHRIPIEPESSPSREPQRRFNNAMREVVKKEVLKLLHTGIIYPMPYRVVLGHRISERGIEVDRAKIEVIDQLPPPVNIKGIRSFLGHAGFYRRFIKDFTTITRPLTNLLAKDAPFHFDDVCLKSFETLKKALVFAPIIQPPD

SEQ ID NO: 117174 - protein, 152 aa, Oryza sativa
  Clone ID: PAT_MRT4530_20604C.1.pep
MTMMADGCSPKPEEGHHHRRGEADGEAVGSKAPRHRHRCRCLPQDLAKGRVLPLTPSSRGPAATVAPRIGRHRATTSTPPTVGLPPPSLHAIRRHRASPPAPAGRAPLPPPNRRYTQRRVREEKLRKIDLISSVCGPRREKKYLLQFGSARF

SEQ ID NO: 117175 - protein, 43 aa, Oryza sativa
  Clone ID: PAT_MRT4530_20605C.1.pep
AVHYRVIDQHWTPMAERQSLLVRPEQAKPSRRHWLELMELLCS

SEQ ID NO: 117176 - protein, 166 aa, Oryza sativa
  unsure (1)..(166): unsure at all Xaa locations
  Clone ID: PAT_MRT4530_20606C.1.pep
EGTPRQRRRLPLLHRLHVAVRRRRRRPARQEVDDDDAERPFLLLRLRRRHGRRRTERGGRRRRREGERRHGGGGGGGGVLWHRGHRXVQRLIKGIKSLSQIFAMYDDEEEDEEEREMVIGYPTDVQHVGHIGWDGMNKVGGMVNAFSLPSSLSLRQLEMAMEAAHA

SEQ ID NO: 117177 - protein, 117 aa, Oryza sativa
  unsure (1)..(117): unsure at all Xaa locations
  Clone ID: PAT_MRT4530_20607C.1.pep
VLDHRVVLQLIKRRGGRRRRREGERRHGGGGGGGGVLWHRGHRXVQRLIKGIKSLSQIFAMYDDEEEDEEEREMVIGYPTDVQHVGHIGWDGMNKVGGMVNAFSLPSSLSLRQLEMA

SEQ ID NO: 117178 - protein, 121 aa, Oryza sativa
  unsure (1)..(121): unsure at all Xaa locations
  Clone ID: PAT_MRT4530_20608C.1.pep
LPLLRPSPPPPPPISPPPPPPPAAAELPAADMXDACAVCAEPXEWVAYGACAHREVCSTCVARLRFVLRDLRCCLCITPCPAVFVTKAMGDRTKVIPDFSALRGAXGEGKAGEYWHHXATX

SEQ ID NO: 117179 - protein, 262 aa, Oryza sativa
  Clone ID: PAT_MRT4530_20609C.1.pep
MAVGKNKRISKGKKGSKKKTVDPFAKKDWYDIKAPSVFNVRNIGKTLVSRTQGTKIASEGLKHRVFEVSLADLQNDEDQAYRKIRLRAEDVQGKNVLTNFWGMSFTTDKLRSLVKKWQTLIEAHVDVKTTDGYMLRLFCIGFTKRRPNQVKRTCYAQASQIRQIRRKMVEIMANQASSCDLKELVSKFIPEVIGKEIEKATSSIFPLQNVFVRKVKILKAPKFDLGKLMEVHGDYAKEDIGTKLDRPAEDEAMAGQEVAAAE

SEQ ID NO: 117180 - protein, 57 aa, Oryza sativa
  Clone ID: PAT_MRT4530_2060C.1.pep
MDDNFIKDLGMIINAFCFIRNCYIVIWKTIRFGYGIVCVDDGFFGKGKKILVWFFYR

SEQ ID NO: 117181 - protein, 206 aa, Oryza sativa
  Clone ID: PAT_MRT4530_20610C.1.pep
CGGGATRRRLRCFRRCVLSCVRWRFCRFGAEPWTAWVFHAQPPAPSIPTPCLCRRRPSPPTASRSTPPLPDAAAVASPRPIPDAAATHADAPTPRQPATLPRPSRQSSIHIYDRRLSPPRALLTADPHPHRGQPRKPATTSSAGAADSLRRPHRRSTPRRLSPPRSLPTADPQRGQPNHIHTAVPGGEPPTTRICDFRLGIQLKCS

SEQ ID NO: 117182 - protein, 52 aa, Oryza sativa
  Clone ID: PAT_MRT4530_20611C.1.pep
MLHLRQAQLYFLYGNVDQYGNGGNGSNGGGNGNDHGGNNNNNASSSKGFLRY

SEQ ID NO: 117183 - protein, 530 aa, Oryza sativa
  Clone ID: PAT_MRT4530_20612C.1.pep
MEGRGLSELFRNTSEDMFLKAMMENSMGVAAAAPSMEMMGFRNLSQGFREDSEELFNSWLMNGEASFLKIHKILSQYMKIPGFSAMNNRPRQPSRLSSEAAGFPNQQHEIAQEHFPTDNLIPQNLAVHSEFTMNHNQQQLKYYSFSPTSYCVLDFFQIVLNWLSPMTGMQQKRECKLVTYFWQRKRYAAMQSNMPPITTETIETANKLRQDLTNASTVNSAPMSNTPSQTPTFVSPSSSSTSPLDNPHIVAQDTITSVVSMLKDTLERKKLSSHANGDTSSGISFGFYDSQHFQQNILGGTDIFPLVTTSQIQDSVMLPKVERPTEQGSGNFVAPANQVWLGTASREPSQSGSSTAIPAPSAGFEVCDDLPPIGQAMTVCESTRTNAANGNGTADCRSKGKDFRERILKENLKDDRKKGSLTRMGSISSEQADKGDPTKKRRVERSRKMAEAKERSSTPVIPSDIQVVLKRCETLEKEVRSLKLNLSFMNRKDSEQTKQIEELQKQNEDLVEEKERLLEEIERIVSDTNT

SEQ ID NO: 117184 - protein, 117 aa, Oryza sativa
  Clone ID: PAT_MRT4530_20613C.1.pep
VVDDDDELDEGRRSGDDSDSAPSVGSDLYKDEDDKEQLEKMSELDREMILAERGARIDDYKLKQLARASSSSSKADKSRRDSSPPPSPSRARSSARTDRSAAKSALDELRAKRMRAA

SEQ ID NO: 117185 - protein, 76 aa, Oryza sativa
  Clone ID: PAT_MRT4530_20614C.1.pep
MTVVVKGAFAVVAVQTAACEVEATALDGTGTVGAAAGLKAGQPASPSVAPKAFATLGDGFVLRLTAFARGGSLVDQ

SEQ ID NO: 117186 - protein, 71 aa, Oryza sativa
  Clone ID: PAT_MRT4530_20615C.1.pep
MTQRADLDTLRPAEAADVQVVTWDGKSIAAHTVDLVRCTPGSFMFKALPSAPLERTDLIGHSFGGTPSAPY

SEQ ID NO: 117187 - protein, 61 aa, Oryza sativa
  Clone ID: PAT_MRT4530_20616C.1.pep
SPAYTRDRYLYYNGLPNARLDKGPCDLYRGGMNGRRPYLGSPVANGGRYRHVSKIENVSKV

SEQ ID NO: 117188 - protein, 66 aa, Oryza sativa
  Clone ID: PAT_MRT4530_20617C.1.pep
YLYVIFNISSLQRNGENDHTQTLEELYWLLLIGSHVVSDSGEGETLLVNIPQHISFSSSPKIVTGV

SEQ ID NO: 117189 - protein, 168 aa, Oryza sativa
  Clone ID: PAT_MRT4530_20618C.1.pep
MANYLGYDVYDMELTSQLIDRGGGGGGVGGDSKVTLSGLLNFIDGLWSAFGEERLIVLTTNHVEDLDPALIRTGRMDKKIEMSYCDFETFKSMAKIHLDVDDHEMFAAVERLLPEVDLVPADVGEHLTAKNPRDDAGACLARLVNALHEAKAKKDAAERQDEDNGVVV

SEQ ID NO: 117190 - protein, 415 aa, Oryza sativa
  unsure (1)..(415): unsure at all Xaa locations
  Clone ID: PAT_MRT4530_20619C.1.pep
RAAGIGTRAGCTCNLCXRTALSAISRRSARLAYCGLFAASLVLSFLMRQFATPLLKQIPWINTLDYTQPDEWFQXSAVLRVSLGNFLFFAIFALMMIGVKDQNDRMAMVLAFWCGVLEQAYSAMLSEMWNKVKYKAQCLEHQQIAIYSKNFNCSVVMLLDFTNNWNDSWIEKDEQKWEIALLVVTVVCYLSTFAFSGLLFTWFNPSGHDCGLNVFFITMTIILAFAFAIIALHPQVNGSVMPASVISVYCAYLCYTSLSSEPDDYACNGLHRHSKQVSMSALILGMLTTVLSVVYSAVRAGSSTTFLSPPSSPRSGIKNPLLGDDNVEAGKSNSKEIDARPVSYSYTFFHVIFALASMYSAMLLTGWTSAASDSSELMDVGWTTVWVRICTEWATAALYIWTLVAPLLFPDRDFS

SEQ ID NO: 117191 - protein, 133 aa, Oryza sativa
  Clone ID: PAT_MRT4530_2061C.1.pep
MSMPSAGPPLLPPSLPLAVSGADHQKSCGSKDGDYSDSLLFVDPRSTTDLLEVADWAKAWMHPKGNQGRGGDSSMWQERRCWCRETAGVGVGDGCTGWPKTIDAAHRKAVGWLGGEITVGVGIYAGGGLKDSK

SEQ ID NO: 117192 - protein, 237 aa, Oryza sativa
  unsure (1)..(237): unsure at all Xaa locations
  Clone ID: PAT_MRT4530_20620C.1.pep
MWCASCLASACAGCTCNLCASALSAISRRSARLAYCGLFAASLILSFLMRQFATPLLKQIPWINTFDYTQPDEWFQMNAVLRVSLGNFLFFAIFALMMIGVKDQNDRRDAWHHGGWIAKIVVWVVLIVLMFCVPNVVITIYEVLSKFGSGLFLLVQVVMLLDFTNNWNDSWIEKDEQKWEIALLVVTVVCYLSTFAFSGLLFTWFNPSGPXIGVSCVLHYMTIILAVAFAIFALPPQ

SEQ ID NO: 117193 - protein, 120 aa, Oryza sativa
  unsure (1)..(120): unsure at all Xaa locations
  Clone ID: PAT_MRT4530_20621C.1.pep
MGSSGGVGEMGKKRIPANWEWKRKADSISIRPLGPARAEKKGKGPGNAAHARRWSTWPEKAETGRGDVSGAAALRDRREEEDGPDRXAPPVGDPERGGSGAAWVLLDINVLRISLFFRYP

SEQ ID NO: 117194 - protein, 221 aa, Oryza sativa
  unsure (1)..(221): unsure at all Xaa locations
  Clone ID: PAT_MRT4530_20622C.1.pep
TASTKAKEVLFAVSTKITVGDRNTMRFWDSVWIDGRRSKDLMPLVCAISKKKXKSLRQGKENDAWINNLDFEANPAISVDLIEQLVSLWIVVRDIHLNNKQLDQIVWKFTNHGEYSAISIVGXQAQCFSMTSMNFHSLIWRVWAPGKCKFHAWLVIXNWVWTSNRVATRVWQNNGLCPLCCREGETVPYLLVSCRYTKGIWSMVVDXVAYQQLDPRHWETT

SEQ ID NO: 117195 - protein, 129 aa, Oryza sativa
  Clone ID: PAT_MRT4530_20623C.1.pep
SGSSRRSESPTPTRTTSRASRSAATPTTTTTTGSRRNSRRAAGTPSADRTSSARSRTTASSSTRARSGPPWSPAAASWSTPASSSAGRGVAPSLTRHGRSCAMASRSPTLTAMRMRRMTKTWHCWLRWV

SEQ ID NO: 117196 - protein, 365 aa, Oryza sativa
  Clone ID: PAT_MRT4530_20624C.1.pep
MAGSSPSAAASGGGCEAVPSTSTIVAEMATGSHVLTVDGYSGTKGLAVGVHVKSGTFVAGGHSWHIKYFPNGATDETSEWTKGAAATVKARCKLTLLLDGRDGRAALPPPPPFTKSCELRTFSSGKGGSDQWGHKKFVRRKELEDPSKRLLRHDRFSVRCDVTVAVGIRTDDTTAKLPPPSDLHRHLGRLLKTNAGADVTFDVAGHKFAAHRCVLAARSPVFMAELLGPMKEEDTESHVVAIRDMDARAFKAMLHFIYTDSLPNVDDGGEAAAMAQHLLAAADRYDIERLKLICEDKLSGGVDATTAATTLALAEQHGCCRLKEACLRFMASPANLKAAMASDGFEHLARSCPSLLKELVANLAV

SEQ ID NO: 117197 - protein, 121 aa, Oryza sativa
  Clone ID: PAT_MRT4530_20625C.1.pep
LGGAGGDIKEAAGDGEMAGVAAEARRRSGGREEGAGDGSKEPRWRRPTARRRERRRIRRRRLREGRIRHPRGSRRGAAGTATAYGGGSGGAVLGKAGSVALGGLGGKRRARQRPTAADPPP

SEQ ID NO: 117198 - protein, 816 aa, Oryza sativa
  Clone ID: PAT_MRT4530_20626C.1.pep
MEGKHVVMSAVGIGIGVGVGLGLASAPWAGGGGQGARVGVTVERVEQELRRLVVDGADSRVTFDGFPYYLSEQTRVLLTSAAYVHLKQADISQYTRNLAPASRAILLSGPADFSSSQIHSKYGGGSSTDSSFKRSISETTLEKVSGLLGSLSILPQKEKPKGTIRRQSSMTDMKLRSSESTSSFPKLKRNASTSSDMSSLASQGPPNNPASLRRASSWTFDEKILVQAVYKVLHSVSKKNPIVLYIRDVEKFLHKSKKMYVMFEKLLNKLEGPVLVLGSRIVDMDFDEELDERLTALFPYNIEIKPPENENHLVSWNSQLEEDMKMIQFQDNRNHITEVLAENDLECDDLGSICLSDTMVLGRYIEEIVVSAVSYHLMNKKDPEYRNGKLLLSAKSLSHALEIFQENKMYDKDSMKLEAKRDASKVADRGIAPFAAKSETKPATLLPPVPPTAAAAPPVESKAEPEKFEKKDNPSPAAKAPEMPPDNEFEKRIRPEVIPANEIGVTFDDIGALSDIKESLQELVMLPLRRPDLFKGGLLKPCRGILLFGPPGTGKTMLAKAIANEAQASFINVSMSTITSKWFGEDEKNVRALFTLAAKVSPTIIFVDEVDSMLGQRNRAGEHEAMRKIKNEFMTHWDGLLSRPDQKILVLAATNRPFDLDEAIIRRFERRIMVGLPSLESRELILRSLLSKEKVDGGLDYKELATMTEGYSGSDLKNLCTTAAYRPVRELIQKERKKELEKKREQGGNASDASKMKEKDETIILRPLNMKDLKEAKNQVAASFAAEGTIMGELKQWNELYGEGGSRKKQQLTYFL

SEQ ID NO: 117199 - protein, 63 aa, Oryza sativa
  Clone ID: PAT_MRT4530_20627C.1.pep
GGSMHHVILQMKKTLYHMHSNVTREKKAIGHKVTSTGYTKPTYITSSAIITPNRTPQSPKCPL

SEQ ID NO: 117200 - protein, 194 aa, Oryza sativa
  Clone ID: PAT_MRT4530_20628C.1.pep
AWSDKHLARCSRHRPPAHARLLAPRPPSPAPPRPTAQTPPESGTRRRPLSLSASPPSSSSPTPTPWSGHSPPRRSCWPPRPTPPWRSATLSPSADTSTKRRLRPGHRTPPPPPLVYESQVERRHHETWKKFTVRIRRPPRGSSTSCGCYGQTTRRHRSQQGTTTMMAWGQRRAAGRSRASRRRSEVEKKERRGA

SEQ ID NO: 117201 - protein, 77 aa, Oryza sativa
  Clone ID: PAT_MRT4530_20629C.1.pep
RARGTNQSRRSNHYGGKRKTRGSRKLLFEFRAPLGGALPPAAAGVGNNKRGPGGALGPPWPASGRGTFSGFRRQRGT

SEQ ID NO: 117202 - protein, 68 aa, Oryza sativa
  Clone ID: PAT_MRT4530_2062C.1.pep
IYIYSRPTRFILTKCNFNLLGTSISYLYAKINLRMLRMYFSSNIKPHLFQPSILYDINCYKPHHLNYL

SEQ ID NO: 117203 - protein, 104 aa, Oryza sativa
  Clone ID: PAT_MRT4530_20630C.1.pep
LAGVLKRGDWKNLGVTKFNGFEENPLLASWVNRKKARTNRLSKNLPTLNGNWNPPFRGELSGGGVGVTPRVTVKFARALGPVLLVFFLSFLEILAGFPGKVLIG

SEQ ID NO: 117204 - protein, 240 aa, Oryza sativa
  Clone ID: PAT_MRT4530_20631C.1.pep
MRVGAEQRPDPLPPCLPLDMPHRSRIRARGARSGDRMCRRAASSPPACNRPSPPCPQPCCAGSADAAHAATRRRTVPRHYDSLKVDDDHKRRAKITQQNQGQRADVLADYRARLRRRKVTPTTRTGFLYAPDSVDAVLARRNTGEESDPAGEVVAPVADDAADCPQIRKKRMEIGDGDGGDGRRGGGGGRSGSRAPTPAATHETHKAAARGRRQMHPPHGPAGGPGERGAERATARGAAG

SEQ ID NO: 117205 - protein, 203 aa, Oryza sativa
  unsure (1)..(203): unsure at all Xaa locations
  Clone ID: PAT_MRT4530_20632C.1.pep
VRVGMEQRLDPLPPCLPLVLAHHSRACHHQCRIHAGSAVAPPASVPDMAHCSRIRARGARSGDRMYRRAVSSPPTCNRRSPPCSXPCRAGSADAVHAAARLKKKARSSIHQYSLKVDDDHKRRAKITQXNQGQRADVLADDRAGLRRRKVIXTPTTRTGFLCAPDSVXNTGKESDLVGEVVAPVADDAAGXPKIRKKRMEIEE

SEQ ID NO: 117206 - protein, 72 aa, Oryza sativa
  Clone ID: PAT_MRT4530_20633C.1.pep
GSIIGTSLLPLEIISTVYGRCHMWVLLGVTLGISKCLGLIAAGLESHYTKGTNNLCRYLRGDIWISCCCSGN

SEQ ID NO: 117207 - protein, 233 aa, Oryza sativa
  Clone ID: PAT_MRT4530_20634C.1.pep
MDHGSYCADATAATVCHLHCEISSVEVTGLSCPGGGALIFLRCHVPAGGGRTIQIDSRGADVDGGGGARSIDASWRDVASLRCDGSPACVRELVDRRSVVFEVRRRRRRRRIRDMVLGPAMASELVGRAEVAWRDVVAAAADDDDDDDAAVVVERRVELAAGATAPAVMTMSVRMSVRVSETTAVPAAGLSVRPASSAAARRESINAGCEWSAGGEDDVFAMAAACVAGDAFE

SEQ ID NO: 117208 - protein, 489 aa, Oryza sativa
  Clone ID: PAT_MRT4530_20635C.1.pep
MPPAGDDESPAATGDGYSKKVLQGRYELGRVLGQGASSKVYRARDARTGAHVAVKAIRKQQQPHHHPSCRSPEAAAAARRCVEVEREVAALRRVRGHPHVVALLDVLATRSTVYLVLELASGGSVLSALDSRGGGHYDEPAARRLFAQLASAVAHAHSLGVFHRDIKPENLLLDERGDLRLTDFGLSAFADADQHLGATDGLAATHCGSPAYVAPEILLKRRYDASKADVWSCGVVLFVLTAGYLPFNDGNLMAMYRKICAAKFRCPKWCSQELRSLIGRMLDPEPDTRIKIGEIFDHPWLQQDGSSSSFGMIQAASSHSKPEVEKWEAELEQAMELNAFDIIGFASGCDLSGLIGPLPDRVRFVLPGGDSKSVLDKVEKLGREEGLVVRRKEEEWCGGVHVEATSGKFTAYVRVNLLPKKILMIEAERGRRRQRWTSSFLAKPPPGSRIDWSGPADPACRMVPGGGFSHRRGTCREGKRANGGFGSGN

SEQ ID NO: 117209 - protein, 517 aa, Oryza sativa
  unsure (1)..(517): unsure at all Xaa locations
  Clone ID: PAT_MRT4530_20636C.1.pep
MEGVATYFLSNFTRLEMPPAGDDKSPAANGAGDGYSKVLQGRYELGRVLGRGASSKVYCARDARTGAHVAVRQGHPKAAAAALPPMCVEREVAALRHVRGHPHVVGLLDVLTTRSXLYLVLELARGGSVLSALDGRGGGHYDEPAARRLFVQLASAVAHAHSLDVFHRDVKSENLLLDERGDLRFTDFGLSTFTDADQQLGATDGLAATHCGSSAYVAPEILLKRRYDAGKADVWSCGVVLFVLTAGYLPFNDGNLMAMYRKICAAKFRCPKWCSPELRSLIGRMLDRNPXTRIKIGEIFDHPWFQQDGSLWRNGRXEAELEQAMELNAFDIIGFASGCDLSGLIGPLPDRVRFVVPGADSRSVLDRVEKLGREEGLVVRRKEEEWRGGVHVEATSGKFTAYVRVSLLPKKMLMIEAERRRTWCKSLGYTCHHRSQDYKDLLEKSKLMRLLLCHFDRLGGRLPAPDPVFTEPYSKRLMLRLRLRGEVLHGSSGVTLEQGHAVEFAVHDRLYNACAHR

SEQ ID NO: 117210 - protein, 189 aa, Oryza sativa
  Clone ID: PAT_MRT4530_20637C.1.pep
MTEVLPDSSGVKMCSKESSYRRMLDPRGSPDTRIQMGEIFDHPGLQQDGSSSSFGMIQAASSHSKPEVEKWVAELEQAMELNAFDIIGFASGCDLSGLIGPLPDRVRFVVPGGDSKSVLDKVEKLGREEGLVVRRKEEEWRGGVHVEATSGKFTAYVRVSLLPKKMLMIEAERVIGSEIPKFWHQLQIG

SEQ ID NO: 117211 - protein, 114 aa, Oryza sativa
  Clone ID: PAT_MRT4530_20638C.1.pep
MNSPITAVSGGPMSRVMIWYMCDRGGLLPSLILAGRVSLLLVRATSTRSPVLSSAACWDSLPSAAPRRWGQVRRVQPGGFGVDGLLIGPPLTAVMGEFMGPDSSAGAGDLRNAR

SEQ ID NO: 117212 - protein, 146 aa, Oryza sativa
  Clone ID: PAT_MRT4530_20639C.1.pep
MWPCQHHRHSSVPPPPPPAAIIHSATPSWPLLLSHRGPNPCDRYLLHWHWHASGVTNPSLAGLGNVDPEVGSRLLVSAASGSGRGWWWLPTPPPLALPVLSSGCGGGGRGRRGRQICQFVAMTGDHGPHVDGPLLTPPSSYVGLCA

SEQ ID NO: 117213 - protein, 57 aa, Oryza sativa
  Clone ID: PAT_MRT4530_2063C.1.pep
KQEVRPASQNKQAGKVIDELPILFSILMNYHPMFLIIYDNMNGVMFVYSFYLHMSKQ

SEQ ID NO: 117214 - protein, 249 aa, Oryza sativa
  unsure (1)..(249): unsure at all Xaa locations
  Clone ID: PAT_MRT4530_20640C.1.pep
CESSTYPILHGSALFSRGDTQVLCTVTLGAPGDAQRLDSIVGPPTKRFMLHYSFPPFSINEVAKRGGLNRREVGHGTLAEKALLAVLPPEGEFPYTVRVNSEVMASDGSTSMASVCGGSMALMDAGIPVREHVAGVSVGLVSEVDQTTGDISSYRILTDILGLEDHLGDMDFKIAGTRRGITAIQLDIKPAGIPLDIXCESLEPARKARNQILDRMDQEISSARAFNDGSSPRLATLSFSSDSLRKLLF

SEQ ID NO: 117215 - protein, 113 aa, Oryza sativa
  unsure (1)..(113): unsure at all Xaa locations
  Clone ID: PAT_MRT4530_20641C.1.pep
QRHVAHAWGLLNRSEAPDYLIGELPGDYGSYPFALSMNSDVLCKHQAYELIHAWWAMLGAVGFIIPEACNKLGANCCPXAVWFKTGALLLYGYTLYYLWTRMPINLIVAVATE

SEQ ID NO: 117216 - protein, 84 aa, Oryza sativa
  Clone ID: PAT_MRT4530_20642C.1.pep
PCNHGCRHSRGPVRKGWFTVCWWAQLAIDCRGCVVLLGAPLWVQIGNMLSLCLGFYYLVIIGDMTVNNLLYHKLGHNAPNGLLV

SEQ ID NO: 117217 - protein, 1526 aa, Oryza sativa
  unsure (1)..(1526): unsure at all Xaa locations
  Clone ID: PAT_MRT4530_20643C.1.pep
MSMAVASLRLLARGGRRRARFPAPLSVPGGRAAFLSGAAEEVAQADAPPPPPPGRKVLESFREEFEIGGRVISFETGKMARFANGSVVISMDDTHVLSTVAAAKSSEPVRDFLPLTVDYQEKQYAQGVIPTTYMRREGAPKERELLCGRIIDRPIRPLFPPGFYHEVQIMVNVISSDGKQDPDVMAANASSAALMLSDIPWNGPIGVIRVGRIDGNFVLNPTVDELGLSDLNLVYACSRDKTLMIDVQAREITERDLQAGMKLAHAEAVKCINPQLRLAKRAGKKKKEYKISLISDKSYEKIRTLSEAPIEEVFTDSTYGKFERGEALENITQSVKAKLEEECDEDSLKFLHKAVDTVRKQVIRKRIIEKGLRVDGRQLDEVRPLYCESSTYPILHGSALFSRGDTQVLCTVTLGAPGDAQRLDSIVGPPTKRFMLHYSFPPFSINEVAKRGGLNRREVGHDYRNXPIRLGDELRVWIEHKALDPTGFLLTNRLVFWERQWLSAGTLAEKALLAVLPPEGEFPYTVRVNSEVMASDGSTSMASVCGGSMALMDAGIPVREHVAGVSVGLVSEVDQTTGDISSYRILTDILGLEDHLGDMDFKIAGTRRGITAIQLDIKPAGIPLDIICESLEPARKARNQILDRMDQEISSARAFNDGSSPRLATLSFSSDSLRKLLFHRKKIEQETGARVSVSDGTVTIVAKTQPIMDKAIEKVEFLVGREIEVGRTYKGVVSSIKEYGAFVEFNGGQQGLLHISELSHDKVSKVSDVVSVGQVLSLTCIGQDLRGNIKLSLKATLPHAHEKKDLASNHTDPLPSQEVVGWTAVENMPSKDANAEPSISKDEDNMIEETPGCSTPAVIIRSAAECDAQDVTNDPKKKRPKVAKSSPKLSKPASERQEVKRTSAKKTSGASTTAKKNKKEKADSSNDVLDAIPEQNKSNIMNYSSPSNFRSGSMKLGDVVTAKVYQIRAYGLVLELSDGVRGMHKFAENGHKDFEVGEELLVKCSSFNAKGIPEYRTGGKIVAFSATRSHNDEACGSEAASDNRQEMNQKNEPKMRSSSRVAAMSNAGRRRRSLTSIAPSPVSSSSFPSGAREAQAPPSQLPSWKFSQVLGELPLAAAGEGHDNGTLQDDGDTISAIEFDGRGEHLAAGDHAGRVILFRRTDDESHPPPPPSRADLERTDYAAAAPPAYAYMAEFQSHEQELGDRREGEEAEMVRAAEQLVAVHARHQRPHRQALEASRQVSEHRSRKGNGQPRRRRSTPTSASLSEIALLGEGDSSVRNGYYYEWASKKARNYLSPDSAEHSEKASEVGEGYTAKCRRVFARAHVYNINSISNNCDGETFVSADDLRINLWHLEVTDQCFNVVDMKPADMEDLVEVDTSAEFHPSSCSLLAFGSSRGFVRLVDLRQSALCDRNVRIFQDRGNSVQPRTLFTEIISCISDVKFTGDGKYLLTRDYMNLKLWDLRVESSPVATYKVHEFLRPKLSELYNNDCIFDRFSCCSSKGGDYFATGSYRFLLLQHINLISGV

SEQ ID NO: 117218 - protein, 168 aa, Oryza sativa
  Clone ID: PAT_MRT4530_20644C.1.pep
SSTSLALIKDLFYKLYDASISGSPSGTGFGYSNTGRQPAAMLPMDSPDVVPHNFFRSIKSSAQLLNNDHLSLLHAFPVLEFASTEDSIVSIYDTSLTACAVEPLDGNDSDIWTNVHEELSQFTRCNTASEADKANISYMDKLINSDSKMSCRSVSHAEDPGYGNNDHF

SEQ ID NO: 117219 - protein, 426 aa, Oryza sativa
  Clone ID: PAT_MRT4530_20645C.1.pep
MATDSSSSAAADKNTVFRKLRAKSDNKMCFDCNAKNPTWASVTYGVFLCIDCSAVHRSLGVHVSFVRSTNLDSWTPEQLKMMVYGGNNRAQAFFKQHGWTDGGKIEAKYTSRAADLYRQLLAKDVAKNSTEDGNNSWPSSPVAASQPTNQADAIPDLKLAEASKEVANEKTEPEVIRSPRAPTHSFKKPIVAKKPGNKTGGLGARKLTSKPNESLYEQKPEELAPALPPVTENSTAKSKSHTSRFEYVENTPSAGSNSEENQVIGHVAPPKSSNFFGEFGMDSGYHTTSAPGPSKVQVWMDSGYHKKSAPGPSKVQIEESSEARQKFSNAKSISSSQFFGDQASFEKEAQVSLQKFSGSSAISSADLFGHPTNSSNVDLSASDLINRLSFQASQDLSSIKNMAGETGKKLTSLASNIMSDLQDRIL

SEQ ID NO: 117220 - protein, 52 aa, Oryza sativa
  Clone ID: PAT_MRT4530_20646C.1.pep
LPSRSRARHRTRQDVLRGRSTTGVNTFPEGGVSESLEPSVGHWTGETRWVSC

SEQ ID NO: 117221 - protein, 201 aa, Oryza sativa
  unsure (1)..(201): unsure at all Xaa locations
  Clone ID: PAT_MRT4530_20647C.1.pep
LSPVFTTPSPKFTVSTMEEVLLRHARLPRPTAPTARRSRRLRVSSTPVSSSSSSSXFVGRRAPPAMASSGDSSGKQRSDEEWRAVLSPEQFRILRLKGTELPGTGEYNKFYGDGVYNCAGCGTPLYKSTTKFDSGCGWPAFFEGLPGAINRTPDPDGRRVEITCAACGGHLGHVFKGEGFKTPTDERHCVNSVSIKFTPAS

SEQ ID NO: 117222 - protein, 75 aa, Oryza sativa
  Clone ID: PAT_MRT4530_20648C.1.pep
EMKLVFINSILVCRYRPRSFSWVVFYALRSAVQPALVILEFWSTVGFHSCAYIPIGVFVPCLFNEPHLCPGVFSV

SEQ ID NO: 117223 - protein, 134 aa, Oryza sativa
  Clone ID: PAT_MRT4530_20649C.1.pep
DQEKKNAQTAAAAAAVAALSSPAAPAAETVDPAPPTPPPKRVLPPIPQDEQRHGLPSGCLEEKPEDSSHRNARLRRAKIQPKRRLFSKEFTPRADVSPSFVIVITWLPLLGPWFFVCPQIHVRTVFWILHLVSC

SEQ ID NO: 117224 - protein, 624 aa, Oryza sativa
  Clone ID: PAT_MRT4530_2064C.1.pep
MGTGFRRIQIPGLQVHSSPLTNRLINHARCKDQNPYLRWYIWNYESDPDMALTSLMTQKEQRHSERVNGGHGLADGNRHPTKRQAAPHEPSPSRRVTRRVSVHIPPQIPQCRNRKSPTSPRSLVQDYADAGVLLLLLHITWYSVAMRSNCSILQVGTPKLLSASPRSSRKRLYGDFVAAEKPKWNPRGKSPESHFSRAQSSDWDLTKEFICSADPAQMQVVKEALHVATVPSCGLVCRDDEQSRVLEFCKGCVEQERSGSLYVCGCPGTGKTLSINKVKESVARWADETGMETPDALSINCTSLAKTHEIFSKILAKFQTRKKATCKLSPLQQLQTMFSHKESAPRRMLLVVVDEMDYLITRDRAVLHDLFMLTTYQFSRCILIGIANAIDLADRFLPKLESLNCKPLVVTFRAYSKDQISDIIKHRLKVLEYDVFEPLALEFCARKVAAASGDMRKALGVCRSAVEVFEARLQESSDQEFGLVTCITNKVVPVKEITFVHVYIDVTFDHMDIALSKAFKSPVVDSILCLPQHQQMVLCALANTFHHCKKKATTLGELNKSYIEICRSTQVPAVGMLEFSNMCMVLSDQGFMKLGQSKEDKLRRVMLQIDSSDITFAFKMYSLA

SEQ ID NO: 117225 - protein, 403 aa, Oryza sativa
  Clone ID: PAT_MRT4530_20650C.1.pep
MRVLPLALAAAIFSGVTAILVYLSGLSSYGGARVSDADLAALGALQSGFSKCVDANGLGLKAIPGEDYCRVVIQYPSDTDSKWKDPKTGEPEGLSFEFNLCEAVASWEQVRNSTTILTKEYIDALPNGWEENKCQNRTLCMEKLSLVLPETPPYVPRQFGRCAVVGNSGDLLKTKFGDEIDSYDVVIRENGAPIQNYTEYVGTKSTFRLLNRGSAKALDKVVELDETKKEALIVKTTIHDIMNQMIREIPITNPVYLMLGTSFGSSAKGTGLKALEFALSMCDSVDMYGFTVDPGYKEWLDQLVKIHSPMRGDPGRVVKWAPTKDTIEAARVASEKLLKRPGAGSEGPLSSCTMIKKREKGKTPKRSVVRHAALKHLEYMRGATRYPLERNAGGGYLCMINER

SEQ ID NO: 117226 - protein, 52 aa, Oryza sativa
  Clone ID: PAT_MRT4530_20651C.1.pep
LARLAVTGDARTADDEDARSGEDGGSGGRNRTAGAGGAARGELALSQGGGRR

SEQ ID NO: 117227 - protein, 56 aa, Oryza sativa
  Clone ID: PAT_MRT4530_20652C.1.pep
KNLGFFKIYWDGVKCSFKIMDFHPISFKSVHSKGLFKVTFQMRVIHLFFKALLFFF

SEQ ID NO: 117228 - protein, 148 aa, Oryza sativa
  Clone ID: PAT_MRT4530_20653C.1.pep
VETQDGGDAKVEVSPRDIVYMENAEPINGEQPEILHKLDLRYAGTSWCDESLALVYESWYKTRKTRTWVISPDKKDVSPRILFDRSSEDVYSDPGSPMLRRTAMGTYVIAKVKKQDENTYILLNGMGATPEGNVPFLDLFDMYVYIHQ

SEQ ID NO: 117229 - protein, 45 aa, Oryza sativa
  Clone ID: PAT_MRT4530_20654C.1.pep
PKLELKLELEHKPLREREPKSEHKPEPEQEVSHEPKPEPKHEHEP

SEQ ID NO: 117230 - protein, 730 aa, Oryza sativa
  Clone ID: PAT_MRT4530_20655C.1.pep
MASSRCRVAYVVLAALAAAPFLLLLLYGGGSPSALCLAAARSGGASRRLQYPSVAWSRVPPLPVLPSSPLPSLRASRWIIFAAAAHHPRHRPLPAVPGWQLLAVADETTPPDWSHPGAALLTLADQARLGFRSVAFLPARGHARKAAAYLFAVQRGARVIYDADARNAVLGSNLTKHFDVDLDHRQGGGVLLQYSHADPNRTVVNPYVHFGQPSVWPRGLPLHKAGEVGVEEFYTQVFGGGQFIQQGLCNGLPDVDAVFYFTRKSSEMEAFDLRFDADAPKVALPQGMMAPINSVNTLFHSPAFWGLALPVSVSPMAADVIRGYWSQRILWEIGGYLVVYPPTVHRMDNVHAHPFDDEKDIHVSVGRLIDFLMEWRSHKQTLFERILDLSYAMTEEGFWGEKDLQFMSAWLQDLVSVGYRQPRLMSLEIDRPRATIGHGDKQVFVPKKLPTVHLGVEEIGEVSTEIGNLIKWRKHFGDVVLIVHCTVPVDRVALEWRLLYGRIFRAVVILSEKSNSDLAVEVSNLAQAYKFLPKVFDRFAGAGGFMFLQDHMILNYWNLYDFDKAKLWITNKVKESWSDVPLHGNKIEWFINQGDMVKKAIASFPFQYQANYKRSVGEDKIIHCNSEIFYIPRSHIGDFSYLVQAIGSLDIHHSIAIPMLFLAMDLPSNFESKALTKLIYRTNVQSNATFATIYTAQAHAVYPMKVQNEIDFVELIRVMASGDPFLMELI

SEQ ID NO: 117231 - protein, 606 aa, Oryza sativa
  Clone ID: PAT_MRT4530_20656C.1.pep
MSAAELCDALAAAGFDGDGPLDLDSLEWPFLQGDDARRLLAWVSSRLRPANVLSATDLALYEQLELEGKLLEGEDLDFAFDSISAFSETGENQEDTFLTEESLEHIRDSKLTLRAEVSDLERQLASLEWQLDMLTAQATTITQGKKSRVSAKTNPNIQISRLDEKLAKRSLEQMNSLLGKLAATTQELSYYHSEADIGIYLSYSDFQSYIIQNLACIKELNRWFSKKFEKGPLQFVAKEDMSRGDYEGSHHLSVELKRINSISIRFARSKRQYIEAQAEYAKEEAILSTLRTQLASQQSLVHQDVHSLRRRNSEFAEELRDLSLQVKRCLSEIITSLCADLAQLEGANILQGDHNLKVLRQECYISQQKRFINYLVNQLAAHQFLKIACQIEGRAKMSSAYSLLKAAAMELQGYFSVVDGRLDRYHLIGQAASVMLEEGSIDDRDTFLHAVRDILSTHSGAQAMTPSYVSAYGLVEQISDLQNELEYLHHELENVLPRERKRCIDELCRMIQTLEQILSVPFTYVQPTLTPWPVAQSLEELEIINQQVSACVNEVTMARDKKAKMLQQPSRNVQQERRVFVDFFCHPGRLENQVREMSSHVRALQE

SEQ ID NO: 117232 - protein, 95 aa, Oryza sativa
  unsure (1)..(95): unsure at all Xaa locations
  Clone ID: PAT_MRT4530_20657C.1.pep
TLKKKRNNFFVVAGKLFCLRGAAPPPFFFRADLGGREVFGTGTGLLFFCRGRIYEREGRGAXSAPSLPFGQPLSPHPCRCRHSRCCRFPFSNQIY

SEQ ID NO: 117233 - protein, 84 aa, Oryza sativa
  Clone ID: PAT_MRT4530_20658C.1.pep
EAPLINRGSFPYEPFSYLHVPKYPASLLPLGHSLNLFTPGSPNTPIPGGMPYKSLEFEFGGNRTICPDLRRRVFTWGALCIFPI

SEQ ID NO: 117234 - protein, 61 aa, Oryza sativa
  unsure (1)..(61): unsure at all Xaa locations
  Clone ID: PAT_MRT4530_20659C.1.pep
LHYIHPNHFVNQIYTGHIISTWTNSKFQNAYLILRCLILIKPGSDMFIPRKKNKAPLFXFF

SEQ ID NO: 117235 - protein, 322 aa, Oryza sativa
  Clone ID: PAT_MRT4530_2065C.1.pep
MTTTKKKLVIDTDPGIDDAMAIFVALRSPEVELLGLTTIFGNVYTTLATRNALHLLEAVGRTDIPVAEGSHVTIKKATKLRIASFVHGSDGLGNQNFPPPTGKPLDQSAAAFLVEQANLYPGQVTVVALGPLTNLALAIELDPSFPKKIGQIVILGGAYSVNGNVNPAAEANIFGDPDAADIVFTSGADILAVGINITHQVVLSDADREKLEQSDSKYARYLSKILGLYYDYHKDAYFIKGVYLHDPATLIAAVDPSLMTYTEGVVRVQTDGITKGLTVFDTTKKRYGEITAWTGKPTVKVAVTVDAPAVVEMIMQRLTTDD

SEQ ID NO: 117236 - protein, 61 aa, Oryza sativa
  Clone ID: PAT_MRT4530_20660C.1.pep
SVITESHKLKTWFVSSQILVVFSEPPTCLSVELFLTQFLLFSNPVDHACLTMFDLACSAKI

SEQ ID NO: 117237 - protein, 86 aa, Oryza sativa
  Clone ID: PAT_MRT4530_20661C.1.pep
AFTIMDALPPLPMFYLLYEQEASMIEILPSAMHAYDSSLGGGMYFIKFRRIFKAIMKNQRNTSFTLFMSAETLILVSYNLVCLGRE

SEQ ID NO: 117238 - protein, 52 aa, Oryza sativa
  Clone ID: PAT_MRT4530_20662C.1.pep
WGRRPEGRMASAAVRRPGGGGSGVGNGSGRWIRRRELATTMAVVAAVSQRPD

SEQ ID NO: 117239 - protein, 69 aa, Oryza sativa
  Clone ID: PAT_MRT4530_20663C.1.pep
LRAQLDSTVGGVPPAALRGVWISLGCRRSEVIYPLGGPLGCLCLHLSEKYSLGPPHLPRRQSLKCKTTP

SEQ ID NO: 117240 - protein, 141 aa, Oryza sativa
  Clone ID: PAT_MRT4530_20664C.1.pep
MATAALRIDSDDVVLDVSNLALAAQASGAGRGDDGDAADNALMRLPRALGAAGVLTGAMAAAAAVYGSPPAGTVLARGGGMGYYVGLGGAFAAGVAEVWAAMWMAGDCPGRRVVGKRLLCAAVVPFLIVVSLGGFSVHVKN

SEQ ID NO: 117241 - protein, 129 aa, Oryza sativa
  Clone ID: PAT_MRT4530_20665C.1.pep
MQIRNLSDFYLHCHSVLDPRTLAAAAATVFSCSDCDEDDTSMNIVEIIFQSSWLKKNAGKPSSRRRKAAGRSGDDGDAEAEGEDEGSSRFCPPRGDDSPAHIRPTRAVSQSGAAREGELEGDPAEARPV

SEQ ID NO: 117242 - protein, 39 aa, Oryza sativa
  Clone ID: PAT_MRT4530_20666C.1.pep
MAIDPMYHDELPASRNTAGCNLAYFVVSNSWGEKFCQRI

SEQ ID NO: 117243 - protein, 81 aa, Oryza sativa
  Clone ID: PAT_MRT4530_20667C.1.pep
MPWPRLFLSLALSLSLSLIDLKDGWQTAASPPRRVDRKEDHGHWAAPSEDAVTNDVQDWTLFRIASTAGRSQQQRPSYFRY

SEQ ID NO: 117244 - protein, 1130 aa, Oryza sativa
  Clone ID: PAT_MRT4530_20668C.1.pep
MREQFGLKPKDTGNLHRHPNPECFERVPLPNRYNVSTYEHVSRFLAQCGEALSIDALRVSGVHEMKLSDLTSIKQRDNEYVQDYIQRFRDMRKRCYSLALTDSQLADLAFQELLTPIRERFSAKDFESLAHLAQKVTAHEQVFQEEKKAFKKVNHLSSYVSELDNEDDTEEAMKVDGINKYQRRYDRQEEQCYKDDDSFDHHWSYCFQKDLSDDVEETKHPQWCPSGIFTKNQKRRVQRMRNRELFQDVQKEINHRLNRTKPKQEWRVKSKMLSADEVEADKAKRVAKGKAIASASINMVFVLPAEFGVDQADADIMEESLARLVLSPEQAIFEKPERTGNRHLKPLYVKGFVNGKSISKMLVDGGAAVNLMPYATFKKLGKNSDDLIKTNMVLKDSGGNPSEAKGVLNVELTISSKTVLTTFFVIDGKGSYSLLLGKDWIHANCCVPSTMHQSLIQWQGDKIEIVPANSQLEMESPNCCSEGVVEGSNFYTKDTVDDLDGKLGQGFMSADDLEDVDIGPGDRSRPTFISNNLSSEFGTKIVELLKEYRDCFAWEYFEMLGLSRSIVEHRLSIKPGYRPYKQPPRRFPVIKKKGKLRVCIDFRDLNKATPKDEYPIPISNQLVDATLGHKIMAEEDIHKTAFRCPSAIGLYEWVVMTFGLKSAGATYQRAMNYIFHDPISLLVEIYIDGVEDGAFYTFAQVESRSRVYLGGQSSRKFGQYQEIFEFPPILIPPQKGVPFKLYLSTDEKSIGSVLIQEFEGTERAIFYLSRKLLDAETRYSPVEKLCLCLYFSCTKLRHYLLSNECTIVCKADVVKYKLSAPVLKGRVGKWIYALTEFDLRYQSPKAVKGQAIADFIVEHRDDSISLVDIVHWTFFFDGSGASFEFAYNIKPYAINNQAEYEAVLKGLQLLKEVEADVVEIMGDSLLVISQLAGEYECKNDTLMIYNEKCRELMDGFPLVTLKHVSREQNIEANDLAQSALGYKPMVKGVDIEVAAITGDDWRCDVYSYLKNPSQSASRKLRYKVLTYVLLEDELYYQMIDGMLLKCSSADQAMVAMGEVHEGSNQLARLEPETKIWTCTGVKQISQASEVVLTAEKLERRRCRRLLKIDSITLIDRKLGVPISGAPSVET

SEQ ID NO: 117245 - protein, 365 aa, Oryza sativa
  Clone ID: PAT_MRT4530_20669C.1.pep
MGTSAQEPNLWKQIDDAEHYLVSGLFEQAVSTALSVSSQVHSAAMENSCDHDELLEMLELAGMVLVQALKELKRTSEMFIQLKTIYGSVASIPLKIFITGATMHMAGGSGSDLRPIFDEYLAKWRYTDDQVYVLDEGKNSSSNGLVVTSVMSPEQYFEVAELYTVTFLSVVSHETATAISWTEKAELTEQDRQDLLRKLHALQSAANKKSTNQGAKLSESAERNLSTSQNGSISPAHEDATKSSAPTHNGNIQGLRKALPKSIQPSFQRVTNQFDPLFWWFHSFRIKFGKVHVVLPSGKVMFLFSLLFSTLYILRRKGAALKRTAFQQISSLRRGFLDALQLAFSTQINPLAAVQQVPQAPRASW

SEQ ID NO: 117246 - protein, 129 aa, Oryza sativa
  Clone ID: PAT_MRT4530_2066C.1.pep
MAQPQGKLVDTIRRPFTAASTFHRSATRHLQPLAMLAQRNGISRRGLLTFLTSTAAIPEAGESRKALLQEYLKKSKENKEKNDKERLDDYYKRNYRDYFGLIEGPARQKNEDELTESEKGILEWLDKNK

SEQ ID NO: 117247 - protein, 84 aa, Oryza sativa
  Clone ID: PAT_MRT4530_20670C.1.pep
MAAGDQLPDLSSKDLGATNINMLGLVSGGTVCGDADEELDFEVGPFLWLASRIVVWAWNLARTPTRSGRANTETGMGSSLPTPC

SEQ ID NO: 117248 - protein, 346 aa, Oryza sativa
  Clone ID: PAT_MRT4530_20671C.1.pep
MKTPSLLVQCFPGLLPSKATSCVPIVSERDLQLPSPAVEIIPSKSAHPYKYAGEKVDVQGLDIFKGKVSVADMIAFSPSEVVASKYDGSLKYWESSITLVNIIKNEIRDGQLSFRGKRVLELGCGSGLAGIFACLKGASTVHFQDTNAETIRCRAIPNVLANLEQARDRQNRPSESPVTPSRQLLAPNVHFYAGDWEELPTILSVVHPPAAPSNLSFSEDDFMDGCSSHDGSSIVGVDNCPRRSRKLSGSRAWERASETDQADGGYDVILISEVPYAVNSLKKLYALITKCLRPPYGVLYVVSKKNLVGSNGGARQLRALMEEEGVLGGHFLTELADREIWKFFFK

SEQ ID NO: 117249 - protein, 225 aa, Oryza sativa
  Clone ID: PAT_MRT4530_20672C.1.pep
MTVGESMSTVKGRARPVDHPKRWWRRKSWCELGENGVRTVLGCGEGAIEVGGDATKPELVAPRRKEVLTTAKLGRSSATAAAERERESNDGSSFRVECGWGRGGGLESGELVVSNPVAFNGPGKICGRISGQFKRREREEGKWRERERETRVVNPPFQAGGNGGAMVRRGQQERREVGDDRWVRMLASVVCGAVCVQVGRPSKRGEADQADGRRERNGMGHIITL

SEQ ID NO: 117250 - protein, 67 aa, Oryza sativa
  Clone ID: PAT_MRT4530_20673C.1.pep
PIKSHFLTYYFPLLKAQLNHMSNVHTLCGITISGLTVYSSHHSKTDLLLLAVREKAGLLVTQILPRI

SEQ ID NO: 117251 - protein, 36 aa, Oryza sativa
  Clone ID: PAT_MRT4530_20674C.1.pep
LFLVTSSHVMPPSQGYQPSHAMDIQPFEHKICPQLL

SEQ ID NO: 117252 - protein, 420 aa, Oryza sativa
  unsure (1)..(420): unsure at all Xaa locations
  Clone ID: PAT_MRT4530_20675C.1.pep
MAGMAPEGSQFDAKHYDSKMQELLNQGETEEFFTSYDEVHESFDDMGLQENLLRGIYAYGFEKPSAIQQRGIVPFCKGLDVIHASSVRGTGKTATXFCSGNFGTKLDLFVVXEXEALVLAPNSEAXQQIDNVIERTWFFISAVXIHSFVGGTSVRKLENXLAGGVHVXVGRPGGIFDLLRCHWLPFXNRSMLVCDERXELAFKGCDELKFNDIFQLLPSKIQVGVFSATMPPEALEITRKFMNKPVRILVKRDELTLEGIKQFYVNVEKEEWKLDTLCDLYETLAITQSVIFVNTRRKVDWLTDKMRGRDHTVSATHGDMDQNTRDIIMREFRSGSSRVLITTDLLARGIDVQQVSLVINYDLPTQPENYLHRIGRSGRFGRKGVAINFVTRDDERMLFDIQRFYNVVIEELPANVADLL

SEQ ID NO: 117253 - protein, 161 aa, Oryza sativa
  unsure (1)..(161): unsure at all Xaa locations
  Clone ID: PAT_MRT4530_20676C.1.pep
MSVGQSQRSVASSARLRQEAELAAVGEHERAAAETSEEYGAGVMVDVVCITILGSQSPPQDAVMASLQYRRGLPYAPHPSVVLCLRTSPPHPLSLRRAWNEVKKTARRVKNMXAQLNEHFHVDVSPSPSGFEAEPDEHGXEEIEDPFAGMPPDYDFFNFGH

SEQ ID NO: 117254 - protein, 141 aa, Oryza sativa
  Clone ID: PAT_MRT4530_20677C.1.pep
HASARRRRLGLRPSERGIGNAAPARAAPPPSPAGSAGCARFRSTRRLGIAPSCSSLTAILAQGRVVGLGGCKVVFFPLLAAAAGDSRGRLNAGVLHRPVGGHSWGLLPYDEAQRHDQDRKGGGEDDREGGRAPHVVPQADG

SEQ ID NO: 117255 - protein, 197 aa, Oryza sativa
  Clone ID: PAT_MRT4530_20678C.1.pep
MSVGQSQRSVASSARLRQEAELAAVGEHERAAAETSAMVARASRLVAAELAAARVEVEAAAAADAARAAAAELKALRDSSTNSSVSASDNTDDELTREAARTTGRIEPEEYGAGVMVDVVCITILGSQSPPQDAVMASLQYRRGLPYAPHLMRMIEHVSQIQFVCEEPHTSLSLRLPKRCSVPQDIPSTSSQPPTTS

SEQ ID NO: 117256 - protein, 207 aa, Oryza sativa
  unsure (1)..(207): unsure at all Xaa locations
  Clone ID: PAT_MRT4530_20679C.1.pep
FFFFFFSALSNPTGHPCILQHSATNTQQGFQSFPIIWHQHNQRGVPRHPISTTAAPQTGHPSSSPLPVHSWRHQAHIRHHAHMHLSQQHAPGSGQCHPHPHGCTTCPQHIHQGSTFTHCTPHSTTARIFIHQPVATTHRQHTXIFISVPFTVFPYMQINGPHNPVHTSGESPQPAPCGGEANLSHCGHFFRGPPTNRSPNSGWVSQP

SEQ ID NO: 117257 - protein, 407 aa, Oryza sativa
  Clone ID: PAT_MRT4530_2067C.1.pep
MQQKEAGEEAVVVVGAGIAGLAVALGLHRKGVKCSVLESSPELRASGFAFATWTNAWQALDNLGVGDKIRKLHLHLQELHVFSSSTGEITRRADLTVQGKRGPNELRCVRRDWLLRALEEELPKGTIRYSSKIVAIEEDGNAKIIHLADAAILRAKVLIGCDGVNSVVAKWLGLTKPSSSGRLATRGLAHYPDGHGLDPRFKMFVGHGFRAGVIPCNETDAYWFFTWSPSEHESNGVEESAEKMKQFVLTKLRSSKIPTEVLEVVERSNINDVVASPLRFRPPLSLLLASISKGNACVAGDALHPMTPDLGQGGCAALEDGVVLARCLGDALLGGGGAAESERIEASLREYARIRRWRSVELVGTAYVVGIVQQSNNAVISFLRDKWLAGVLAGRLLKMADYDCGKL

SEQ ID NO: 117258 - protein, 539 aa, Oryza sativa
  Clone ID: PAT_MRT4530_20680C.1.pep
MDESNIPSFTLGDFDPNYVSRSFPTGKYDATGSAPTPPVMEPPAGSEASGTMSGSVSTNTGSKRSRTSGVWQHFDEVAMTGPDGRQVTFARCRICKNKLSAKSSGGTGHLKRHAEACAKKQGIQLRQQQLLLNPDGTVRTWEYDPMVARENLARLIARQDLPLNFGESPAFENYIKNSHNPRFQAVSRQTTTRDLKNVYDKGYESLKELFSTCTFSVSVTSDIWSSRAKEDYLSVVIHFIDDDWQMQKRVLGLRLIDVSHTGENIAERIREVIDEFNLADKIFAVTMDNASANSRAMEILQPLFCIYAQSFLLHQRCACHIINLIVKCGFKRVNVHIDAVRQAITWLTASNPRIAQWKRGKLRGFLNILSLIGDIINVDYSTYYADVKTKFYEWSRIWGGSSSSHGGGTSSSAASGDARSHGPAEELSNYLDSDAIRHETSDFNVLGWWNDHKMSYPVLSKLARDVLTVPVSSVSSESAFSLCGRIIEDRRTSLSSDHVEILLSVKDWELAAEHAQYTADNQELAAQFENLYLDDEQLG

SEQ ID NO: 117259 - protein, 540 aa, Oryza sativa
  Clone ID: PAT_MRT4530_20681C.1.pep
MSRSFPTGEYDATGSAPTPPVMEPPAGSEASGTMSGSASTNTGSKRSRTSGVWQHFDEVAMTGPDGRQVTFARCRICKNKLSAKSSGGTGHLKRHAEACAKKQGIQLRQQQLLLNPDGTVRTWEYDPMVARENLARLIARQDLPLNFGESPAFENYIKNSHNPRFQAVSRQTTTRDLKNVYDKGYESLKELFSTCTFSVSVTSDIWSSRAKEDYLSVVVHFIDDDRQMQKRVLGLRLIDVSHTGENIAERIREVIDEFNLADKIFAVTMDNASANSRAMEILQPLFCIYAQSFLLHQRCACHIINLIVKCGFKRVNVHIDAVRQAITWLTASNPRIAQWKRGKLRGFLNILSLIGDIINVDYSTYYADVKTKFYEGDRLQRPPPVPAAGKKKLQWSRIWGGSSSSHGGGTSSSAASGDARSHGPAEELSNYLDSDAIRHETSDFNVLGWWNDHKMSYPVLSKLARDVLTVPVSSVSSESAFSLCGRIIEDRRTSLSSDHVEILLSVKDWELAAEHAQYTADNQELAAQFENLYLDDEQLG

SEQ ID NO: 117260 - protein, 93 aa, Oryza sativa
  unsure (1)..(93): unsure at all Xaa locations
  Clone ID: PAT_MRT4530_20682C.1.pep
MEAPPTPLSGRVFLXRREKATIRKPKRLKQPGERHRXSWDADRQDRFVRRLADXLGHPKDSQELRFLWIDLLAKCDASLGMKIATRLNMKPHM

SEQ ID NO: 117261 - protein, 402 aa, Oryza sativa
  Clone ID: PAT_MRT4530_20683C.1.pep
MDESNIPSFTLGDFDPNYMSRSFPTGEYDATGSAPTPPVMEPPAGSEASGTMSGSASTNTGSKRSRTSGVWQHFDEVAMTGPDGRQVTFARCRICKNKLSAKSSGGTGHLKRHAEACAKKQGIQLRQQQLLLNRDGTVRTWEYDPMVARENLARLIARQDLPLNFGESPAFENYIKNSHNPRFQAVSRQTTTRDLKNVYDKVLGLRLIDVSHTGENIAERIREVIDEFNLADKIFAVTMDNASANSRAMEILQPLFCIYAQSFLLHQRCACHIINLIVKCGFRRVNVHIDAVRQAITWLTASNPRIAQWKRYCCASGEPPQYENDDLLMPVVFNMKQKYLKYWKDIPMLYSFAFILDPRGKLQGFLNILSLIGDIINVDYSTYYADVKTKFYEVFRKYELKF

SEQ ID NO: 117262 - protein, 521 aa, Oryza sativa
  Clone ID: PAT_MRT4530_20684C.1.pep
MSASGEPEKVPAAAEGEEKADGAKDAAGSGGELLYCGATNFETMGRKVVGGAQGNLVSPTRMRSLMGVDIRFVASGCSALVEMNYLWVLNVFRYKVIKASVGRNHTVVVTDDGKSFSFGHNKHGQLGTGSLRNEIETSPMPCLVTEATNAVCGADFTVWLSSVEGSTILTAGLPQYGQLGHGTDNEYNIKDSSVKLAYDPQPRPRAIASLSGKTIVKAACGTNHTVAVDSSGYVYTWGFGGYGRLGHREQKDEWQPRLVEVFQKHNVLPPNAIISAGAASSACTAGGGQLYMWGKLKNTGDDWMYPKPLLDLSGWNIRCMASGNMHHVVGADDSCISWGTAQNGELGYGPNGQKSSANPKKVDILEGMHVISVGCGYGLSAIVVDRSIASDRLNQLDIYDGDTSTEVEDRVEVQVAKKASASTNARSNKRKKTKDVSESEEDDDEEDDSDDDENGEIKGGKGRRGRKPSNRGRGRGAKKATPEPKPSARGRGRPKKTESPAQKTGSLGRGGKRGKRGRARK

SEQ ID NO: 117263 - protein, 546 aa, Oryza sativa
  Clone ID: PAT_MRT4530_20685C.1.pep
MDESNIPSFTLGDFDPNYVSRSFPTGEYDATGSAPTPPVMEPPAGSEASGAMSGSASTNTGSKRSRTSGVWQHFDEVAVTGPDGRQVTFARCRICKNKLSAKSSGGIGHLKRHAEACAKKQGIQLRQQQLLLNPDGTELLSTCTFSVSVTSDIWSSRAKEDYLSVVVHFIDDDWQMQKRVLGLRLIDVSHTGENIAERIREVIDEFNLADKIFAVTMDNASANSRAMEILQPLFCIYAQSFLLHQRCACHIINLIVKCGFKRVNVQIDAVRQAITWLTASNPRIAQWKRYCCASGEPPQYENDDLLMPVVFNMKQKYLKYWKDILMLYSFAFILDPRGKLRGFLNILSLIGDIINVDYSTYYADVKTKFYEVFRKYELKFQGDRLQRPPPVLAAGKKKLQWSRIWGGSSSSHGGGTSSSAASGDARSHGPAEELSNYLDSDAIRHETSDFNVLGWWNDHKMSYPVLSKLARDVLTVPVSSVSSESAFSLCGRIIEDRRTSLSSDHVEILLSVKDWELAAEHAQYTADNQELAAQFENLYLDDEQLG

SEQ ID NO: 117264 - protein, 670 aa, Oryza sativa
  Clone ID: PAT_MRT4530_20686C.1.pep
EEQATATQRGERVAAAAPCRVWADAIARGPARHGTFTVEGWHGPARPASTARHGIGSAAHTAAPRTWRQAAEPPRAAAGPGGGKRASLRSRVARGKRRRDVSACRWGWPAGRLGRCLTLGRSLTRSRCVSRSFPTSEYDATGSAPTPPVMEPPAGSEASGTMSGSASTNTGSKRSRTSGVWQHFDEVAMTGPDGRHVTFARCRICKNKLSAKSSGGTGHLKRHAEACAKKQGIQLRQQQLLLNPDGTVRTWEYDPMVARENLARLIARQDLPLNFGESPAFENYIKNSHNPRFQAVSRQTTTRDLKNVYDKGYESLKELFSTCTFSVSVTSDIWSSRAKEDYLSVVVHFIDDDWQMQKRVLGLRLIDVSHTGENIAERIREVIDEFNLADKIFAVTMDNASANSRAMEILQPLFCIYAQSFLLHQRCACHIINLIVKCGFKRVNVHIDAVRQAITWLTASNPRIAQWKRYCCASGEPPQYENDDLLMPVVFNMKQKYLKYWKDIPMLYSFAFILDPRGKLRGFLNILSLIGDIINVDYSTYYADVKTKFYEVFRKYELKFQGDRLQRPPPVPAAGKNKLQWSRIWGGSSSSHGGGTSSSAASGDARSHGPAEELSNYLDSDAIRHETSDFNVLGWWNDHKMSYPVLSKLARDVLTVPVSSVSSESTPWWG

SEQ ID NO: 117265 - protein, 73 aa, Oryza sativa
  Clone ID: PAT_MRT4530_20687C.1.pep
MWKGQIEAQTSHQGSANSTTLQKSTPTRLPPTTVPRLYLINADAKTTVTRSSLSPFCQPSIFSAGGQRNDANR

SEQ ID NO: 117266 - protein, 40 aa, Oryza sativa
  Clone ID: PAT_MRT4530_20688C.1.pep
DELNLIRNLLMNKSLKACLITIYNTSTNPVSVKYGSFRSY

SEQ ID NO: 117267 - protein, 68 aa, Oryza sativa
  Clone ID: PAT_MRT4530_20689C.1.pep
TQPYSYGQYQYQYPPPPETEQPPPSAYLSPSHSFHGYSSAPPPPPPSPSPAAVPAASSPSVLPRRSQQ

SEQ ID NO: 117268 - protein, 127 aa, Oryza sativa
  unsure (1)..(127): unsure at all Xaa locations
  Clone ID: PAT_MRT4530_2068C.1.pep
MAYSTARTSKDVNPHEFIKAYFRHLKXSGKMDLPEXVDIQKTARLKELPPYDPDCYYTRAAYIAWKIYLKHAIVVGGYQNIYGGRQRNGSRTPHFCKSIXSISRIILQQMDKMVMIYVNPKGSRLII

SEQ ID NO: 117269 - protein, 124 aa, Oryza sativa
  Clone ID: PAT_MRT4530_20690C.1.pep
MSLTCALLLPPLPKAMAMGMEVDFAEEEEEPGGGDDERREGGWCQGGAACRRPVSRRTGVWMRWCWAVVDARWQVVTDDKGLSPGPYKYLRSFSSVEDAGSRKLIVACAANYGNWLHYTGQGHL

SEQ ID NO: 117270 - protein, 141 aa, Oryza sativa
  Clone ID: PAT_MRT4530_20691C.1.pep
FVFFFFFLFFFFFFFFFFFFFFLGEGEKRVKILGLANPWGTFFFLGGYYRTTEAGASWSFLSKPLTAFGPRKNPSRIPPNLLLGQKTPNALVFFSGGDPTRDFFFQWPITKKRGLKKRKRKEKNPGKRGGKKGGRNLTSNG

SEQ ID NO: 117271 - protein, 104 aa, Oryza sativa
  Clone ID: PAT_MRT4530_20692C.1.pep
SCSSCGISFDRTPCFLLIKITVAQSSTSSGTALDNTCTANAFGGHLCKVTITYTPTFTTFSSSITDWYKLSPRYHTPPFNINIYAHHKKLPHACNNATLLVPHH

SEQ ID NO: 117272 - protein, 68 aa, Oryza sativa
  Clone ID: PAT_MRT4530_20693C.1.pep
FLAFFILSGGIPYLLLLFSLFFCVKEMTIHNIARKQKVSNVMILKEDKTRRKLRQRFIMNINGEQRQK

SEQ ID NO: 117273 - protein, 215 aa, Oryza sativa
  unsure (1)..(215): unsure at all Xaa locations
  Clone ID: PAT_MRT4530_20694C.1.pep
DLRAATEIICSRTPSQLQIMKQTYHAKFGTYLEHDIGQRTSGDHQKLLLAYVGIPRYEGPEVDPTIVTHDAKDLYKAGEKRLGTDEKTFXIRIFTERSWAHMASVASAYHHMYDRSLEKVVKSETSGNFELALLTILRCAENPAKCFAKVLXKSMKGMGTHHSTLIRVVVTRTEIAMQYIKAEYYKKYKKSLAEAIHSETSGNYRTFLLSLVGSH

SEQ ID NO: 117274 - protein, 80 aa, Oryza sativa
  Clone ID: PAT_MRT4530_20695C.1.pep
SLPVLLSKKKKKKKKKKKRKKKKKRGGPFWDPNFVPRGGGRLKESKFTQAGIQSHFFFLREPKKKKGAPLLKPWNRKNPG

SEQ ID NO: 117275 - protein, 97 aa, Oryza sativa
  Clone ID: PAT_MRT4530_20696C.1.pep
MPNLLFLYRSLDFTSIIQSCTNHYHISSPLPFGSTPMVTREYSSLAVHNGARLQDNLYTLIPRTKTHSPPVHVSCAHTRKALNCTSPVSSSVVSCMQ

SEQ ID NO: 117276 - protein, 75 aa, Oryza sativa
  Clone ID: PAT_MRT4530_20697C.1.pep
MNTSRAEDKAIDYWFPISSFRNAKWWYFAFHNVTAMVGAGVLSLPFAMSELGWGPGVAVIIMLRVITLSTLRQMV

SEQ ID NO: 117277 - protein, 110 aa, Oryza sativa
  Clone ID: PAT_MRT4530_20698C.1.pep
VEIEHGGLGDLLNSSAGPKLAFGCMSVPVDLILQSTRNKDKETAVNPINDSRSARTLSLRSNHRKAHQLNSMTYTESYCQNRLHRLSLSNSNSVDLNITDLDSSRFLLCF

SEQ ID NO: 117278 - protein, 95 aa, Oryza sativa
  Clone ID: PAT_MRT4530_20699C.1.pep
MEFSDREAADGARAASTASAAPNIAVTLICRCRLVHLANTGAIPARWRTQVVVPLQPSMTAVNFADDRQRRRRTSQMTAAATTNLTDRTILMDDR

SEQ ID NO: 117279 - protein, 135 aa, Oryza sativa
  unsure (1)..(135): unsure at all Xaa locations
  Clone ID: PAT_MRT4530_2069C.1.pep
MNTNFTIYPSYIYYDASLSGKCNGVGIMSVYTMTLCHDDDIRVVFGNLSVVFRLPDIIIWRYMLRKRCGPLMVTAQYGYFSARVYSPKLISCGGYSSVFSPRWMVMTDCRKELDXRGWLLEAPGHASPTDLGPKP

SEQ ID NO: 117280 - protein, 336 aa, Oryza sativa
  Clone ID: PAT_MRT4530_206C.1.pep
MPSSAAAAADGGDIEEVDRLKKRIRTLEMEETKLNQHMERVIQGIEANEAYLVGMVLRIMEKGPEDETAEDDCDVGFHLQRKIIFRPIAGVVYPSKLKPGDLIGVDSTSNEHYCGIGGLEKQIEELVEAVVLPIIHKNCFQRLGIHPPKGVLLYGPPGTGKTLVAHAFASQTNATFLKLTGPQLAVKLIGEGARLVRDAFQLAKEKAPCIIFIDEIDAIGSKHFDSGDREVQQTIVELLNQLDGVGSYESIKVIAATNRPEVLDPAFLRSGRLDQKIEFPHPSEQARIHSRKMDKNPDVNFEELACCTDDFNGAQLKAVRHEDFVRAIAQVKDGNY

SEQ ID NO: 117281 - protein, 190 aa, Oryza sativa
  unsure (1)..(190): unsure at all Xaa locations
  Clone ID: PAT_MRT4530_20700C.1.pep
TRQNDETHGISQGSLMEMTSPKRGIAMGYPALIEDDMRIKSAGKQEDDQQLIDGVLGIHEXLRRKCCRRFTGRIDGHCGAVDMSIEFFPTQWKPRLSSIIISDVRSCFDLYISSYASGLAEEFELFHGDIGEPCGLRRFVVAVTLDRLLHLRFSLLKRGSERSEEVACSLTAQKYGCKTNEIYVGPASFS

SEQ ID NO: 117282 - protein, 57 aa, Oryza sativa
  Clone ID: PAT_MRT4530_20701C.1.pep
THHSLSLSFSLFLPVFLCLSPPPHISPAATPAQSRRCQPDPPCHHLLLHLASSIVHF

SEQ ID NO: 117283 - protein, 124 aa, Oryza sativa
  unsure (1)..(124): unsure at all Xaa locations
  Clone ID: PAT_MRT4530_20702C.1.pep
QLLVCIPFIKKKISSLNHTILDCVFARQVRFRVLSPPGXTALSSSCGSRLQDWWPTSRACFXEHLRAGFDSLILLVSWXLWKERNSRVFDSTLSSVSVVLEYICLEDHLWSLACIATFGDLLKM

SEQ ID NO: 117284 - protein, 86 aa, Oryza sativa
  Clone ID: PAT_MRT4530_20703C.1.pep
MAAARSPFSSAIGRTLRLRLRLRHRPFERAPPGSSICSSYNWIFRKNCYERKYPDLSQLSNGYFIAAAHYSSSSADSHTYELQLKH

SEQ ID NO: 117285 - protein, 33 aa, Oryza sativa
  Clone ID: PAT_MRT4530_20704C.1.pep
AHIPRGDLLFKILSIHPNEELRFFSSRTLTIMD

SEQ ID NO: 117286 - protein, 92 aa, Oryza sativa
  Clone ID: PAT_MRT4530_20705C.1.pep
MASAELAYELAVLKSFMTVSGVTTVLFNPEVFAFPVPVVVFLSTVAFMVVIFTMIVITESSSERIKMPTFLGPCGVDSPDQFEAKPWKSDLE

SEQ ID NO: 117287 - protein, 173 aa, Oryza sativa
  Clone ID: PAT_MRT4530_20706C.1.pep
MAAIFNSVKHSLIMSLSKFQTAKAIWGSLKQRYVQDSGALLHTLMQQTHAIEQNAHQFLEKFLTYCFVMGVREDFDFIRTRLLHSSSTLTMAQALSDLLAEETRLKSLPAPSVSVSHGVLAASQRFGASRGTSSMPCKHCGKTGHSAENCFAQHPEKLAEYNYNKTTVIRHLT

SEQ ID NO: 117288 - protein, 40 aa, Oryza sativa
  Clone ID: PAT_MRT4530_20707C.1.pep
AAECAVCLRAVEEGETVRCACLRRTCPLCRDDVPVPARPT

SEQ ID NO: 117289 - protein, 363 aa, Oryza sativa
  Clone ID: PAT_MRT4530_20708C.1.pep
MPPVAVPIPQPSLRLTLPSRDVYSRRRSRRPSRRKSQRHLTTVKPPSETALRGHGLAFHFTDDPPMPKTGDKTNDTNASEIKSWKINDGKVMAAIVNSVKHSLIVSLSKFQTAKAIWGSLKQRYVQDSGALLHTLMQQTHAIEQNDMSIDEYYSAFDRLMGSLTSMVPACTTAACPAHQFLEKFLTYRFVMGVREDFDSIRTRLLHSSSTLTMALALSDLLAEETRLKSLPAPAKTIALQYVSSELKVADFFTKAQTREQHRFTCSNSVLQILHFCLEFEEGCYVYLYQGLAHIVHEDSIYIVIQREKICIDSNPRYVIIETEMGGGEEERDREISVGGWGRRENGGWQGSKRGIEEDSAGSA

SEQ ID NO: 117290 - protein, 95 aa, Oryza sativa
  Clone ID: PAT_MRT4530_20709C.1.pep
MDRSLSTSLLLVLAHFIIIFAHLLDARTLGDAYQPHVHASSSSAAALRLWSSADADGGALAKSSPRAPPPPRRCRWPTCALPKPPGSVHGLVTRS

SEQ ID NO: 117291 - protein, 144 aa, Oryza sativa
  unsure (1)..(144): unsure at all Xaa locations
  Clone ID: PAT_MRT4530_2070C.1.pep
MDKNGGLTGEARESELRRRLATAERWPRGRRRKRQERKTGEGARGRRFMGTGWADVAGRRPYYAGDVGGGIEXVGFEIESRPFAVRARAGKARRGRQRGRGXRGDAEWGVGESERRRLGRLPPAGRGQLELGDDPTGGPHLSAS

SEQ ID NO: 117292 - protein, 53 aa, Oryza sativa
  unsure (1)..(53): unsure at all Xaa locations
  Clone ID: PAT_MRT4530_20710C.1.pep
HNTRTTSHHYFQASSCWSPAHQVFRLGLXIPLASAYLAISLWQPLATHGCTPS

SEQ ID NO: 117293 - protein, 171 aa, Oryza sativa
  unsure (1)..(171): unsure at all Xaa locations
  Clone ID: PAT_MRT4530_20711C.1.pep
VGHVTLLISFFPFLPSTQVAFLPAAGRATPPPAHLSAPLPNRRRLSTPXSPTADTSCPPPHRRSAGGVDGGGSRGWNRMWWWRSRAGGSSLLPSRLPLAPDPAAMAVLAASAGGSVADGEVARSSARHRAASRREPRSVAPRTVPLHAAAGRLCPRTAPSHRSPAAPPHGV

SEQ ID NO: 117294 - protein, 107 aa, Oryza sativa
  Clone ID: PAT_MRT4530_20712C.1.pep
MPDQMLQIHELVLVLGRYSFQRLCVLAISSVRTLKQGKVTRRSMQDGEDLVRDAGSSEECEEGWRSVREWSARRRWRSDKNYSLMNQPVMEAEKSKSILILLVGFGD

SEQ ID NO: 117295 - protein, 88 aa, Oryza sativa
  Clone ID: PAT_MRT4530_20713C.1.pep
MVDCKGLGGYCGDYGYPISTRRCSGRDAVAIAFCEAKLLAVLRRQQWTHENLKRKDICVLVRNARSAAYRRALATIVLEQQEDDLKFL

SEQ ID NO: 117296 - protein, 1696 aa, Oryza sativa
  Clone ID: PAT_MRT4530_20714C.1.pep
MPRYKPEYLFGVEGFVQELRTMSFVIGFGTAPFYAQIRHDRHEEKCRVKVTLNSNSEEVPSVMFEAGGRNYIHACQEVARIATGELRDSYSDQLADTEYRYHPRQPQGSDRGSYLETEGIENDVTTRHLVEMLWAMDESRAETVLAAQDREDRNRGKICKLEDKVDRLEKELAALKGEAPPQKARIRLTARKRALFVPRYQLAPKIRVVEKEVAPANPPVIIISSDEEEEPKRNNSKFEWMVNTRSNGNGPNNPNSNNNGENPTLAQVLAQQTQLMNMMMQQFQNQQNQGNNHAPPQNKLAEFLRVRPPVFSSTTNPVEASDWLHAIEKKLDLLQCTDQEKVSFASHQLHGPASEWWDHFRLNRTTAEPITWLEFTAAFRKTHIPSGVVSLKKKEFRSLSQGSRSVTEYLHEFNRLARYAPEDVRNDEERQEKFLGGLNDELSYLLMVGDYPDFQKLVDKAIRQEDKYNRMEQKKRRIAQFKTQQGNNQKPRLTLGPQPMPQGGSSSVVRPQRQFFNNNAGNNIRNQAPRPVAVPAQQQPAKREQGNKPVVCFNCGDPGHYADKCPKPRRVKVVPAQNNSAVPASKARVNHVAAAEAQDAPDVILGTFLVNSVPATVLFDSGATHSFLSMSFAGNHGMEVEDLRRPLMVSTPSNQALSLQRSPSVRIEIQGVPFLANLILLESKDLDVILGMDWLARHKGVIDCANRKVTLNSYDGRVVTVHALSSESLRSRLNQITLEEIPIVREYPDVFPDDLPGMPPKRDIEFRIDLVPGTTPIHKRPYRMAANELAEVKRQVDELLQKGYIRPSSSPWGAPVIFVEKKDHTQRMCVDYRALNDVTIKNKYPLPRIDDLFDQLKGATVFSKIDLRSGYHQLRIKEEDIPKTAFTTRYGLFECTVMSFGLTNAPAFFMNLMNKVFMEYLDKFVVVFIDDIPIYSRIKEEHEEHLRLALEKLREHQLYAKFSKCEFWLSEVKFLGHVISAGGVAVDPSNVESVTNWKQPKTVSEIRSFLGLAGYYRRFIENFSKIAKPMTRLLQKDVKYKWSEECEQSFQELKSRLISAPILILPDPKKGFQVYCDASKLGLGCVLMQDGKVVAYASRQLRPHEKNYPTHDIELAAVVHALKIWRHYLFGTRTEVYTDHKSLKYIFTQPDLNMRQRRWLELIKDYDMGIHYHPGKANVVADALSRKGYCNATEGRQLPLELCKEFERLNLGIVGRGFVAALEAKPTLIDQVREAQINDPDIQEIKKNMRRGKAIGFLEDEHGTVWLGERICVPDNKDLKDAILKEAHDTLYSIHPGSTKMYQDLKERFWWQRVKAEHQKPAGLLQPLKIPEWKWEEIGMDFITGLPRTSSGHDSIWVIVDRLTKVAHFIPVKTTYSGSRLAELYMARIVCLHGVPKKIVSDRGSQFTSNFWKKLQEEMGSKLNFSTAYHPQTDGQTERVNQILEDMLRACALDFGGSWDKNLPYAEFSYNNSYQASLQMAPYEALYGRKCRTPLLWDQTGERQVFGTDILREAEEKVKIIQERLRVAQSRHKSYADNRRRDLSFEEGDYVYLRVTPLRGVHRFHTKGKLAPRFVGPYKIVSRRGEVAYQLELPQSLAGVHNVFHVSQLKKCLRVPTEEANIEQIEVQEDLTYVEKPIRILETSERRTRNRVIRFCKVQWSNHSEEESTWEREDELKSAHPHLFASSSESRGRDSV

SEQ ID NO: 117297 - protein, 51 aa, Oryza sativa
  unsure (1)..(51): unsure at all Xaa locations
  Clone ID: PAT_MRT4530_20715C.1.pep
SCVLVSXSAAGFPAFGSLRPLWRXDXSFFSRSLXLARATKSRSRGRRGFPA

SEQ ID NO: 117298 - protein, 2003 aa, Oryza sativa
  unsure (1)..(2003): unsure at all Xaa locations
  Clone ID: PAT_MRT4530_20716C.1.pep
DLHIKNSVVSEESVFAGEEFEEFQGQQGNSWFGMVHSWFGDRTVQPMPRYKPEYLFGVEGFVQELRTMSFVIGFGTAPFYAQIPHDRHEEKCRVRVTLNSNSEEVPSVMFEAGGRNYIHACQEVARIAIGELRDRYSDQLADTEYRYHPRQPQGSDRGSYLETEGIENDATTRHLVEMLWAMDESRAETVLAAQDREDRNRGKICKLEDKVDRLEKELAALKGEAPPQKARIRLTARKRALFVPRYQLAPKVRVVEKEVAPAQADPPVIIISSDEEEESKRTRSKIEWVATQDDEDEPNEPTIDLRCLEELDNGNGPNNPNNNNNGENPTLAQVLAQQTQLMNMMMQQFQNQQNQGNNHAPPQNKLAEFLRVRPPVFSSTTNPVEASDWLHAIEKKLDLLQCTDQEKVSFASHQLHGPASEWWDHFRLNRTTAEPITWLEFTAAFRKTHIPSGVVSLKKKEFRSLSQGSRSVTEYLHEFNRLARYAPEDVRNDEERQEKFLGGLNDELSYPLMVGDYPDFQKLVDKAIRQEDKYNRMEQKKRRIAQFKTQQGNNQKPRLTLGPQPMPQGGSSSVVRPQRQFFNNNAGNNIRNQAPRPVAAPAQQQPAKREQGNKPVVCFNCGDPGHYADKCPKPRRVKVVPAQNNSAVPASKARVNHVAAAEAQDAPDVILGTFLVNSVPATVLFDSGATHSFLSTSFAGNHGMEVEDLRRPLMVSTPSNQALSLQRSPSVRIEIQGVPFLANLILLKSKDLDVILGMDWLARHKGVIDCANRKVTLNSYDGRVVTVHALSSESLRSRLNQITLEEIPIVREYPDVFPDDLPGMPPKRDIEFRIDLVPGTTPIHKRPYRMAANELAEVKRQVDDLLQKGYIRPSSSPWGAPVIFVEKKDHTQRMCVDYRALNDVTIKNKYPLPRIDDLFDQLKGATVFSKIDLRSGYHQLRIKEYGLFECTVMSFGLTNAPAFFMNLMNKVFMEYLDKFVVVFIDDILIYSRTKEEHEEHLRLALEKLREHQLYAKFSKCEFWLSEVKFLGHVISAGGVAVDPSNVESVTNWKQPKTVSEIRSFLGLAGYYRRFIENFSKIAKPMTRLLQKDVKYKWSEECEQSFQELKSRLISAPILILPDPKKGFQVHCDASKLGLGCVLMQDGKVVAYASRQLRPHEKNYPTHDIELAAVVHALKIWHHYLFGTRTEEFERLNLGIVDRGFVAALEANPTLIDQVREAQINDPDIQEIKKNMRRGKAIGFLEDEHGTVWLGERICVPDNKDLKDAILKEAHDTLYSIHPGSTKMYQDLKERFWWASMKREIAEYVAVCDVCQRVKAEHQKPAGLLQPLKIPEWKWEEIGMDFITGLPRTSSGHDSIWVIVDRLTKVAHFIPVKTTYSGSRLAELYMARIVCLHGVPKKIVSDRGSQFTSNFWKKLQEEMGSKLNFSTAYHPQTDGQTERVNQILEDMLRACALDFGGSWDKNLPYAEFSYNNSYQASLQMAPYEALYGRKCRTPLLWDQTGERQVFGTDILREAEEKVKIIQERLRVAQSRHKSYADNRRRDLSFEEGDYVYLRVTPLRGVHRFHTKGKLAPRFVGPYKIVSRRGEVAYQLELPQSLAGVHNVFHVSQLKKCLRVPTEEANIEQIEVQEDLTYVEKPIRILETSERRTRNRVIRFCKVQWSNHSEEESTWEREDELNFGIEFDSDRFSLSPSREFPSPLPXAVGLRRRLRAPLKGPPVSPLPVATFAFASRRRKSPSAPCAAVVSAVAVAREDRRRARQVVAVLVRPFAVAGDHRSSFAAVDPKSFAASSSSPSPSVGLPPPFRSPCRRSPASVRRSSRLLRRAAAAVGDVTADVIGVVRHSVVSGESVFAEEEFEEFQGQQGKSPEYVALCDVCQRVKAEHQKPAGLLQPLKIPEWKWEEIGMDFITGLPRTSAGHDSIWVVVDRLTKVAHFIPVKTTYTGHKLAELYMARVTDGQTERVNQILEDMLRACVLDFGGSWDKNLPYAEFSYNNSYQASLQ

SEQ ID NO: 117299 - protein, 1636 aa, Oryza sativa
  Clone ID: PAT_MRT4530_20717C.1.pep
MPRYKPEYLFGFEGFVQELRTIGFGTAPLYAQIPHDRHEEKCRVKVTLNSNSEDIPSVMFEAGGGNYIHACQEVARIAIGELRDRYSDQLADTEYRYHPRQPQGSDRGSYLETEGIENDATTRHLVEMLWAMDETRAEVVLAAQDREDRNRGKICRLEDKVDRLKKELAALKGEAPPQKARIHLTARKRALFVPRYQLAPKVRVVEKEVTPALADPPVVNNKLAEFIRVRPPTFSSTTNPVEAGDWLHAIEKKLDLLQCTDQEKVSFASHQLHGPASKWWDHFRLNRTTAEPITWLEFTAAFRKTHIPSGAVSLKKKEFRSLTQGSRTVTEYLHEFNRLARYAPEDVRTDEERQERFLEGLNDELSYPLMTGDYHDFQKLVDKAIRQEDKYNRMEQKKRRIAHFKAQQGNSQRPRLTLGPQSMPQGGSSSVVRPQCQFFNNNAGNNIRNQAPRPVAAPTQQQPAKREQGSKPGVCFNCGDPGHYSDKCSKPRRVKVVPAQSNSTAPASKARVNHVAATEAQGAPDVILGTFLVNSVPTTVLFDSGATHSFLSMSFAGNHGMEVEDLIRPLMVSTPSNQALSLQRSPSVRIEIQEVPFLANLILLESKDLDVILGMDWLARYKGVIDCANRKVTLTSNDGRVVTVHALSSESLRSRLNQMTLEEIPIVREYPDVFPDDLPGMPPKRDIEFRIDLVPGTTPIHKRPYRMAANELAEVKRQVDDLLQKGYIRPSSSPWGAPVIFVEKKDHTQRMCVDYRALNDVTIKNKYPLPRIDDLFDQLKGATVFSKIDLRSGYHQLRIKEEDIPKTAFITRYGLFECTVMSFGLTNAPAFFMNLMNKVFMEYLDKFVVVFIDDILIYSRTKEEHEEHLRLALEKLREHQLYAKFSKCEFWLFEVKFLGHVISAGGVAVDPSNVESVTNWKQPKTVSEIRSFLGLAGYYRRFIENFSKIAKPMTRLLQKDVKYKWSEECEQSFQELKNRLISAPILILPDPKKGFQVYCDASKLGLGCVLMQDGKVVAYASRQLRPHEKNNPTHDLELAAVVHALKIWRHYLFGTRTEVYTDHKSLKYIFTQPDLNMRQRRWLELIKDYDMGIHYHPGKANVVANALSRKGYCNATEGRQLPLELCKEFERLNLGIVSRGFVAALEAKPTLIDQVREAQINDPDIQEIKKNMRRGKAISFLEDEQGTVWLGKRICVPDNKDLKDAILKEAHDTLYSIHPGSTKMYQDLKERFWWASMKREIAEYVAVCDVCQRVKAEHQKPAGLLQPLKIPEWKWEEIGMDFITGLPRTSLGHDSIWVIVDRLTKVAHFIPVKTTYSGSRLAELYMARIVCLHGVPKKIVSDRGSQFTSNFWKKLQEEMGSKLNFSTAYHPQTDGQTERVNQILEDMLRACALDFGGSWDKNLPYAEFSYNNSYQASLQMAPYEALYGRKCRTPLLWDQTGERQVFGTDILREAEEKVKIIQERLRVAQSRQKSYADNRRRDLAFEEGDYVYLRVTPLRGVHRFQTKGKLAPRFVGPFKIVSRRGEVAYQLELPPSMAGIHDVFHVSQLKKCLRVPTEEADPDRIELQEDLTYVEKPVRILEVSERNTRNRVIRFCKVQWSNHSEEEATWEREDELKSAHPHLFASSSESRGRDSV

SEQ ID NO: 117300 - protein, 80 aa, Oryza sativa
  Clone ID: PAT_MRT4530_20718C.1.pep
MEPHLMYSQASQAAQVQIGGGGRSAAEEETTIINHISGCASQAGAGVLPFPGRPVALASGWFAPGALWPASAGGAREVGI

SEQ ID NO: 117301 - protein, 94 aa, Oryza sativa
  Clone ID: PAT_MRT4530_20719C.1.pep
FLSLFLLLPPGVNSFSTAARKGTSPSPGCAGKLPSLSPFACPQFLPSFLPLGSCPRRPGFISPLLDVMRVTPRQAIEAHVEAVICPLTSTVLGV

SEQ ID NO: 117302 - protein, 136 aa, Oryza sativa
  unsure (1)..(136): unsure at all Xaa locations
  Clone ID: PAT_MRT4530_2071C.1.pep
SSIKQCIVLGSHATYSPATKKSDGSYPEEVLPSLITGDMSLPFTDHFXLPGGVPFLLFYEKHYYTQSCSDSYWETYHSLLCTXSKTEPFQRSALHKFIXKHANGSNDIFLVPSKAYHFHSSLRTINLKTPTLKFQQ

SEQ ID NO: 117303 - protein, 2664 aa, Oryza sativa
  Clone ID: PAT_MRT4530_20720C.1.pep
MPRYKPEYLFGVEGFVQELRTMSFVIGFGTAPFYAQIPHDRHEEKCRVKVTLNSNSEEVPSVMFEAGGRNYIHACQEVARIAIGELRDRYSDQLADTEYRYHPRQPQGSDRGSYLETEGIENDVTTKHLVEMLWAMDESRAETVLAAQDREDRNRGKICKLEDKVDRLEKELAALKGEAPPQKARIRLTARKRALFVPRYQLAPKVRVVEKEVAPAQADPPVIIISSDEEEESKRNHSKIEWVATQDDEDEPSIDLRCLEELDTTNPVEASDWLHAIEKKLDLLQCTDQEKVSFASHQLHGPASEWWDHFRLNRTTAEPITWLEFTAAFRKTHIPSGVVSLKKKEFRSLSQGSRSVTEYLHEFNRLARYAPEDVRNDEERQEKFLGGLNDELSYPLMVGDYPDFQKLVDKAIRQEDKYNRMEQKKRRIAQFKTQQGNNQKPRLTLGPQSMPQGGSSSVVRPQRQFFNNNAGNNIRNQAPRPVAAPAQQQPAKREQGNKPVVCFNCGDPGHYADKCPKPRRVKVVPAQNNSAVPASKARVNHVAAAEAQDAPDVILVREYPDVFPDDLPANELAEVKRQVDDLLQKGYIRPSSSPWGAPVIFVEKKDHTQRMCVDYRALNDVTIKNKYPLPRIDDLFDQLKGATVFSKIDLRSGYHQLRIKEEDIPKTAFTTRYGLFECTVMSFGLTNAPAFFMNLMNKVFMEYLDKFVVVFIDDILIYSRTKEEHEEHLRLALEKLREHQLYAKFSKCEFWLSEVKFLGHVISAGGVAVDPSNVESVTNWKQPKTVSEIRSFLGLAGYYRRFIENFSKIAKPMTRLLQKDVKYKWSEESLEAKPTLIDQVREAQINDPDIQEIKKNMRRGKAIGFLEDEQGTPCSAVAPAVAAAREDRRRHRQVAAVLVRPFAAVGTRRSFVAVDNPKVAAASFSSPSSSKIPSFPESPFSQKKSLKSSKASKATPGLEWYIPGLEIELCSRGGCSEWLGLYNRMPRYKPEYLFGVEGFVQELRTMSFVIGFGTAPFYAQIRHDRHEERCRVKVTLNSNSEDIPSVMFEAGGRNYIHACQEVARIAIGELRDRYSDQLADTEYRYHPRQPQGSDRGSYLETEGIENDATTRHLVEMLWAMDESRAETVLAAQDREDRNRGKICKLEDKVDRLEKELAALKGEAPPQKARIRLTARKRTLFVPRYQLAPKMVNTRSNGNGPNLNNPNNNNNGENPTLAQVLAQQTQLMNMMMQQFQNQQNQGNNHVPPQNKLAEFLRVRPPVFSSTTNPVEASDWLHAIEKKLDLLQCTDQEKVSFASHQLHGPASEWWDHFRLNRTTAEPITWLEFTAAFRKTHIPSGVVSLKKKEFRSLSQGSRSVTEYLHEFNRLARYAPEDVRNDEERQEKFLGGLNDELSYPLMVGDYPDFQKLVDKAIRQEDKYNRMEQKKRRIAQFKTQQGNNQKPRLTLGPQPMPQGGSSSVVRPQRQFFNNNAGNNIRNLAPRPVAVPAQQQPAKREQGNKPVVCFNCGDPGHYADKCPKPRRVKVVPAQNNSAVPTSKARVNHVAAAEAQDAPDVILGMFLVNSVPATVLFDSGATHSFLSMSFAGNHGMEVEDLRCPLMVSTPSNQALSLQRSPSVRIEIQGVPFLANLILLESKDLDVILGMDWLARHKGVIDCANRKVTLNSYDGRVVTVHALSSESLRSRLNQITLEEIPIVREYPDVFPDDLPGMPPKRDIEFRIDLVPGTTPIHKRPYRMAANELAEVKRQVDDLLQKGYIRPSSSPWGAPVIFVEKKDHTQRMCVDYRALNDVTIKNKYPLPRIDDLFDQLKGATVFSKIDLRSGYHQLRIKEEDIPKTAFTTRYGLFECTVMSFGLTNAPAFFMNLMNKVFMEYLDKFVVVFIDDILIYSRTKEEHEEHLRLALEKLREHQLYAKFSKCEFWLSEVKFLGHIISAGGVAVDPSNVESVTNWKQPKTVSEIRSFLGLAGYYRRFIENFSKIAKPMTRLLQKDVKYKWSEECEQSFQELKSRLISAPILILPDPKKGFQVYCDASKLGLGCVLMQDGKVVAYASRQLRPHEKNYPTHDIELAAVVHALKIWRHYLFGTRTEVYTDHKSLKYIFTQSDLNMRQRRWLELIKDYDMGIHYHPGKANVVADALSRKGYCNATEGRQLPLELCKEFERLNLGIVGRGFVAALEAKPTLIDQVREAQINDPDIQEIKKNMRRGKAIGFLEDEHGTVWLGERICVPDNKDLKDAILKEAHDTLYSIHPGSTKMYQDLKERFWWASMKREIAEYVAVCDVCQRVKAEHQKPAGLLQPLKIPEWKWEEIGMDFITGLPRTSSGHDSIWVIVDRLTKVAHFIPVKTTYSGSRLAELYMARIVCLHGVPKKIVSDRGSQFTSNFWKKLQEEMGSKLNFSTAYHPQTDGQTERVNQILEDMLRACALDFGGSWDKNLPYAEFSYNNSYQASLQMAPYEALYGRKCRTPLLWDQTGERQVFGTDILREAEEKVKIIQERLRVAQSRHKSYADNRRRDLSFEEGDYVYLRVTPLRGVHRFHTKGKLAPRFVGPYKIVSRRGEVAYQLELPQSLAGVHNVFHVSQLKKCLRVPTEEANIEQIEVQEDLTYVEKPIRILETNERRTRNRVIRFCKVQWSNHSEEESTWEREDELKSAHPHLFASSSESRGRDSV

SEQ ID NO: 117304 - protein, 118 aa, Oryza sativa
  unsure (1)..(118): unsure at all Xaa locations
  Clone ID: PAT_MRT4530_20721C.1.pep
MEPHLMYSQASQAAQVQIGGGGRSAAEEETTIINHISGRXKRLQGRPCEGQLYLHLQIPGRPALYSSYSSSSSSTGCASQAGAGVLPFPGRPVALASGWFAPGALWPASAGGAREVGI

SEQ ID NO: 117305 - protein, 35 aa, Oryza sativa
  Clone ID: PAT_MRT4530_20722C.1.pep
LVNRLICSNVLSDEDVDIRQRHILLTSHSMSKDQT

SEQ ID NO: 117306 - protein, 676 aa, Oryza sativa
  Clone ID: PAT_MRT4530_20723C.1.pep
MESSLLLKPFVLLPSAPRRRHHHHLSLPTPPHRRLPSSSSSSRHASPASYSFAVTRAARELFDGSADRPPGGVGRGGARRREYRVEQGEAPPAAAAAAAVRGVSPYVVPAAAVLALSFEDSHMEGGSEFASREDKGPEFWRIYPFWDHVSAEEVDFSGNGITAVGIEAFDGILQINTALKSLNLSGNAIGDEGAKCLSDILVENVGIQKLLLNSTNIGDEGAKAISDMLKKNKTIRTLQLSNNTIEYSGFASIAEALLENNVLRSLFVNGNYGGPLGASSLAKGILGNKTLRIGVSGAEFVADCLKYNTTLSTLDLRANGLGDDGAICLARSFKIINESLTSLDLGFNEIRDDGAFALAQALKANEDLAVTSLNLANNFFTKFGQPPWLLLLHLIAIAVLLLAVDSVPPAPAPPPAVATVFDDNYVATYGGDGYHLVNQGTQISLTLDKSSGAGFRSKLMYGSGFFHMRIKVPAGYTAGVVTAYYDEVDFEFLGDKDGNPITLQTNVFVGGHGDREQRLRLWFDPAADFHDYSILWNPFHLVIFVDETPVRVLKNLTSRGPEFEFPAKPMRPRGSVWDASDWATDGGRTKVDWARAPFTAAFQGFAVDACAAAAGGGVSSDDCGSPDTWWWNGGEYRRLTAAQQAAYDGVRGNLTYDYCTDNSKKRPVPPPECSFT

SEQ ID NO: 117307 - protein, 1721 aa, Oryza sativa
  unsure (1)..(1721): unsure at all Xaa locations
  Clone ID: PAT_MRT4530_20724C.1.pep
LSSLSSAQIPSFPESPFSQKKSLKSSKASKATPGLEWYIPGLEIELCSRGGCSEWXGLYNRMPRYKPEYLFGVEGFVQELRTMSFVIGFGTAPFYAQIPHDRHEEKCRVKVTLNSNSEDIPSVMFEAGGRNYIHACQEVARIAIGELRDRYSDQLADTEYRSHPRQPQGSDRGSYLETEGIENDATTKHLVEMLWAMDESRAEIVLAAQDREDRNRGKICKLEDKVDRLEKELAALKGEAPPQKARIRLTARKRALFVPRYQLAPKMVNTRSNGIGPNNPNNNNNGENPTLAQVLAQQTQLMNMMMQQLQNQQNQGNNHAPPQNKLAEFLRVRPPVFSSTTNPVEASDWLHAIEKKLDLLQCTDQEKVSFASHQLHGPASEWWDHFRLNRTTAEPITWLEFTAAFRKTHIPSGVVSLKKKEFRSLTQGSRSVTEYLHEFNRLARYAPEDVRNDEERQEKFLGGLNDELSYPLMVGDYPDFQKLVDKAIRQEDKYNCMEQRKRRIAHFKAQQGNNQKPRLTLGPQSMPHGGSSSVVRPQRQFFNNNAGNNIRNQAPRPVAAPAQQQPAKREQGNKPVVCFNCGDPGHYADKCPKPRRVKVVPAQNNSAVPASKARVNHVAAAEAQDAPDVILGMFPVNSVPATVLFDSGATHSFLSMSFAGNHGMEVEDLRRPLMVSTLSDQALSLQRSPSVRIEIQGVPFLANLILLESKDLDVILGMDWLTRHKGVIDCANKKVTLTSNVGRVVTVHALSSESLRSRLNQITLEEIPIVREYPDVFPDDLPGMPPKRDIEFRIDLVPGTTPIHKRPYRMAANELAEVKRKVDDLLQKGYIRPSSSPWGAPVIFVEKKDHTQRMCVDYRALNDVTIKNKYPLPRIDDLFDQLKGATVFSKIDLRSGYHQLRIKEEDIPKTAFTTRYGLFECTVMSFGLTNAPAFFMNLMNKVFMEYLDKFVVVFIDDILIYSRTKEEHEEHLRLALEKLREHQLYAKFSKCEFWLSEVKFLGHVISAGGVAVDPSNVESVTNWKQPKTVSEIRSFLGLAGYYRRFIENFSKIAKPMTQLLQKDVKYKWSKECERSFQELKSRLISAPILILPDPKKGFQVYCDASKLGLGCVLMQDGKVVAYASRQLRPHEKNYPTHDIELAAVVHALKIWRHYLFGTRTEVYTDHKSLKYIFTQPDLNMRQRRWLELIKDYDMGIHYHPGKTNVVADALSRKGYCNATEGRQLPLDLCKEFERLNLGIVGRGFVAALEAKPTLIDQVREAQINDPDIQEIKKNMRRGKAIGFLEDEQGTVWLGERICVPDNKDLKDAILKEAHDTLYSIHPGSTKIYQDLKERFWWASMKREIAEYVAVCDVCQRVKAEHQKPAGLLQPLKIPGWKWEEIGMDFITGLPRTSSGHDSIWVIVDRLTKVAHFIPVKTTYSGSRLAELYMARIVCLHGVPKKIVSDRGSQFTSNFWKKLQEEMGSKLNFSTAYHPQTDGQTERVNQILEDMLRACALDFGGSWDKNLPYAEFSYNNSYQASLQMAPYEALYGRKCRTPLLWDQTGERQVFGTDILREAEEKVKIIQERLRVAQSRHKSYADNRRRDLSFEEGDYVYLRVTPLRGVHRFHTKGKLAPRFVGPYKIVSRRGEVAYQLELPQSLAGVHNVFHVSQLKKCLRVPTEEANLDQISERRTRNRVIRFCKVQWSNHSEEESTWEREDELKSAHPHLFASSSESRGRDSV

SEQ ID NO: 117308 - protein, 843 aa, Oryza sativa
  Clone ID: PAT_MRT4530_20725C.1.pep
MDTHLVVVLALLAAAAAAEAKMSADYYSKTCPRADRIIADVLAQKQISNPTTAAGVLRLFFHDCFVGGCDASVLVASTAAARSERDADVNLSLPGDAFDALARAKAALEVECPGVVSCADLLAVAARDLVTMTGGPYYPLRLGRKDGLSSSPSAPDAEIPHANLTVSRLVAVFAAKGFTVQDLVALSGAHTLGFSHCKEFAARIYGGGGGGADPTMNPALAKRLQEACRDYRRGPTIAAFNDVMTPGRFDNMYFVNLRRGLGLLATDQELYGDARTRPHVERYAANETAFFADFARAARRLSHHGVKNGANGEIGGGVNLPDLWVMWLGLAARGTTRWSGDDVVQRTVIWRVVQNLLPGKTKDQSSGESTPSGIMWSFAAGSNLSTSASFNAEKESRKNLNKFYKEIRTLKNVNMAGRQFGDEGLFFLAESLAYNKSAEEVDFSGNGITAVGIEAFDGILQINTALKSLNLSGNAIGDEGAKCLSDILVENVGIQKLLLNSTNIGDEGAKAISDMLKKNKTIRTLQLSNNTIEYSGFASIAEALLENNVLRSLFVNGNYGGPLGASSLAKGILGNKTLRELHLHGNGFGNEGVRALMSALSAHKGKITVLDIGNNNITSEGSLHVAEFIKRTKSLLWLSLYMNDISDEGAEKVADALKQNKTISTVDLGGNNIHSKGVSAIAETLKDNSVVTTLELSYNPIGPEGVKALCDVLKFNGKIQTLKLGWCQIGVSGAEFVADCLKYNTTLSTLDLRANGLGDDGAICLARSFKIINESLTSLDLGFNEIRDDGAFALAQALKANEDLAVTSLNLANNFFTKFGQVALSEARDHVYEMSEKEIDIFF

SEQ ID NO: 117309 - protein, 3260 aa, Oryza sativa
  unsure (1)..(3260): unsure at all Xaa locations
  Clone ID: PAT_MRT4530_20726C.1.pep
MAMRRRRAVAGDDNQRQAMPRYKPEYLFGVEGFVQELRTMSFVIGFGTVLFYAQIPHDRHEEKCRVKVTLNSNSEDIPSVMFEAGGRNYIHACQEVARIAIGELRDRYSDQLADTEYRYHPRQPQGSDRGSYLETEGIENDATTRHLVEMLWAMDETRAETVLAAQDREDRNRGKICKLEDKVDRLEKELAALKGEAPPQKARIRLTARKRALFVPRYQLALKMVNTRASGSGNNNNEGNPTLAQVLAQQAQLMNMMMQQLQNQQNQGNNHAPPQNKLAEFLRVRPPTFSSTTNPVEAGDWLHAIEKKLDLLQCTDQEKVSFASHQLHGPASEWWDHFRLNRTTAEPITWLEFTAAFRKTHIPSGVVSLKKKEFRSLTQGSRSVTEYLHEFNRLTRYAPEDVRTDEERQEKFLEGLNDELSYPLMTGDYPDFQKLVDKAIRQEDKYNRMEQKKRRIAQFKTQQGNNQKPRLTLGPQSMPQGGSSSVVRPQRQFFNNNAGNNIRNQAPRPVAVSTQQQPAKREQGSMPVVCFNCGDPGHYADKCPKPRRVKVVPAQSNSTAPASKARVNHVAAAEAQGAPDVILGTFLVNSVSATVLFDSGATHSFLSMSFAGNHGMEVEDLRRPLMVSTPSNQALSLQRSPSVRIEIKGVPFLANLILLESKDLDVILWMDWLARHKGVIDCANRKVTLTSNDGRVVTVHALSSESLRPSLNQITLEEIPIVREYPDVFPDDLPGMPPKRDIEFRIDLVPGTTPIHKRPYRMAANELAEVKRQVDDLLQKGYIRPSSSPWGAPIIFVEKKDHTQRMCVDYRALNDVTIKNKYPLPRIDDLFDQLKGATVFSKIDLRSGYHQLRIKEEDIPKTAFTTRYGLFECTVMSFGLTNAPAFFMNLMNKVFMEYLDKFVVVFIDDILIYSRTKEEHEEHLRLALEKLREHQLYAKFSKFEFWLSEVKFLGHVISAGGVAVDPSNVESVTNWKQPKTVSEIRSFLGLAGYYRRFIENFSKIAKPMTRLLQKDVKYKWSEECEQSFQELKNRLISAPILILPDPKKGFQVYCDASKLGVGCVLMQDGKVVAYASRQLRPHEKNYPTHDLELAAVVHALKIWHHYLFGTRTEVYTDHKSLKYIFTQPDLNMRQRRWLELIKDYDMGIHYHPGKANVVADALSRKGYCNATEGRQLPLELCKEFERLNLGIVSRGFVAALEAKPTLIDQVREAQINDPDIQEIKKNMRRGKAIGFLEDEQGTVWLGERICVPDNKDLKDAILKEAHDTLYSIHPGSTKMYQDLKERFWWASMKHEIAEYVAVCDVCQRVKAEHQKPAVDRLTKVAHFIPVKTTYSGSRLAELYMARIVCLHGVPKKIVSDRGSQFTSNFWKKLQEETDEQTERVNQILEDMLRACALDFGGSWDKNLPYAEFSYNNSYQASLQMAPYEALYGRKCRTPLLWDQTGERQVFGTDILREAEEKPCAAAVPVVAVAREGRHRGRQVVAVLVRPFAVAVDRRSTVAAVDPIFSAASTSTPSPSVDLPPLLWSPIPTFPESPFSQEKNLKSSKASKATPGLEWYIPGLEIELCSRDGCSEWLVLYNRMPRYKLEYLFGVEGFVQDLRTMSFAIGFGTAPFYAQIPHDRHEEKCRVKVTLNSNSEDIPSVMFEAGGRNYIHACQEVARIAIGEFRDRYSDQLADTEYRYHPRQPQGSDRGSYLETEGIENDATTRHLVEMLWAMDETRAETVLAAQDREDRNRGKICKLEDKVDRLEKELAALKGEAPPQKARIRLTARKRALFVPRYQLVPKMVLTRSNGNGPNNNNNNNGENPPLAQVLAQQAQLMNMMMQQLQNQQNQGNNHAPPQNKLAEFLRVRPPTFSSTTNPVEAGDWLHAIEKKLDLLQCTDQEKVSFASHQLHGPASEWWDHFRLNRTTAEPITWLEFTAAFRKTHIPSGVVSLKKREFRSLTQGSRSVTEYLHXFNRLARYAPEDVRTDEERQEKFLEGLNDELSYPLMTGDYPDFQKLVDKAIRQEDKYNRMEQKKRRIAQFKTQQGNNQRPRLTLGPQSMPQGGSSSVVHPQRQFFNNNAGNNIRNQAPRPVAVLTQQQPAKKEQGSKPVVCFNCGEPGHYADKCPKPRRMKVVPAQSNSTVPASKARVNHVAAAEAQDAPDVILGTFLVNLVPATVLFDSGATHSFLSMSFAGNHGMEVEDLRRPLMVSTPSNQALSMQRSPSVRIEIQGVPFLANLILLESKDLDVILGMDWLARHKGVIDCANRKVTLTSNDGRVVTVHALSSESLRSRLNQITLEEIPVVREYPDVFLDDLPGIPPKRDIEFRIDLVPGTTPIHKRPYRMAANELAEVKRQVDDLLQKGYIRPSSSPWGAPVIFVEKKDHTQRMCVDYRALNDVTIKNKYLLPRIDDLFDQLKGATVFSKIDLRSGYHQLRIKEEDIPKTAFTTRYGLFECTVMSFGLTNAPAFFMNLMNKVFMEYLDKFVVVFIDDILIYSRTKEEHEEHLRLALEKLREHQLYAKFSKCEFWLSEVKFLGHVISAGGVAVDPSNVESVTNWKQPKTVSEIRSFLGLAGYYQRFIENFSKIAKPMTRLLQKDVKYKWSEACEQSFQELKNHLISAPILILPDPKKGFQVYCDASKLGLGCVLMQDGKVVAYASRQLRPHEKNYPTHDLELAAVVHALKIWRHYLFGTRTEVYTDHKSLKYIFTQPDLNMRQRRWLELIKDYDMGIHYHPGKANVVADALSRKGYCNATEGRQLPLELYKEFERLNLGIVSRGFVAALEAKPTLIDQVREAQINDPDIQEIKKNMRRGKAIGFLEDEQGTVWLGERICVPDNKDLKDAILKEAHDTLYSIHPGSTKMYQDLKERFWWASMKREIAEYVAVCDVCQRVKAEHQKLAGLLQPLKIPEWKWEEIGMDFITGLPRTSSGHDSIWVIVDRLTKVAHFIPVKTTYSGSRLAELYMARIVCLHGVPKKIVSDRGSQFTSNFWKKLQEEMGSKLNFSTAYHPQTDGQTERVNQILEDMLRACALDFSGSWDKNLPYAEFSYNNSYQASVQMAPYKALYGRKCRTPLLWDQTGERQVFGTDILREAEEKVKIIQERLRVAQSRHKSYADNRRRDLSFDEGDYVYLRVTPFRGVHRFHTKGKLAPRFXVGPYKIISRRGEVAYQLELPQSLAGVHNVFHVSQLKKXLRVPTEEANLEQIEVQEDLTYVEKPIRILEIDERRTRNRVIRFCKVQWSNHSEEESTGEREDELKSAHPHLFAGSSESRGRDSV

SEQ ID NO: 117310 - protein, 71 aa, Oryza sativa
  Clone ID: PAT_MRT4530_20727C.1.pep
KMENHSTVQLTIMANCLISAFQPLFPNNGWSNFSDIAPLLLKEPSALMPPSRRMNLVVERFYGGTDERPDP

SEQ ID NO: 117311 - protein, 1267 aa, Oryza sativa
  Clone ID: PAT_MRT4530_20728C.1.pep
MPCYKPEYLFGVEGFVQELRTMSFVIGFGNAPFYAQIRHDRHEEKCRVKVTLNSNSEDIPSVMFEAGGRNYIHACQEVARIAIGELRDRYSDQLVDTEYRYHPRQPQGSDRGSYLETEGIENDVTTRHLVEMLWAMDESRAETVLAAQDREDRNRGKICKLEDKVDRLEKELAALKGEAPPQKARIRLTARKRALFVPRYQLAPKVRVVEKEVAPAQADPPVIIISSDEEEESKRINSKIEWVATQDDEDEPSIDLLCSEELEKLESLVVWESSVCNNETQLRSIKVKMVNTRSNGNGPNNPNNNINGENPTLAQVLAQQTQLMNMMMQQFQNQQNQGNNHAPPQNKLAEFLRVRPPVFSSTTNPVEASDWLHAIEKKLDLLQCTDQEKVSFASHQLHGPASEWWDHFRLNRTTAEPITWLEFTAAFRKTHIPSGVVSLKKKEFRSLTQGSRSVTEYLHEFNRLARYAPEDVRNDEERQEKFLGGLNDELSYPLMVGDYPDFQKLVDKAIRQEDKYNRMEQKKRRIAQFKTQQGNNQKPRLTLGPQSMPQGGSSSVVRPQRQFFNNNAGNNIRNQAPRPVAAPAQQQPAKREQGSKPVVCFNCGDPGHYADKCPKPQRVKVVPAQSNSAVPASKARVNHIAAAEAQGAPDVILGTFLVNSVPATVLFDSGATHSFLSMSFAGNHGMEVEDLRRPLMVSTPSNQALSLQRSPSVRIEIQGVPFLANLILLESKDLDVILGMDWLARHKGVIDCANRKVTLNSYDGRVVTVHALSSESLRSRLNQITLEEIPIVREYPDVFPDDLPGMPPKRDIEFRIDLVPGTTPIHKRPYRMAANELAEVKRQVDDLLQKGYIRPSSSPWGAPVIFVEKKDHTQRMCVDYRALNDVTIKNKYPLPRIDDLFDQLKDKFVVVFIDDILIYSRTKEEHEEHLRLALEKLREHQLYAKFSKCEFWLSEVKFLGHVISAGGVAVDPSNVESVTNWKQPKTVSEIRSFLGLAGYYRRFIENFSKIAKPMTRLLQKDVKYKWSEECERSFQELKSRLISAPILILPDPKKGFQVYCDASKLGLGCVLMQDGKVVAYASRQLRPHEKNYPTHDIELAAVVHALKIWRHYLFGTRTEVYTDHKSLKYIFTQPDLNMRQRRWLELIKDYDMGIHYHPGKANVVADALSRKGYCNATEGRQLPLELCKEFERLNLGIVGRGFVAALEAKPTLIDQVREAQINDPDIQEIKKNMRRGKAIGFLEDEHGTVWLGERICVCHVLINSSQN

SEQ ID NO: 117312 - protein, 106 aa, Oryza sativa
  Clone ID: PAT_MRT4530_20729C.1.pep
MELVSQPGEVNAAMWAEAAPRLPVAEKVDVAADEEHVESSDAPEIMGARQRPRSDGDVALDSTTACRQQGGLLARDRQPPGDSEATAAVWNERRLEPWRRMGTGDE

SEQ ID NO: 117313 - protein, 79 aa, Oryza sativa
  Clone ID: PAT_MRT4530_2072C.1.pep
QSSLARRRRRSKRILRSRTRRSAPPGVGACSAGGGVVGGAGCTRRAEGGIGRRRGRALGRKASVAARERRDMAMEEAMV

SEQ ID NO: 117314 - protein, 63 aa, Oryza sativa
  Clone ID: PAT_MRT4530_20730C.1.pep
MGGLIIFNISRRPDLSGGAEGSWAPKDEEGSPLRFPPAREAVASTALNSSPRPMGIRSIRYLH

SEQ ID NO: 117315 - protein, 1680 aa, Oryza sativa
  Clone ID: PAT_MRT4530_20731C.1.pep
MVGSPGLEWYIPGLEIELYSRDGCPEWLGLYNRMPRYKPEYLFGVEGFVQELRTMSFVIGFGTVPFYAQIRHDRHEEKCRVKVTLNSNSEDIPSVMFEAGGRNYIHACQEVARIAIGELRDRYSDQLADTEYRYHPRQPQGKTVLAAQDREDRNRGKICKLEDKVDRLEKELAALKGEAPPQKARIRLTARKRALFVPRYQLAPKMVNTRSNRNGPNLNNPNNNNNGENPTLAQVLAQQTQLMNMMMQQLQNQQNQGNNHAPPQNKLAEFLRVRPPVFSSTTNPVEAGDWLHAIEKKLDLLQCTDQEKVSFASHQLHGPASEWWDHFRLNRTTAEPITWLEFTAAFRKTHIPSGVVSLKKKEFRSLTQGSRSVTEYLHEFNRLARYAPEDVRNDEERQEKFLEGLNDELSYPLMTEDYSDFQKLVDKAIHQEDKYNRMEQKKRRIAHFKAQQGNNQKPRLTLGPQSMPHGGSSSVVRPQHQFFNNNAGNNIRNQAPRPVAASTQQQPAKREQGSKPVVCFNCGDPGHYADKCPKPRHVKVVPAQSNSAVPASKARVNHVAAAEAQDAPDVILGTFLVNSVPATVLFDSGATHSFLSMSFAGNHGMEVEDLRCPLMVSTPSNQALSLQRSPSVRIEIQGVPFLANLILLESKDLDVILGMDWLARHKGVIDCANRKVTLTSNDGRVVTVHALSSEFLRSRLNQITLEEIPIVRGYPDVFPDDLPGMPPKRDIEFRKDLVPGTTPIHKRPYRMAANELAEVKRQVDDLLQKGYIRPSSSPWGAPVIFVEKKDHTQRMCVDYRALNDVTIKNKYPLPRIDDLFDQLKGATVFSKIDLRSGYHQLRIKEEDIPKTAFTTRYGLFECTVMSFGLTNAPAFFMNLMNKVFMEYLDKFVVVFIDDILIYSKTKEEHEEHLRLALEKLREHQLYAKFSKCEFWLSEVKFLGHVISAGGVAVDPSNVESVTNWKQPKTVSEIRSFLGLAGYYRKFIENFSKIAKPMTRLFQKDVKYKWSEECEQSFQELKNRLISAPILILPDPKKGFQVYCDASKLGLGCVLMQDGKVVAYASRQLRPHEKNYPTHDLELAAVVHALKIWRHYLFGTRTEVYTDHKSLKYIFTQPDLNMRQRRWLELIKDYDMGIHYHPGKANVVADALSRKGYCNATEGRQLPLELCKEFERLNLGIVSIGFVAALEAKPTLIDQVREAQTNDPDIQEIKKNMRRGKAIGFLEDEHGTVWLGERICVPDNKDLKDAILKEAHDTLYSIHPGSTKMYQDLKERFWWASMKREIAEYVAVCDVCQRVKAEHQKPAGLLQPLKIPEWKWEEIGMDFITGLPKTSLGHDSIWVIVDRLTKVAHFIPVKTTYSGSRLAELYMARIVCLHGVPKKIVSDRGSQFTSNFWKKLQEEMGSKLNFSTAYHPQTDGQTERVNQILEDMLRACALDFGGSWDKNLPYAEFSYNNSYQASLQMAPYEALYGRKCRTPLLWDQTGERQVFGTDILREAEEKVKIIQERLRVAQSRHKSYADNRRRDLSFEEGDYVYLRVTPLRGVHRFHTKGKLVPRFVGPYKIVSRRGEVAYQLELPQSLAEVHNVFHVSQLKKCLRVPTEEANLEQIEVQEDLTYVEKPIRILETNERRTRNRVIRFCKVQWSNHSEEESTWEREDELKSAHPYLFASSSESRGRDSV

SEQ ID NO: 117316 - protein, 214 aa, Oryza sativa
  Clone ID: PAT_MRT4530_20732C.1.pep
MELVSQPGEVNAAMWAEAAPRLPVAEKVDVAADEEHVESGDAPENHGGEAAPSIQRPRAGSRAGCWLGIGSRPATARRRPRRPDRPAARGTASPCFSVAAAPLRRSWRRWPPRGGAGGGRRRRNAGEKRAAEPSIEAPPRSSKYYALCVAGGGRTWLRPWKAPGVDVCCANPGGRILLRRAGAPRAAGSRLVGKSASYLALAADRESASHTPHL

SEQ ID NO: 117317 - protein, 1843 aa, Oryza sativa
  Clone ID: PAT_MRT4530_20733C.1.pep
RIAVCPSFAVAAAAPAVLRRRSRRRRRSGRPSSWSPSRRRPRPPLRRRRRSSELRCRRQPEGFRRFLLVAVVVRCFSAAVLVTGVFAASSSTCWCPPFASSRRRSPASVRRPSRPLRRAAAAVGDVIADVIGVVRPPGLEWYIPGLEIELCSRDGCSEWLGLYNRMPRYKPEYLFGVEGFVQELRTMSFAIGFGTAPFYAQIPHDRHEEKCRVKVTLNSNSEEVPSVMFEAGGRNYVHACQEVARIAIGELRDSYSDQLADTEYRYHPRQPQGSDRGSYLETEGIENDATTRHLVEMLWAMDESRAETVLAAQDREDRNRGKICKLEDKVDRLEKELAALKGEAPPQKARIRLTARKRALFVPRYQLAPKMVNTRSNGNGPNNPNNNNNGENPTLAQVLAQQTQLMNMMMQQLQNQQNQGNNHAPPQNKLAEFLRVRPPIFSSTTNPVEAGDWLHAIEKKLDLLQCTDQEKVSFASHQLHGSASEWWDHFRLNRTTAEPITWLEFTAAFRKTHIPSRVVSLKKKEFRSLTQGSRSVTEYLHEFNRLARYAPEDVRNDEERQEKFLGGLNDELSYPLMVGDYPDFQKLVDKAIRQEDKYNCMEQRKRRIAHFKAQQGSNQKPRFTLGPQSMPQGGSSSVVRPQRQFFNNNAGNNIRNQAPRPVAAPTQQQPAKREQGSKPVVCFNCGDPGHYADKCPKPRRVKVVPAQSNSAVPASKARVNHVAAAEAQDAPDVILGTFPVNSVPATVLFDSGATHSFLSMSFAGNHGMEVEDLRHPLMVSTPSNQALSLQRSPSVRIEIKGVPFVANLILLESKDLDVILGMDWLARHRGVIDCANRKVTLTSNDGRVVTVHALSSESLRSRLNQITLEEIPIVREYPDVFPDDLPGMPPKRDIEFRIDLVPGTTPIHKRPYRMAANELAEVKRQVDDLLQKGYIRPSSSPWGAPVIFVEKKDHTQRMCVDYRALNDVTIKNKYPLPRIDDLFDQLKGATVFSKIDLRSGYHQLRIKEEDIPKTAFTTRYGLFECTVMSFGLTNAPAFFMNLMNKVFMEYLDKFVVVFIDDILIYSRTKEEHEEHLRLALEKLREHQLYAKFSKCEFWLSEVKFLGHVISAGGVAVDPSNVESVTNWKQPKTVSEIRSFLGLAGYYRRFIENFSKIAKPMTRLLQKDVKYKWSEECEQSFQELKSRLISAPILILPDPKKGFQVYCDASKLGLGCVLMQDGKVVAYASRQLRPHEKNYPTHDLELAAVVHALKIWCHYLFGTRTEVYTDHKSLKYIFTQPDLNMRQRRWLELIKDYDMGIHYHPGKANVVADALSRKGYCNATEGRQLPLELCKEFERLNLGIVSRGFVAALEAKPTLIDQVREAQINDPDIQEIKKNMRRGKAIGFLEDEQGTVWLGERICVPDNKDLKDAILKEAHDTLYSIHPGSTKVYQDLKERFWWASMKREIAEYVAVCDVCQRVKAEHQKPAGLLQPLKIPEWKWEEIGMDFITGLPRTSSGHDSIWVIVDRLTKVAHFIPVKTTYSGSRLAELYMARIVCLHGVPKKIVSDRGSQFTSNFWKKLQEEMVSKLNFSTAYHPQTDGQTERVNQILEDMLRACALDFGGSWDKNLPYAEFSYNNSYQASLQMAPYEALYGRKCRTPLLWDQTGERQVFGTDILREAEEKVKIIQERLRVAQSRHKSYADNRRRDLSFEEGDYVYLRVTPFRGVHRFHTKGKLAPRFVGPYKIVSRRGEVAYQLELPQSLAGVHNVFHVSQLKKCLRVPTEEANLEQIEVQEDLTYVEKPIRILATSERRTRNRVIRFCKVQWSNHSEEESTWEREDELKSAHPHLFASSSESRGRDSV

SEQ ID NO: 117318 - protein, 112 aa, Oryza sativa
  Clone ID: PAT_MRT4530_20734C.1.pep
MALAGRLLVLFAIALLAISIAEHKALAKGSTSEHDDNVYQVSKGGQGSLKSYQCSPQCAYRCSQTQYKKPCLFFCNKCCNACLCVPSGLYGNKGECPCYNNWKTKRGGPKCP

SEQ ID NO: 117319 - protein, 85 aa, Oryza sativa
  Clone ID: PAT_MRT4530_20735C.1.pep
MALACRGQSPATSARRETLATGNSYLHTAPPMATHIANDGGTGEKGRGRREAEASAWMAGSDSMRAEEGSGALCGMGARRRVKSG

SEQ ID NO: 117320 - protein, 48 aa, Oryza sativa
  unsure (1)..(48): unsure at all Xaa locations
  Clone ID: PAT_MRT4530_20736C.1.pep
YYVFXSLIISSINQESDRFRELARXDQDLQSSKLIKVXHRXHGRXAST

SEQ ID NO: 117321 - protein, 124 aa, Oryza sativa
  Clone ID: PAT_MRT4530_20737C.1.pep
MSLLSPPPPLTMTRGASHSGGTAMGIGGSYGPVIVALAIIATLTVASIAVGQLCVGRGTPIKPGQGMGAFVKKSIGGNKAAYDDALPEKKKEEDVENATVEEVEKSEPPKVEEDDDGSSSQVSS

SEQ ID NO: 117322 - protein, 366 aa, Oryza sativa
  unsure (1)..(366): unsure at all Xaa locations
  Clone ID: PAT_MRT4530_20738C.1.pep
REECVGVGSGEQGGGGGGEGSKAAASASSPCSPGYDDTLLXSSSTTRLRHQASGCRCXRPPRAAVPLPVVHTSTGCCSADRRPPXHGYITGGLLAAASTWNCSCVVFSNHNFAAFVVFIVVSASTPSSSALVIVSHSGYLYMATDVAVQAVGSATSPSFSSIMIHRQCRRIFLDYTLLFSDNYVLLRQFSLYVVLACPGVWQTLCDVSSFTVRLHWLFGVIFLNXAVIVSPSSSPVHPHAPWSMTPLPCVHDHSTAPYARPAARLPRHQLPDFGYNDHGYSTHGFIDYGSLAPFALATLTTAHRAIIRIEYSCRFLLQSKCPRCSRLDCGGYLLSMYSYVYXPLRLNTVNPRFAIXLSLYYPTLYT

SEQ ID NO: 117323 - protein, 95 aa, Oryza sativa
  Clone ID: PAT_MRT4530_20739C.1.pep
SKVYHRSLNLYHCVIPVPKLANRPFRFSNLFDCVIAVPKLADHPFRSSNLFSYVTPVSKLGFEYYLGQIGRSKDFIFKNMFCPKNVILKLKFQNL

SEQ ID NO: 117324 - protein, 412 aa, Oryza sativa
  Clone ID: PAT_MRT4530_20740C.1.pep
MADSAPAPEARVSGGDVPARLQQALALLFPTNLAAKAVLFAVVVALLPLLPTSQAPRIWELPHILLLGLIISYGVFGQRNADSEVAAVAATKTVDDESVESYVTQMMHGPLVFEENDGGGEADAAGKKGVQAWSSQYFPDDPLVVVADAGAGSNTGKGDEREKPLLLPVRKLKPATEESATLTESFSDGAIEEEEEEEEEETEFLLRKARYGGVREHAIPSPSSVLDADLTLSPCSPPLLPPPPPPPPPPPFLDHDRPALRKAKARSFNDYGRVGLQTAAGCGGGGHNFRSKSAIQASRSTFPTSPFDDHDLEEKVAASDISSFSSDDVVTDDGEDGDNHKEIYNYEEEEGDVDRLDDDDGSCDEELFELATRLAPEEEEVVEDEVDRKADEFIAKFREQIRMQRVVEPGRR

SEQ ID NO: 117325 - protein, 57 aa, Oryza sativa
  Clone ID: PAT_MRT4530_20741C.1.pep
AISLLEREDRFPDGLNFNKGPVLKRGAAKDVNFVLLTLYSSYFLFFSSSLSYLFLYS

SEQ ID NO: 117326 - protein, 539 aa, Oryza sativa
  Clone ID: PAT_MRT4530_20742C.1.pep
HLLVDEFRIPERENRKALEFVSSWRFANGMFAIVLSFGLLLTALRSRKARSWRYGTGWLRGFIADYGVPLMVLVWTGVSYIPYGSVPKGIPRRLFSPNPWSPGAYDNWTVIRDMPNVPLLYIIGAFIPATMIAVLYYFDHSVASQLAQQKEFNLRKPPSFHYDLLLLGFLTLLCGLIGIPPANGVIPQSPMHTKSLATLKHQLLRNRLVATARQSMSQNASLSQLYGSMQEAYQQMQTPLIYQQPSVKGLNELKDSTVQMASSMGNIDAPVDETVFDIEKEIDDLLPIEVKEQRLSNLLQATMVGGCVAAMPLLKKIPTSVLWGYFAFMAIESLPGNQFWERILLLFTAPSRRYKVLEEYHTTFVETVPFKTIAMFTLFQTMYLLVCFGITWIPIAGVLFPLMIMLLVPVRQYILPKLFKGAHLTDLDAAEYEESPAIPFIAAQDIDVALARTQSAEILDDIVTRSRGEIKRLNSPKITSSGGTPVAELKGIRSPCISERAYSPCITELRHDRSPLGGRGSPRTGETRSSKLGEGSTPK

SEQ ID NO: 117327 - protein, 188 aa, Oryza sativa
  Clone ID: PAT_MRT4530_20743C.1.pep
MVLVLALGDLHVPHRAADLPAKFKSMLVPGKIQHIICTGNLCIKEVHDYLKSLCPDLHITRGEYDEDARYPETKTLTIGQFKLGLCHGHQVVPWGDLDSLAMLQRQLDVDILVTGHTHQFKAYKHEGGVVINPGSATGAYSSITYDVNPSFVLMDIDGLRVVVYVYELIDGEVKVDKIDFKKTATMHA

SEQ ID NO: 117328 - protein, 218 aa, Oryza sativa
  Clone ID: PAT_MRT4530_20744C.1.pep
AGGGGGGEGETREDVFLRKLNVCCVVFDFSSAAAAAAAERGRDSPERERKRQVLVSLVDCVGAAEEPLTEAMISGCVRMFAINLFRVFPPKVRSGAAGAAEADEDEPFFDPSWYHLQAVYELLLRFVMSPVVDVKIARKYMDNSFVSRLLDLFDSDDPRERECLKTVLHRIYGKFMGNRPFIRKAVSNIFYRFVFETDRHNGIAELLEVFGSVISGFA

SEQ ID NO: 117329 - protein, 111 aa, Oryza sativa
  unsure (1)..(111): unsure at all Xaa locations
  Clone ID: PAT_MRT4530_20745C.1.pep
AQWKKALRRRRNPRDVARVDVEEVVDHTGSTFSSSCVLLAVLPRXSAPQSSGVSTSIHTGSVKVRRTPTRIPIRSSCTLSCNPKTPFRSTCQRWPLAECIDPPGIHKDHIG

SEQ ID NO: 117330 - protein, 95 aa, Oryza sativa
  Clone ID: PAT_MRT4530_20746C.1.pep
ALEFGLHNVSVCFVAFSIKGKKKMMGHGLNCKCGQFLCSMHTHAAGMVKIKQLTWENVAPSGALHCGCIAQGQRKSLQVVKKKVRHLIVKIECMA

SEQ ID NO: 117331 - protein, 350 aa, Oryza sativa
  unsure (1)..(350): unsure at all Xaa locations
  Clone ID: PAT_MRT4530_20747C.1.pep
MDLSNSSPVITDPVAISQQLLGALPSNLMQFSVMPGGYSSSGMNVGVSRLKIEEVLVNGLLDAMKSSAEVRRLNVAFGEDYSSEEEDPAYSAGVANSPAALASFKQIVASAQGKKIAVFLDYDGTRLSXPMVDEPDKAVMSPVMRAAVRNVAKSLPTAXVSGRSRNKVFEGAKLLELYYAXNLFQPAHDFLPMIDEVTKSLLQVVSGIEGATVENNKFCVSVHHTRGRTQDWKLVARLVNEVLEAFPRLKVTNGRMVLEVRPVIDWDKGKAVEFLLQSLGLNDSENVIPIYIGDDRTDEDAFKVLRQRNCGYGILVSQVPKETEAFYSLRDPSEVMEFLNFLVRWKKHSV

SEQ ID NO: 117332 - protein, 190 aa, Oryza sativa
  Clone ID: PAT_MRT4530_20748C.1.pep
PRVRLNVAFGEDNSSEEEDPAYSAWMAKCPSALASFKQIVASAQGKKIAVFLDYDGTLSPIVDDPDKAVMSPVMRAAVRNVAKYFPTAIVSGRSRNKVFEFVKLKELYYAGSHGMDIMAPSANHEHSAEKSKQANLFQPAHDFLPMIDEVTKSLLQVVSGIEGATVENNKFCVSVHYRNSAENDWKLVVR

SEQ ID NO: 117333 - protein, 719 aa, Oryza sativa
  Clone ID: PAT_MRT4530_20749C.1.pep
MTIHTKTALLCLLGAVATTAWLSFAVAQPQPPPACRRRCGDVDIPYPFGLNGDAPGCALGHGTYGFNISCNDTGNGVYKPFIWDVELLGVLLPEGQARILMSISSYCYNPATGAMDGPENNTWALDFTSSPYRFSHTGNVFTAIGCRTLAYIGGDNVDADVGSLTTGCVATCRLQAGNLTVTDDDVGACSGIGCCRTSIPVGLQYYYVWFDDRFNTTAIHNVSRCSYAALMEKSSASWFRFTPAYVTSSAFNDTFNGQVPLLLDWAIGNETCEQARRASPESYACRSRNSECFDSPSGLGYICNCSKGFRGNPYLHPEDPSSCQGICSSTVVGLLIFLGIEWIKYKRRLVRQDLMNKRDAYFRQHGGQLLLDMMKLENQVSFKLYDREEIELATNNFRESAILGQGGQGTVYKGFDLDPENNPVAIKRCKGIDANRRMEFGQELLILSRVRHEYIVKLLGCCLQFEVPVLVYEFVPNKTLHYLIHGQSDASTRTLDIRLEIAAQSAEALAYLHSLDHPIFHGDVKSANILIGDKFTAKVSDFGCSIFRAAADENINVVKGTIGYLDPEYLMTFQLTDKSDVYSFGILLLELLTRRKPLSNEVSLASLFQDAMKKGNIDHHIDKEILHEDNMELLYEFACLASQCLVMDSENRPAMSHVADILRQLADTASQQHTGTLQGIRSLRLLGNSSGSISEPCYSPVKTMEYDSRKTSMGIEFAR

SEQ ID NO: 117334 - protein, 128 aa, Oryza sativa
  unsure (1)..(128): unsure at all Xaa locations
  Clone ID: PAT_MRT4530_2074C.1.pep
GSRQGALRPQHHCQRGPFGQFRSRSRASGHGQPSWRREDKVAPGYGGSGAGGASGKNRQGGNXVSMSTVETLVSLSTAXVSATVMSAIPMAIEGTXRWGPHGQVIYLFNXGSIIIIRSLSSLVLCGTI

SEQ ID NO: 117335 - protein, 81 aa, Oryza sativa
  Clone ID: PAT_MRT4530_20750C.1.pep
MKRSRGRASGPWEGRRRAKKKRKKGGEEGIGTTSVCAGDAATCKLLVLSATSSSPFHIALSHPSNAVADSDQRRAAVVETK

SEQ ID NO: 117336 - protein, 103 aa, Oryza sativa
  Clone ID: PAT_MRT4530_20751C.1.pep
RTTKLIPDGLIPDLNIRFQPIFKHLKNCTSSYRIKFYLNLILLGTKEKFPLQWRSTTLRQISLICEIAEIPQRCSAFPFLLPPVHPLGTLLSGRRKTERKRRL

SEQ ID NO: 117337 - protein, 253 aa, Oryza sativa
  Clone ID: PAT_MRT4530_20752C.1.pep
MERSTSHDVYMSVPRFFCILSHIRDFDIALCGVNVVVDSSQPHEDSLLLAGCLTFFCPCVAFGLIAETLDRGSISCAIAGITYCWMRPSTVLPGMHTMYSWSYRQKLRATFGMAPEPCADCCLQLFCDRCSLSQMYRELKNRGVNPANVYAGEAEYSPWFDSFQSHLSRRALMNFCILRTPSPPGVVGMHVFFQPCLMLETHKDVNEGQDILPDGIDEDHFIIGVVGRVEDCNNIFYFDDVLADLEEVFSVAV

SEQ ID NO: 117338 - protein, 146 aa, Oryza sativa
  Clone ID: PAT_MRT4530_20753C.1.pep
WIPGLQGLQLRIVAAADPAAKKDAGGRSGSDDLAGPHARPHAPPPAEIPASSRRGARYVAGARSRRLSVRVCSAGEKDRWETTQIARMLSGWGNEVSLGFFRLWISSPPRLTRSPRAACARSPCVIGDASPPSSSVHPGFSHSSGL

SEQ ID NO: 117339 - protein, 156 aa, Oryza sativa
  Clone ID: PAT_MRT4530_20754C.1.pep
RVRYAIRMKWVPLPCPVIIVIAAPKAPTIVSRRSHDDGHRLALPRASGSSDRSMLLEPSGSSSLLMCPIETDSHPSGYRTRCCHSRAWWRQIHALEAATLEVTTPMTGGCRSVPPIPPITWAMVVGAARNIEYSLNMLDECIRQIWLEEAIQFWSE

SEQ ID NO: 117340 - protein, 94 aa, Oryza sativa
  Clone ID: PAT_MRT4530_20755C.1.pep
HLSSISTGSGWRAQASSAQAGTGGGRRAAGGRSCAGGGRRSGARAGTGGGGSSGTGGAAPLPSLSSSSSSSLAPAPATADRENSSLPLARSRTK

SEQ ID NO: 117341 - protein, 84 aa, Oryza sativa
  unsure (1)..(84): unsure at all Xaa locations
  Clone ID: PAT_MRT4530_20756C.1.pep
MXKIXIGINGFGRIGXXVARVALXSEDVELVAVNDPFITTEYMTYMFKYDTVHXQWKHHEVKVKXSKXLIFGTXEVSVFGSQEP

SEQ ID NO: 117342 - protein, 888 aa, Oryza sativa
  unsure (1)..(888): unsure at all Xaa locations
  Clone ID: PAT_MRT4530_20757C.1.pep
MSSSASPSVAPSVEYAEHLSNLVRIPSLSHENYYFLGPIGDLNPTEFIIAETNRIPFRLVNPNLGHWKNTFKSCPSLEKTSPEKSXATWYKRVSASKQFHWDEIGIGQALTLTIANSAKDEPLMAVGTYFWSNTINAFLFNQGPMTPTLIDITMIIGLDVTSSANPMSLNTKNQFDFRTKSIGGWSGYVAAYMGKGPVTPRXHMAFLLMWLEKFLFCGSSCGSTTNWXFVAEALESKRQFPLGKILPGYLYQTLNNASTKIVVGSVVSAGGPWWLLQTWLNLVVMKAVNRPSVTEAEFPRLELITYNDGEECTHRRCMSYGEYDSTPADAGAKLSAELLKDXFCRFYEGFQRDARVWFPYGDSVHLDLPSDIRFEDINHERYQKSREVFSAAISPCILPVGIHQGRNIQVSYEFYHPMSSARQFGMGQLPIGLFFAEKIQCRGEISSTLMMDLLLNIPGPPLGSNENIELARFRSRNFDRWWGEXKQYIFHQSATMYMTDLFPDVVPQTTESSPPHKSNSGRDIEYAPGLXYHAPKTSSLLQGQMRELADVGXKRKVKASAIDPPALAPKKKAKMQKPKPANDLPTLDPSIEQALDEEEIEEDGDRAAAEVSDTEKTPSGLPKRTPPTSFGPAYFLRKKKTAVRKKSAATTLKPAPSPPPPPLPPVQQTSSDRTPSAAGSHDVEEDKQPAAPAIPAIADLFSFDIKDYFDEXEETTSKALAPCNIQIQALIPDDLANTITPAVFLEQYQFKLQKAKQRIADQRERKDIEATIQANRQLVHEEKAKLDQLSVGLIQLNIDRLEARKIDLIAQLEECNAELDLEKQKLANLPNAVEEQKSRLRSAIKNVADKTKSLKVISGTDAEDIQVIEEVDQIRQRAVSAIQHYLSR

SEQ ID NO: 117343 - protein, 43 aa, Oryza sativa
  Clone ID: PAT_MRT4530_20758C.1.pep
SPILVVGLIVLVRTGFLIRGDVVILALLRIVPPFWFTCASLTK

SEQ ID NO: 117344 - protein, 101 aa, Oryza sativa
  unsure (1)..(101): unsure at all Xaa locations
  Clone ID: PAT_MRT4530_20759C.1.pep
MRSFLLCSPCYCCMXRLCAVLMLLLKFYRQYQLQPHLMLQQQMLSPCGEFVRQQFXTVAXPFXQXPVFQLRNCQVXQQFQRYVATVARISSVSDCSSYSQF

SEQ ID NO: 117345 - protein, 120 aa, Oryza sativa
  Clone ID: PAT_MRT4530_2075C.1.pep
MAIPGGQTGLLTPAGDAKLRRGRGTRRQRQPWPRRAATPRRRDGWRWVRAAARDAETEKRTGGVLRLPVIVGVLAPAPALLRRRPPLRAAAEQTIFCNTVAALLTMQEVRSGSSTSPSRR

SEQ ID NO: 117346 - protein, 48 aa, Oryza sativa
  Clone ID: PAT_MRT4530_20760C.1.pep
MASGAKSGGCSPADPKRRIDRATSAGAWRCPGNCSKKMRVSTFESRSG

SEQ ID NO: 117347 - protein, 94 aa, Oryza sativa
  Clone ID: PAT_MRT4530_20761C.1.pep
QCNQSKFHYLKTLNAICDKFHYFKMVLHMSFSGFLKFQTISSPIESGFLVQGFKALALKRLPGTLYNFKSVNLSHFVIHNMSMPYAGLMCWYPV

SEQ ID NO: 117348 - protein, 111 aa, Oryza sativa
  unsure (1)..(111): unsure at all Xaa locations
  Clone ID: PAT_MRT4530_20762C.1.pep
MEATGAAVSAFSTASSSSPAAPRHGRLLASPAAWRSARTLPPRAVASSRATVLVSNPPPPPLPPTPAPAAVAPSKVDRSGRXAACLEGADVVRLFDRRISARRGEPPPDAS

SEQ ID NO: 117349 - protein, 140 aa, Oryza sativa
  Clone ID: PAT_MRT4530_20763C.1.pep
ENRPISIQLRGLTCMKGSPARARVVYAPVLEVGEEGRLQRACKVITDAFVKSGLVLERDARQELKLHVTIMNVRHRKSKRWNQRNDSFDARNIFRKYGEHDWGEYLIPEIHLSQRFKFDERGYYYCCSSIPLPAAEMQTE

SEQ ID NO: 117350 - protein, 287 aa, Oryza sativa
  Clone ID: PAT_MRT4530_20764C.1.pep
MEATGAAVSAFSTASSSSPAAPRHGRLLASPAAWRSARTLPPRAVASSRATVLVSNPPPPPLPPTPAPAAVAPSKVDRSGRFCSPRAARELALMISYAACLEGADVVRLFDRRISARREPGYVFDKACVVNYNHMSFGGGPLEVGTEEEAEKLMSQNEKDSANEAEVLSAPPKLVYNNFVLRLAREILVAVASGWDKHVDIINKITPQNWKDEPVARILELCILHIAMAEMTSKGTPHKIVINEAVDLAKRFCDGGAPRVINGCLRTFVKDHMNIDTSQPAPAESKA

SEQ ID NO: 117351 - protein, 675 aa, Oryza sativa
  unsure (1)..(675): unsure at all Xaa locations
  Clone ID: PAT_MRT4530_20765C.1.pep
MALAIRAAAAAAGDMAPSSASDPTLGFLTKRDTEVKLPRATRVKNKTPASVQITAEQILREARXRQEPEVRPPKQKIADSVELSEYRLRRRKEFEDAIRRARWNVGAWVKYARWEERQGDFARARSVYERALDVAHRDHTLWRGVXYAEFEMRNRHMNRXDQLWYKYIHMEQVLGAVANARKVFELWMAWRPDAAGWNSYIKFELRYGEIERVRAIFERFVAEHPQPHTFILYAKFEMKRGEVERARRVYERAADLLADDEHAEVLFVAFAEFEERCREVERARAVYKYALDRVPKGQAEELYRKFLAFEKQFGDREGIEDAIVGKRRFQYEDEVRKNPLNYDSWFDYIRLEESVGNKDRIREVYERAIANIPPAEEKRYWQRYIYLWINYALYEELDAKDMERTREVYSECLKLIPHKKLTFSKMWLMAAQFEIRQKNLKAARRILGNAIGMAPKGKIFKKYIEIELYLGNFERCRTLYEKYIEWSPANCYAWMKYAELEKSLGETDRARSIYELAIAQSALDTPEVLWKEYLQFEIDKNEFHRTCELYERLLDRTKDLKIEQVRRCRAVFERAFEYFRTSAPELKEERAMLLEEWLNKEVSFGHLGDVTLVQKKAPRKVKRKRPDPSEDGSTTAYEEYMDYIFPDEVALAPNLKILEAAYKWKKQKTDDTDDD

SEQ ID NO: 117352 - protein, 509 aa, Oryza sativa
  Clone ID: PAT_MRT4530_20766C.1.pep
MTLLCVPLVSRTVEAMQADAAAAAAAGADLVEIRLDFIEGFRPREHLPSLLRGCPLPALVTYRPNWEGGQYDGDDATRFEALRLAMELGVDYVDIELKVADKFISFISGSKPEKCKLIVSSHNYESTPSCEELADLVARIQAVGSDIVKIATTASDIADVSRMFQVMVHCQVPMIGLVMGEKGLMSRVLSPKFGGYLTFGSLDATKVSAPGQPTVEELIDIYDIRRIGPDTKVLGVIANPVKQSKSPVLHNTCLQSIGYNAVYLPLLADNIARFLSTYSSPDFSGFSCSLPFKVDAVQCCHEHDPVAKSIGAISTIIRRPDGKLVGYNTDYIGAICAIEDGIGGPGSKDAAITPLAGRLVVVVGAGGAGKAIAYGAKEKGARVVVANRTYEKAVSLAAAVGGHALRLAELETFRPEEGMILANATSLGMYPNVDGTPIPKKALSFYDVVFDAVYAPKVTRLLREAEECGIKVVSGVEMFVRQAMGQFEHFTGGIEAPESLMREIAAKYT

SEQ ID NO: 117353 - protein, 999 aa, Oryza sativa
  Clone ID: PAT_MRT4530_20767C.1.pep
MASTSQPSSSENPTSATAKEVEMTGDQARACIADDVHRTSSLPAGGKMDNPPPLPNNENPELNNEIAEEGQPPQPAPAPGWSRMRDGMVSFFRKGKVWPIYNERGRHVAVPIPEPRCLLYKVPKKIWKIDEDMHKPTYISIGPYRYGENGLDNRSQVWKEWCENEVVKKLTQQGRGTALQQINDVVTDQVKNYYDKRSFSLGVDDEAFKKMMITDGCFLLLTTLHDTSSQSEPEPQRPAASNTWRSFCCLFESNPAEVEQTAAVPPTVIDPNSIPNLWDNCFLWNDILLYGNQLPFLVVREIYSLLHPGEDPNQKVGKVFADSMLARYTRRKLTHPGNADSVLHLCHKLLAPTPDPSRNGGGDGVVKTGQWRRATEYRNLRVKFKKREISSDGKAQCILDVKVVCCNVVKIPSFDLNPESWRLLRNLMLLENMNKHLGGHVTSYCNFISQLACTGADVSLLREKGIIVHGEASDERAAQKLCNLCVETIYDPTHDYLKSAWDKLEKHCRHPGWLVWAKMFGYKDWKNPLVWMATLAALALLLTSGIRPQTTLQARCRTRLPARIEDVVCSSVCREPVIQRVIERSSESIAYCSLTRTNYTERSMAMQAVDPGTDDLCSNCTVLTTILCVVPQDVLTSLAQKETTHEVWEAIRAVCVGVEQVEANVQKLRQDFAAIAFKPESTSRTSRSASPDKEVIKKMLEVVPEYHKQVAISIETILDLGTVSIEELTRKLRGVEEWKKPASSEATDSSGRLLLSAEDWLIHQKAREQEKKKAAARATMMPVIAIAVAEKGKVLTSIHEQVHLIEEKVLAQIGDVAQKEDNHWVVDTNDTNHMSETRAAFTTLDAGVGSSIKFGDGSMVQIERRGATEAARDGLVRGLLDLEQPCGLLEGCLVGKQRSIPFLELSGAGQANTGAPPRATILLMDTMDWDCPDTGRSLLSITSSTFGYITYVKKKVPHVKKLDDRSMKLIFIGHEPGSKGYSAYNLGHGTHPHHVGCGV

SEQ ID NO: 117354 - protein, 63 aa, Oryza sativa
  Clone ID: PAT_MRT4530_20768C.1.pep
REHKFFYYQITPLDRPLLSSLQKVITHFPLAITKHRLPLWGFPLCKTPEGSPPALDFPFSGSR

SEQ ID NO: 117355 - protein, 85 aa, Oryza sativa
  Clone ID: PAT_MRT4530_20769C.1.pep
MPGHHRAPPPGRRPRAPCHHPAEGEAPMLVPPPDVQLIWLYHCFHHCLCPMSFTNCVCARGSCSAWAAAPGTGEALGLGSGARPG

SEQ ID NO: 117356 - protein, 558 aa, Oryza sativa
  Clone ID: PAT_MRT4530_2076C.1.pep
MATAAESQGLSPGFKFNPSVEQLLCFFLLPYLQHRRLLVDGVVFLDDPASAPPWALLHRHGRGGEDEAYFIGPVPAGDGHGGRRQQQVSRTVTGGGGGKWIKQRTERPRGEEEPVVVFGGETFRWEEFSLNFHADERCRSGSTGWVMHEFAVVPPAGSRVAATHTACRIAFTGHGQKRKRVPDGYVFVDVHVQTAAAAAAVAPPLPMLSSYGEPPHEHFSDDHPPPHSYTYYTQGYQQFLPPAEQSDQEQEYCAPDQQNFQDYHLAAAEQTDQDYFYTEMINQEQDYAYQQQQQHLFHGDFLATSQQFLGQDHEVMFTGLGGGLVVSDNGEHASAAAPATEPPVHDVFLETLVPEPPENAYVDGAGESAMASASSAGGAPLLEQPFATPPQQFLDQEPAPAGLNDGGAMIYNNNGDGEHDAAPAAQPPARYYSGPVPAVDSVFLDKMREYLMADAKGLCRIDAPINNGEHAAAPAPAADDPLAAQHGHGDAPPLPVPPDAAELERVVGHLLREVEDIIKVAAAGGYGGSSDKPLSEFDKAQNQILAKLMAVFNQVAES

SEQ ID NO: 117357 - protein, 58 aa, Oryza sativa
  Clone ID: PAT_MRT4530_20770C.1.pep
PRVRSRGAQSCEETQAQDASSLANYMEHYHPNNARHMSKPRMLSTPLTILCMHPMRDN

SEQ ID NO: 117358 - protein, 66 aa, Oryza sativa
  Clone ID: PAT_MRT4530_20771C.1.pep
MAAKTKTSRGTWESLRKAWDSKAKSKDFDLLFLGASISNTKTKDCSNSYLSSWASPESESHRRIIP

SEQ ID NO: 117359 - protein, 459 aa, Oryza sativa
  Clone ID: PAT_MRT4530_20772C.1.pep
MDRFKMIKEVGDGTFGSVWRAINKQNGEVVAVKKMKRKYYSFEECMSLREVKSLRRMNHPNIVKLKEVIRENDILYFIMEYMECNLYQLMKDRVKPFSEAEVRNWCFQIFQALAYMHQRGYFHRDLKPENLLVSKDVIKLADFGLAREVTSVPPYTEYVSTRWYRAPEVLLQSSIYDSAVDMWAMGAIMAELLTLHPLFPGTSEADEILKICNVIGSPDEQSWPQGLSLAETMKFQFPQVSGNQLAEVMTSVSSEAVDLISSLCSWDPCKRPKAAEVLQHTFFQGCTFVPPTVRSKAGVLPKTPPCVGVKGVSEHGMPRRYSTGTLSTTKPHSNASLKSSGLSKTGVQRKLQMDRQAPQKIKKPTESNNKLTTNRVPARNSPGHPVLRHSRSLPETGRATMHKVSTLTERLTHMSVTSRTRTTPKPAAPLLKAGLGKSDLLGKTDEIPPAKRLTRKLVS

SEQ ID NO: 117360 - protein, 158 aa, Oryza sativa
  unsure (1)..(158): unsure at all Xaa locations
  Clone ID: PAT_MRT4530_20773C.1.pep
MGLERKAKVAEVALRCAVCALAALAAALVGTGSQTRTFFSLEKKARFTDMKALVLLVAAHGAAAAVAYALMAPTAAALQSSVVGKRGQPELQWMPVCGLYGAFCRRVGEGLAAAVAAGLAAVLLAAVSAFXLFRLYGGGGGGRKSSAGAVSGNGANTW

SEQ ID NO: 117361 - protein, 63 aa, Oryza sativa
  Clone ID: PAT_MRT4530_20774C.1.pep
DLRVRGLSGYEVAADSIGRQIQPLQARAHPAFDYSGPEDATRSPESYTLPSPQPCCRRNILGG

SEQ ID NO: 117362 - protein, 140 aa, Oryza sativa
  Clone ID: PAT_MRT4530_20775C.1.pep
MAAAMGLERKAKVAEVALRCAVCALAALAAALVGTGSQTRTFFSLEKKARFTDMKALVRLVAAHGAAAVYSLLQLARCAAAAAWKGGSNGGAAVVAWSVFSCDQAVAYALMAATAAALQSSVVGKRGQPELQWMPVCGLY

SEQ ID NO: 117363 - protein, 91 aa, Oryza sativa
  unsure (1)..(91): unsure at all Xaa locations
  Clone ID: PAT_MRT4530_20776C.1.pep
AWARVLMVPLRRPHIHKLDVSSNAAADNXGGTLTLSVVAIRAAVAVAARPIRNHVVAPAGAAALRRAIGHASSSPERMAAAVAVADIAGAH

SEQ ID NO: 117364 - protein, 1123 aa, Oryza sativa
  Clone ID: PAT_MRT4530_20777C.1.pep
MAHDPNLGFADYFSAADASASSVTTLMPAMDEAAPELFGLQAGMELLGVRGLGMSMMPGAAGKVAALVADAGDDGGGGSTMRFLSEQHQQPSQAPLSLSLCRPDGVLHLGGAARPQHQLAPAAPWMTHHDASSSAPQVHGAWHLRSSRFLLPTQQLLQEFCSLPVDSTKRGNGAKAATQQEDGRGDGSSSSSASWTPSPQIQAMEALELQRLKDKLYIMLEEVDRRYRRYCEQMRAVAGGFEAVAGERAAGAYTAVAARTISRHFRSLRDGIVAQLQAARKALGEKDVSAAGTTRGQTPRLRVIDQCIRHHKSLQGVAAMDSHPWRPQRGLPDRAVTILRAWLFEHFLHPYPSDVDKHILARQTGLSRSQVSNWFINARVRLWKPMVEEMYVEEMKGQDGGDGSGGQGSLNPKPTCSHASEARGGQQLVVGDGDGGEQKPTRAQLRHDAGSLASVVNVDVAAGAGGVARLHQAENFGIMDHLDFDAYDDSHHQQQHGGFGGVSLTLGLQQHGSHGGGGVNIAFGAPGSAHGGAGFLYPGEQMAPDAMHPGHGHHVVGGQFGVAMDGDAASHAQERNIILAKMFTKIYPAAQVESGKALFGMKGGGGDRHHHKDAIVMHAAGKAPKCKASFFLCSLLLYFLLPVLALYVVALAVSPFYSGSSCPEESLASGDVAHLAAAGDAGNRRNDSSPPSDDAAPTGLGHIVFGIAASSELWKSRREYIRTWWRPEQMSGFVWLDKPVYEFYSRNASTGLPGIKISGNTTKFPYTHGRGSRSALRITRIVSESFRLGLPGARWFVMGDDDTVFFPDNLVDVLSRYDHTQPYYIGNPSESHIQNLIFSYGMAFGGGGFAISRALAAQLAHMQDGCIDRYPALYGSDDRIHACVAELGVPLTRHLGFHQCDLWGDVLGLLGAHPVVPLVTLHHLDFLQPVFPTTRSRTAALRRLFEGPARLDSAGVAQQSVCYDGDKQWTVSVSWGFAVVVTRGVLSPREMEMPMRTFLNWYRRADYTAYAFNTRPVARQPCQTPQVYYMRQSRLDRRRNTTVTEYERRRVAPVKCGWRIPDPAALLDRVIVLKKPDPNLWKRSPRRNCCRVLSSPRQGKDRKMTIDVGVCRGGEFARIEVAR

SEQ ID NO: 117365 - protein, 46 aa, Oryza sativa
  Clone ID: PAT_MRT4530_20778C.1.pep
VKTWVVLLLHNALFIDLCHGISEGLTPNQNVHFSKASSHLFMGKKL

SEQ ID NO: 117366 - protein, 92 aa, Oryza sativa
  Clone ID: PAT_MRT4530_20779C.1.pep
WIEVTNMSLTLTKQSYGLFTYRHVYRSEQITMSQKRIYGPYRQSPLVHITYRLHSDTPLMRSHYQTLCSFGENYLLEGASFFREKARGPAFA

SEQ ID NO: 117367 - protein, 317 aa, Oryza sativa
  Clone ID: PAT_MRT4530_2077C.1.pep
MSPPPSSLLPSPLPSPPILLSTNPSSLRLPPLAAGRRGAERAVAAAAASAPAPATPVQAQQRASRPSAAEVARTVVELAPSGTLSVVGPDGWPLGVGARFVADGSGAPALCLAASGPAAAAPDAPSSFHVEFRQSGARTPQCTLLGALTKPNDEYELKKLSTRWQKKFGEEIDQDLLYLISVDRILHIEDFNEDGMWVIPSEYSDAEPDPLRNFAESIVEEMNSKHAEDVHRIYSIYVESDFQATEVKMIWVDRLGFDLHVHSGEGTFAARIPFTREVSDEKGVKSSFNMMSHHAWEVEKSYAAPEFEKVELLKKVR

SEQ ID NO: 117368 - protein, 49 aa, Oryza sativa
  Clone ID: PAT_MRT4530_20780C.1.pep
PEKERFECREACPVFKFHVLHCSCGHSFLILLVFRTIMFEVRHFLRFQY

SEQ ID NO: 117369 - protein, 166 aa, Oryza sativa
  Clone ID: PAT_MRT4530_20781C.1.pep
MAAGKGSHTHRAFLLCNYALLGAASSCIFLTLSLRLLPSPCGLLLLFLHALTAVFSAAGCSGSFTAPATPAQWHNAHTAGAALTAIFQGAVALLAFTRTSDFLAELQSYVRDDDAAVILKMVGGLGTAIFVLEWAALALAFSLRLDDDDGAGDYDNKNWAAASYHV

SEQ ID NO: 117370 - protein, 92 aa, Oryza sativa
  Clone ID: PAT_MRT4530_20782C.1.pep
MAKLALCFCVVLVLVLVLASSPAPLSDDRRAAGLLGRRGLQQDAIVVDGSPTAAATATTTTTTAWPRPDTPPDNWYDGTKRLSPGGPNPQHH

SEQ ID NO: 117371 - protein, 55 aa, Oryza sativa
  Clone ID: PAT_MRT4530_20783C.1.pep
SRPPGRAPLPPPPPGPSLLDPPCSPPVVAFRPSPPVPPPSPPAAAPPSRPPHATP

SEQ ID NO: 117372 - protein, 124 aa, Oryza sativa
  Clone ID: PAT_MRT4530_20784C.1.pep
MEWDVTNPLLEVFSLERRRIWRRGGLGGDRKSGGGGGESGGGLGATATDPVVGRAAVANPVAGKAAAAMAGEGDCSSRHVHIVVVSDIDAGPPSACATGRRSSFRSRHWSPLIFLSLRSFSPWE

SEQ ID NO: 117373 - protein, 246 aa, Oryza sativa
  unsure (1)..(246): unsure at all Xaa locations
  Clone ID: PAT_MRT4530_20785C.1.pep
MENGSLDRWLHRRDDGGAPTAPLQWPTRLCIAIDAARGLSYMHHECAQPIMHRDVKSSNIXLDPAFRAKIADFGLARILAKSGEPNSISAIGGTFGYMAPEYGCRAKVNEKVDVYAFGVVLLELTTGLGGEHRRPGLLPDVVDEAIQDRPAFLEDAVPVFLLGMICTGDDPASRPTMKEVLEQLVQYDRTSSVAAACRDDSGGAPSLSKGKKDGKGKSSSAGTTAGKMWGAGTGDEESGSFVAHPV

SEQ ID NO: 117374 - protein, 150 aa, Oryza sativa
  Clone ID: PAT_MRT4530_20786C.1.pep
FLSDSDSNNDQENAMCIEKALIDLPPLQLPEPEHRPFISRHYSKSLFSIPTTGKRVHAHVTKSVSITSDSTRPWVIIRRYGRRGGKKIRLPSTLHDLIQISGDKLGIAPICIREVSTEAEIEDITAIDPDSVLWVMTAEDERNFCNPEEC

SEQ ID NO: 117375 - protein, 592 aa, Oryza sativa
  Clone ID: PAT_MRT4530_20787C.1.pep
MAATAAAAAGVAVAGDRARRRQWRYTWESLAHLPLLRLYLFRPELSAAAAADHLRADLRLDDSLLLLSFSLAGEPVALRVPVPRVLVDPSAPPECRDAGDHVEVRLALVLPVDHPVVAAAFLPPPGEEPPAPLSLRDDIKNLSSGDVHLYCKACSARLTKQPLRNIEEMPSLNWEDVADNWFGGCCTSFGGASEKLVSQYINAYGRLEGTSLLNATSISIEKDYLEKDLASGLVSSVPSNDCDALQEDICDVHIGEDHTTGNMEFNSSEEKAYHEKQIGCNHVQCSVVPEEGPCVSNSEKDGDTLWTDQSGIIKVNPEESKNDSCVDDIEKPTKETDLLSVDPCNCCCDGGNSRKSEDNPSNVPSGNLEMQAKLDTQRDYKLTKSISLGCSFIVKASNLVNDVEWLELLCAHCSSPIGSYPSQHSHAPADGRVRLFKCYASSDLHVGGPHDVFRGHTLERLFVNLLLEVAEDEISFRTLVRDLKTKRPILQIVLLSSKAWLFSGYCYENDMDGSHGAAHLQPSVKILYSNCSNALEEDLRTVEEWSSKYRAEELYMMRRQIDELILSLNSARDNFPLSCSSLQGMYLSSLER

SEQ ID NO: 117376 - protein, 70 aa, Oryza sativa
  Clone ID: PAT_MRT4530_20788C.1.pep
PPFSLRCTVEVENVTSNYIIYSDSCSCHVSLNWMRHETAAFLVAGAGAPHFPGRRSRRRALPLPVFLPLR

SEQ ID NO: 117377 - protein, 773 aa, Oryza sativa
  Clone ID: PAT_MRT4530_20789C.1.pep
LSELTLLDMSGNKLTGAIPAWVFRHQKLERLYLYENSLSGELPRNVTTANLVEIDLSSNQLGGEISEDFGNLKNLSLLFLYFNKVTGAIPASIGRLPNLTDLRLFGNELSGELPPELGKNSPLANFEVSNNNLSGALPETLCANGKLFDIVVFNNSFSGELPANLGDCVLLNNLMLYNNRFTGDFPEKIWSFQKLTTVMIQNNGFTGALPAEISTNISRIEMGNNMFSGSIPTSATKLTVFRAENNLLAGELPADMSNLTDLTDFSVPGNRISGSIPASIRLLVKLNSLNLSSNRISGVIPPASFGTLPALTILDLSGNELTGDIPADLGYLNFNSLNVSSNRLTGEVPLTLQGAAYDRSFLGNSLCARPGSGTNLPTCPGGGGGGGGHDELSKGLIVLFSMLAGIVLVGSAGIAWLLLRRRKDSQDVTDWKMTQFTPLDFAESDVLGNIREENVIGSGGSGKDGGREEIWNARKLDAKLDKEFKAEVTVLGNIRHNNIVKLLCCISSQDAKLLVYEYMENGSLDRWLHHRDRDGAPAPLDWPTRLAIAVDAARGLSYMHHDCAQAIVHRDVKSSNILLDPEFQAKIADFGLARMLVKSGEPESVSAIGGTFGYMAPEYGYSKRVNEKVDVYSFGVVLLELTTGKVANDAAADFCLAEWAWRRYQKGPPFDDVIDADIREQASLPDIMSVFTLGVICTGENPPARPSMKEVLHHLIRCDRMSAQGPEACQLDYVDGAAPLLEAKKGSRRRSSESGRWDDDDDDDSGNFVVHVV

SEQ ID NO: 117378 - protein, 52 aa, Oryza sativa
  Clone ID: PAT_MRT4530_2078C.1.pep
STIRLLIAVSVWSMVVVDYVTTEGFGISHKLVLADAYIFETRYKEYLEDLGR

SEQ ID NO: 117379 - protein, 501 aa, Oryza sativa
  unsure (1)..(501): unsure at all Xaa locations
  Clone ID: PAT_MRT4530_20790C.1.pep
MAGYAAEAGAAAGAGRGRAARHPPLTSLVVSTIAAFSAVVVFAILRSAYDAAVSRTTTLLGHNLEPTPWHLFKHDKGRPPARAAFRCAPSLTCRPPVAQPAPGTTNASANASAAPRLCPAYFGAIRRDLAPWRRGGGGVTRALLDAAQRRASMRVAITGGGRRLHVELYYACVQSRALFTAWSLLQLMRRYPGRVPDVELMFDCMDRPAINRTDYGGGGHGDHGXPPPPLFRYCTTRNHFDIPFPDWSFWGWPETNIEPWSKEFRDIKEGAKAIKWQDRVATAYWKGNPDVASPLRVALLNCNDTNMWHAEIMRQNWDEEVKSGYHNSKLSSQCTHRYKIYAEGFAWSVSLKYILSCGSMALVIDPQYEDFFSRGLRPEVNFWPVHIDVAAGGMCESIRDAVEWGEAHPAEAEAVGRRGQRLMEELDMDAVYDYMLHLLTEYARLMRFRPAEAPPPRPPAQEVCEASVLCLAGEKQRRFLEASAASPAVSEPCVMPPDAGE

SEQ ID NO: 117380 - protein, 800 aa, Oryza sativa
  Clone ID: PAT_MRT4530_20791C.1.pep
MAVYNILILFLLLLLFSLSTAQPSADEQKLLLAIKQDWDNPAPLSSWSSTGNWTGVISSSTGQVTGLSLPSLHIARPIPASVCSLKNLTYIDLSCNNLTGDFPTVLYGCSALEFLDLSNNQLSGRLPDRIDRLSLGMQHLNLSSNAFTGDVPSAIARFSKLKSLVLDTNRFNGNYPGAAIGGLVELETLTLASNPFEPGPVPKEFGKLTKLKMLWLSWMNLTGTIPDDLSSLMELTLLDLSQNKMQGQIPEWVLKHQKLENLYLYASNLSGEIGPNITALNLQELDLSMNKFSGSIPEDIANLKKLRLLYLYYNNLTGPIPAGVGMMPDLTDIRLFNNKLSGPLPAELGKHSELGNFEVSNNNLSGELPDTLCFNKKLFDIVVFNNSFSGVFPTNLGDCKTINNIMAYNNHFVGDFPKKIWSFELLTNVMIYNNNFTGTLPSEISFNISRIEMENNRFSGALPSTAVGLKSFTAENNQFSGELPADMSRLANLTELNLAGNQLSGSIPPSIKSLTSLTSLNLSRNQISGEIPAAVGWMGLYILDLSDNGLTGDIPQDFSNLHLNFLNLSSNQLSGEVPETLQNGAYDRSFLGNHGLCATVNTNMNLPACPHQSHNKSSTNLIIVFSVLTGVVFIGAVAIWLLIIRHQKRQQDLAGWKMTPFRTLHFSECDVLGNLHEENVIGSGGSGKVYRINIGGKGSDGMVVAVKRLWRTAAKSDAKSDKEFDAEVRILGEVSHINIIDLLCCISGDDTKLLVYEYMENGSLDRWLHRRDDGGAPTAPLQWPTRLCIAIDAARGLSYM

SEQ ID NO: 117381 - protein, 731 aa, Oryza sativa
  Clone ID: PAT_MRT4530_20792C.1.pep
MNSQKKRSPKIEPFRHRVDADPKSFDKSWKKLEDAIREIYNHNASGLSFEELYRTAYNLVLHKHGLKLYDKLTENLKGHLKEMCRSIGDAQGSLFLEELQRRWADHNKALQMIRDILMYMDRTFITTNKKTPVFDLGLELWRDIVVRAPKIHGRLLDTLLELIHRERMGEMINRGLMRSTTKMLMDLGSSVYHDDFEKPFLEVSASFYSGESQQFIECCDCGEYLKKAERRLAEELERVSQYMDAKTADKITSVVDTEMLANHMQRLILMENSGLVNMLVDDKHEDLSRMYNLFKRVPDGHSTIRSVMASHVKESGKALVSDPEKIKDPVEFVQRLLNEKDKYDEIISISFSNDKAFQNALNSSFENFINLNNRSPEFISLFVDDKLRKGVKGANEEDVETVLDKVMMLFRYLQEKDVFEKYYKQHLAKRLLSGKTTSDEAERSMLVKLKTECGYQFTSKLEGMFNDLKTSHDTMQSFYANLSGDTDSPTISVQILTTGSWPTQPCTPCKLPPEIVDISEKFRAFYLGTHNGRRLTWQTNMGNADIKATFGGRRHELNVSTYQMCVLMLFNSADGLTYGDIEQATGIPHADLKRCLQSLACVKGKNVLRKEPMSKDISEDDTFYYNDKFTSKLVKVKIGTVVAQKETEPEKLETRQRVEEDRKPQIEAAIVRIMKSRRVLDHNSIITEVTKQLQSRFLPNPVVIKKRIESLIEREFLERDKVDRKMYRYLA

SEQ ID NO: 117382 - protein, 82 aa, Oryza sativa
  Clone ID: PAT_MRT4530_20793C.1.pep
MTWHHKKNKKSCGSHIVIVLVMLLLSWGELLIHVGSTSPSRSASSPPPKHHLASDPDDERGVQAILVVLFPAAQRGYLDRGK

SEQ ID NO: 117383 - protein, 92 aa, Oryza sativa
  Clone ID: PAT_MRT4530_20794C.1.pep
VVVFLDDLHVGMLIQISKYPPALNYCMYVYVISPVHAFRRLKGRVRCRNKHGTSVPFSASSSSEIRGHKRHDRCRIALICVIRIWSIGGGAR

SEQ ID NO: 117384 - protein, 168 aa, Oryza sativa
  Clone ID: PAT_MRT4530_20795C.1.pep
LCPPHGGGNLPPPSRHRRRPGRHSSGRRERAGPAAPFPTASSSSSSLEATVEALRGRAREPLPSPLTAPPAAHHGAGRGGSTRHQAARFRWRIPLRCRPRCLHHHRRRPPPPAPPSSSRSPSPSATSAILRPPPPCGLRRLLPSPACRARSSLCRRHPAAASPCAMAP

SEQ ID NO: 117385 - protein, 508 aa, Oryza sativa
  Clone ID: PAT_MRT4530_20796C.1.pep
MSSPPPATLSTAAADVSHPAPDAPAGSTVLAAPPCVSLDPAAPAHQQPADTVSAPPPPSSTWVILGSIPRVSAAADGELPVGADLSVALAAPPRVAILTISPDVFPEPPTPRFFPFVLAADTSGLLLLQANLGIPMSREVVDRPHRQGLRWRDAASRYFVLNATTASAFHLPDPEEPILHQALLGLIASPRGDGHYMVAELQPLIGCDKATLLCFSSEVGEWVEKSVRYPLPPRPLAPICVFSHHGRLWWVDLTWGVITSDPFADEPVLGFIPFPAGKVLQCREAWGVADKYRYVGVSAGKLRFVDTYTAPRRGVPPKVSVWTLADPDSTEWTLEHEARFDDIWADESYKATGLSKKIPVLALIHPENPNVVYFFLEEHLFGVDVRDRKVVECEAYELVAPPSCFIANRFTRAWTLPRALSSGISNWSNAINLAEKAKSRPSRRAAKKSSRMMGSPGDYHLVVSNELNYLSYGVGVGHWEMTSTLMLACFWLSRCTVAKCRWNIVSFI

SEQ ID NO: 117386 - protein, 66 aa, Oryza sativa
  Clone ID: PAT_MRT4530_20797C.1.pep
VKCSKEHLRSWMNVWNSMARKSESHCLLICRFWLYTHEDNLRIRSRSWILSYPNNCFLNTAQQTNP

SEQ ID NO: 117387 - protein, 42 aa, Oryza sativa
  Clone ID: PAT_MRT4530_20798C.1.pep
RGIHSHVMTTLYPHVLDYLHSHTGKDGMHLPNACTYALVFTG

SEQ ID NO: 117388 - protein, 1255 aa, Oryza sativa
  unsure (1)..(1255): unsure at all Xaa locations
  Clone ID: PAT_MRT4530_20799C.1.pep
MGYRGPTAKIFILLSLLSLTFSAEPRKEEFVNHSVVKMFQMQPGSFPYSTNDAKGSKIYISSIDMCKIECPYGTMAAVETEPSTFYGSQSSISVWEPYLCTGRPPRYTGAVVVIQNGQSRIGAGWYVDPDMYGDNHAHFEIAWTNKDKSCTNLRCAGFIQLSNRIVPGAVLKPISTIDGKKYLIIISIFKIWDVWVLLFGEELVGYWPGELFTDLSGAANMIGWMGVASAATGALVPHGSEGVRGVDQQALVFCPIDESKGKAKVEVKGSGDGLGFFHIPLSAGQKIKHEPRAALIKVSKGQMTVNAVISELERLIPGGWRWVVHDNGNGSFRTIFPSAAELKRMVEWGKVHTKVGDAEMQIVERGVGNEVKYVIPKVWVQCKGIPSELREYLIIWAVGSILGITKTVDMVFTRRYDIARLQVLVLDPSLIPEVVDVVIGDYLYELAFRVEPENGPEEPIPMDMDNIGDGDFEKKNDGNEKGDSGKEPGPGGSSQSKLGSGSMFYEKGGPSLHSIQVGLTADSGGLNLSDEEFDGLHDDVIGVERVQSQESLVAKLSAIPEAAVSPSRRSKRRASDSDQLVLQRAEKSKADKNLENLHVKDDVINDLRSMEENRLSDHVRLSTTKGFSNNVDGDLVDDHFDDNFLLQHLCSEIMEETTLDSRDSPSNSKKKGKKEHQLDFIALSETVKKDFAPGTLKNLCAGKDFLWHCKAPSGRSGGLLLGINLLNFDVGLIDEGDFYVKFHLCNRADKFKWALVLVYGLAQNENKDKFLAELVNMCSRETLPILIGGDFNILRSPNEKSNSNFDDRWPFLFNAIIDGLCLMELQMSGRNFTWANNLANPTYEKLDRVLMSTEWEHNFPLASVVALNRDISNHTPLLLNTNSSSQSNAQPCFKFELGWLLREGFVDMDGDQIINGDANLKSHITTYYKGLFGPPDDSDLXFDENNFVDIPQVSQLENEALIQEFTGKEIKEAIFQMEHNKAPGPDGFSAEFYQVFWDVIKDDILDIFRDFHNGTLPLFSLNFGTILXLLPKCVEAMKIQQYRPIFLLNVSFKIFTKVATNRIMGVAQKMISPTQTVLLPGRNIMEGVVILHETMYELHHKNKSAVIFKIDFEKAYDNVKWSFVQQTLRMKGFSPKWCEWIVSFIQGGHVGVKVNDQIGNNFQTYKGLRQGDHLSPILFNIVADMLALLIKRAKEAGTLEGVIPHLVDDGLSILXYADDTIXFLEHDLQQAKNLKLILSVFEKLSGLNFFFHKKN

SEQ ID NO: 117389 - protein, 168 aa, Oryza sativa
  unsure (1)..(168): unsure at all Xaa locations
  Clone ID: PAT_MRT4530_2079C.1.pep
MANWATRHNTAQAQSCLGRGNXSGRHGPIDTPGRAVPAHGRHTQRKHGPIRLGSCRASSKARSPIVLFHRKSLFFIPQLCGLSKKLSHPRGANWSYFGWGPQLLSLPQSHGIRKKVAHPLSPHDRARRRVAFSPPPPSLLAAASSTPRRPPPAPPPPPTSAAAAPPPV

SEQ ID NO: 117390 - protein, 138 aa, Oryza sativa
  Clone ID: PAT_MRT4530_207C.1.pep
MAPGVNIFAGVPDAHPYTPFDFMSGTSMATPHVSGLVALFRTLHPHWSPAAIRSAFVTTADVVDNTGKPIQDENRAAAAGAYSIRAGHVLVRPRYEAKVMQRIEMIHRWQEGSSTISDLADYGFKEEYYPVVDYELVI

SEQ ID NO: 117391 - protein, 888 aa, Oryza sativa
  Clone ID: PAT_MRT4530_20800C.1.pep
MEKNGRQGYGAAGQGFAARGFHPGFGGRGRSRGRGRFGRGGRHDFAQGGRWYGIPGGGHGNGFAVVWDCWPAWRECGAGCLPSSFLPSGSDVSTVMPPTGGGVPPAFMPPAGGFVPATAAPFAAVLGGGGVGAPFGAVPSTASAPVSKAGGEEVLVGGDVTKGGASNAALSAAMTSRLGVSSASQSAAVVGTGPAGAGAGGALVPHGSEGVHGVDQQALVFCPVDESKGKAKVEVKGSGDGLGFFHIPLSAGQKIKHEPRAALIKVSKGQMTVNAVISELERLIPRGWRWVVHDNGDGSFRTIFPFAAELKRMVEWGKVHTKVGDAEMQIVERGVGNEVKYVIPNVWVQCKGIPSELREYLIIWAVGSILGITKAVDMVFTRRYDIARLQVLVLDPSLIPKVVDVVIGDYLYELTFRVEPENGPEEPIPMDMDNIGDGDFEKKNDGNEKGDSGKEPGPGGSSQSKLGSGSMFCEKGGPSLHSIQVGLTADSGGLNLSDEEFDGLHDDVIGVERVQSQESLVAKLSAIPEAAVSPSRRSKIRASDSDQLVLQRAEKLKADKNLENLQISASIKNLGIITSSPNVVLDDVINDLRSMEENRLSDHVRLSTTKGFSNNVDGDLVDDHFDDNFLLQHLCSEIMEETTLDSRDSPSNSKKKGKKGLFGPPEDSSLQFDENRIVDVPQVSQLENEALTQPFSEMEIKEAVFQMEHNKAPGPDGFPAEFYQVFWNVIKNDLLELFNDFHRGTLPLFSLNFGTIILLPKCVDAIKIQQYRPICLLNIPKGVLQKIDYYRSRFFWQGDDHKKKYRLTRWDIICQPKDQGGLGIHNLELQNKCLLSKWLYKLINEERVWQNLLKRKYLYNKSITQVDKKQGNFQGNALAPVLGTATKV

SEQ ID NO: 117392 - protein, 1069 aa, Oryza sativa
  Clone ID: PAT_MRT4530_20801C.1.pep
MAQILFSSLKTFWQCATTSEHPLHHVPKLVTNIVKKIHFSFIRNLEQQGEVNKGKAKVEVKGSGKPYCYRCYTKGHTMQECSSRFYYEICESEDHVASRCPIFRSSVKPVAQLCGYAGDGLGFFHIPLSAGMRVKHEPKAAMVKVTKGQMSVSSIISELERFIPAELSRMVEWGKVHTKVGEAEMEIVERGVGNELNLIPESDGLTVSDEEFDGLDEETIMVDKAQIQESLVAKLSVIPEAVISPSRKKNNRISEYACSSINQVCTPNVDTESLDDQLEDNFLLQHLCSEIMEEIMDFSEDSLSETVKKEFTPAALKNLCAGKEFLWHCKPPRGDFYIKFHLCNKVDKFKWALVLVYGPAQNELKDQFLAELVNLCSHESLPILIDGDFNILRSPDEKNNDSYDDRWPFLFNAIIDGLCLRELQMSGNAQHSFKFELGWLLRDGFVDMEIDFRWFCRNRLSTLMREEEIKWYQRAKTKDILEGDSNTKYFHLVANGKHRKTRIFQLQDGDQLINGDANLKSHITTYYKDLFGPPDDSDLQFDENNFVDIPQVSQLENEALIQEFTEKEIKEAIFQMEHNKAPGPDGFPAEFYQVFWDVIKDDMLDLFRDFHNGTLPLFSLNFGTIILLPKCAEAMKIQQYRPICLLNVSFKIFTKVATNRIMSVAQKVISPTQTAFIPGKNIMEGVVILHETMYELHRKNKSDVIFKIDFEKAYDKVKWSFVQQTLGMKGFSPKWCEWITSFIQGGHVGIRVNDQTGNNFQTYKGLRQEDHLSLILFNIVADMLTLLIKRAKDASSLNGVVPHLVDDGLSILQYADGTIIFVEHDLQQAKNLKLILSVFEKLSGLKINFHKSELFCFGQAKEYYDEYSNIFGCKFDQEGLGVHNLEIQNKCLLSKWLFKLINEESVWQNLLKRKYLYNQSITQVNKKQGGSHFWSGLMKVKDTFLDMGSWIVNNEKQIRFWEDKWLGNLAFKDKYPSLYSIVRRKSSTIANVMRSVPLNVSFRRSLVGQNLAYWHELCASIVHIQLNQSSDSFRWNYHQNGIFSIRSMYLALINNAAPRARRRRARRGP

SEQ ID NO: 117393 - protein, 121 aa, Oryza sativa
  unsure (1)..(121): unsure at all Xaa locations
  Clone ID: PAT_MRT4530_20802C.1.pep
PXQGGSSPXPRLPRQPPPPPTRASATSANERERDQSCIAGCWPIEGHHRKFRRPLXLPGHQLHRLGRDLFESQDXSYLAFRIPRWGCLCPPKFPAKGLGFRPTREETNKGLPGVTYRIGPG

SEQ ID NO: 117394 - protein, 728 aa, Oryza sativa
  Clone ID: PAT_MRT4530_20803C.1.pep
MAAKARARSPDFARQFWPVLCHAFSECSLIIMLFVTAVVSFTATRFARIWSLRPPCILCSRLDRLLHGNTWFSEDLICAAHKLEISQLEYCQSHNKLAHSDDLCERCLLSCAGLDETFKKTRHTHKLPELANGIVPDDVSTVKERSIDMTSVGHSSDEGSEDLSYGGYSKLNVRHDSESENRISDDDEDEDGNSMIHKATQRSRDFLFHDSQLQPMISDTNSLSMHPSENVVLAEPMNTAPVPVSTAAKTDNVATGTNLVSAAKSSEHIAQGSREISLSNVNVSGNNHDVQPKIVPEQVCAELPKEKTFLVGIEEVDDSAGISGSPDEEVAKGFVASANAGMSSVLDACINRKNSMKSASRRRSNLQSPRWSEIISAKDNSSRTNQEVKTFLSQMSSARGFDGPWSEVAASPRITQIDDKQYDATGSRQFLETNYSNMEPFDVHATSEDEGDTSLEGLKQKVELGKKKMSILYKEFEAERSASAVAASEAMAMINRLQEEKASMHMEALQYLRMMEEQADHDQEAIERLNDLLTEREKEMLDLEAELDNYRRLHEPFGCKFDFTDGDMASGVLDSSDFMRDTMFDFEDEKANILKSLSKLEETLGMSSTDRHNFGGTYDSLQNMSVLHPEHWSGEPVSSQQIDENQSVDSGSCSHLDDGRISSMTSVKHEISLLNTRFTALETDQKFLKQILSSLKCSDDGVQCVQEITAHLRELRRIMTEQRERAVL

SEQ ID NO: 117395 - protein, 552 aa, Oryza sativa
  Clone ID: PAT_MRT4530_20804C.1.pep
MTRLTEKGVPFVWDNDCEASFQKLKDRLVNAPILVLTESGKRFIVYTDASRICLGCVLMQDGKVIAYASRQLKKHERNYPTHDLELAAVVFALKIWRHYLYGESCDVFTDHKSLKYIFTQKDLNLRQRREAHRTPYTIHPGETKMYTDLKQSFWWKRMKVDIAKYVSACGVCQQVKAEHKRPAGLLWPLEIPEWKWEHITMDFVIGLPRSPRGKDAIWVVVDRLTKSAHFIPVRTTNTAHDLAPLYIKEVVRLHGVPKSIVSDRDSKFVSMLWQSLQRAMGTKISLSTAFHPQTDGQSERTIQTLEDMLRACVLSWKGNWEDHLALVEFAYNNSYQASIKMAPFEALYGRKCVSPLCWESLGERALLGPEIVEQTSKKVQEIGQNMLAAQSRQKSYADTRRRDLEFAVGDQVLLRVSPTKGIVRFGTTGKLSPRYIGPFVITARVGSLAYRLQLPESMNGVHDVFHVSMLRKYLRDPEHKIDLEPIMVEQDLTIECRPVRIFDWSERVMRRRTIKYVKVLWTNQSEREATWELEEEMKKKYPELFVDGMFMV

SEQ ID NO: 117396 - protein, 447 aa, Oryza sativa
  Clone ID: PAT_MRT4530_20805C.1.pep
MGRAGRWLRSFLPGKKDRARAPAPEKEQAVAVVTTPGAKEKRRWSFRRPAVKDGGGGFLEPRVDPDQHAVAVAIATAAAAEAAVAAKQAAAAVVRLAGSSRRGVVVVGIEEAAAIKIQCVFRSYLARKALCALRGLVKLQALVRGHLVRRQASNTLRCMQALVAAQHRARAARLRLLDDDKEKPLLHTPRMMPTRRSPHHPRFRHQQQQQEAEENVKIVEVDTGFGGGGGSGEAHCTPRTSSRRSSCYATPLCRTPSKVELYQKVSPTPSALTDASARTYSGRYDDFSFSTARNSPWHHHHASDAPCKPHHPHHGNGDHPLFFPNYMANTESSRAKARSQSAPRQRASVSSSASEASSVRWERQASARRRASLEAQAASAPPNKCGAAMMARVQRCPSQASAPASCPWGSRLPDHDSECGSTSTVLTAATTTYCWSLATDNAAAAMA

SEQ ID NO: 117397 - protein, 187 aa, Oryza sativa
  Clone ID: PAT_MRT4530_20806C.1.pep
HFQEARALLGKVENQHGHAEEALRVFSGINMPALIPKVKMSIIRKVDLQKAQLHSSSPSLPFHAAILLLEIIYFKATALRNLGKIEEATKECSSILDVVESALPEGLPDIFGDDCNLKPTLCRAVELLPELYKLGGFHFEAISSYRRALWSNWNLDEKTIGRIQKEFAVLLLYSGCETCSPNLLSQL

SEQ ID NO: 117398 - protein, 43 aa, Oryza sativa
  Clone ID: PAT_MRT4530_20807C.1.pep
MANRARSSSYAAAAVVLALALASVVAVCGEVFFQEMVRMMDGK

SEQ ID NO: 117399 - protein, 106 aa, Oryza sativa
  Clone ID: PAT_MRT4530_20808C.1.pep
MGTVARLTKYWENQKRGCQDYETKGVQQVGPWSDDSKSQSHFDGLPGFEPAIDLPPVGLNGTTDLDRAQPIGWWAPVTLRHIKQRVETGAAQDTRFAAAANSTHKP

SEQ ID NO: 117400 - protein, 89 aa, Oryza sativa
  unsure (1)..(89): unsure at all Xaa locations
  Clone ID: PAT_MRT4530_20809C.1.pep
GGXXVSFSLIPAAFLIVYVQALTVSVRVQAQLPGILVLEALTVGVPVQAQLPGVLVLEVIPGSAATGRPCRKKTRGVNDKHMWTYMSLR

SEQ ID NO: 117401 - protein, 79 aa, Oryza sativa
  unsure (1)..(79): unsure at all Xaa locations
  Clone ID: PAT_MRT4530_2080C.1.pep
MPPPLAVTPPRPRRRXRRRIPRHQRHXRRRLLXWQXGGLLLPCXHQTEEYRTVVFLSXLLLGWXHFRHTQFVRLTTSPF

SEQ ID NO: 117402 - protein, 68 aa, Oryza sativa
  Clone ID: PAT_MRT4530_20810C.1.pep
HIKQGSYAESVTPVYWQQQQCMLGEDIAKSRFGQRVVLLRLFGALDLGCMVKLHKSQRGILVNNSAEQ

SEQ ID NO: 117403 - protein, 184 aa, Oryza sativa
  Clone ID: PAT_MRT4530_20811C.1.pep
KDRRRRETLRGGRADGGARGRAAARVAAMAERRRLQARRTGRAADGGVAATAERRRLWRRLPALLGEWRRARLGERRWQQRRARLGANVASRRTMPVVPVVRVELKLLPVVRGGDGARRPQWISGRQPPDAAQLSTTPAVPSTGHQLAGHIRPRAVAASARAPGQVAASPARREHLAPIHACIH

SEQ ID NO: 117404 - protein, 118 aa, Oryza sativa
  Clone ID: PAT_MRT4530_20812C.1.pep
ILEGKHESMQTGTQENRRPGGEDEVDLHDYLLYWSPLDRHASLHPWVPAPSPLLSSSGCRRGSAGTEEEATCVAVNAAERMMRPRRRTATMLTPRSLLQASSTSAPRRTPQPLGVLPA

SEQ ID NO: 117405 - protein, 389 aa, Oryza sativa
  Clone ID: PAT_MRT4530_20813C.1.pep
MALSTAFSALPTSPADVRVVTADGSGIRAHSSVLASASPVLERMIEQAPRGGVVPIAGASTGAVVVFLRFLYAASARFVLVGNRTYARDHAKGKLTCAAVWWRAGGRRPQAAAAEWEEAALAEHGAALMALAHAYRVAGPLKRRAEDAVAARVAAEGAVDAMKLAALCDAPRLYLWCARLAGRELAAVRESEGWRFAARHDAALRADLLQLIRDADQRKERWGRERGSQGVYLQLSDAMAALERVFARAAHGSPPPLPPPRTGQCCRMASPCAHRRGLLQLARHFFAGCGRRVAGGCTPCRRFFLLLRLHSSVCDKSDDDSCGVPLCSNFKTNMEKGKVDKTWKLLVKKVMRARVMSAWAKRPVPAPEIVQKSWAKYNSSSRSRAARFR

SEQ ID NO: 117406 - protein, 71 aa, Oryza sativa
  Clone ID: PAT_MRT4530_20814C.1.pep
MACIACSVNAKWLVTFSTREFPTKSYFLVMTTLVNLYYSIEIRQVFGLGMSSISIEPFQVKTFFFIFFYFS

SEQ ID NO: 117407 - protein, 56 aa, Oryza sativa
  Clone ID: PAT_MRT4530_20815C.1.pep
HDDPEFGWCSVWWGPVAVYVLDMLFIYQRSVCVTVASVCFRVSTLHVCWCASLNES

SEQ ID NO: 117408 - protein, 34 aa, Oryza sativa
  Clone ID: PAT_MRT4530_20816C.1.pep
LNLTTERGFTGPILFKNRRAYDGIPSSKMEGQLC

SEQ ID NO: 117409 - protein, 469 aa, Oryza sativa
  Clone ID: PAT_MRT4530_20817C.1.pep
MDCIDEMPDLRSWNPDDEEEEEEKEEMPAVVDYSPHHRRRPSTFTRCGVIFDTDLIVRKPVEGAATGGRASHRTSTGFPFSVSLNLAVPPALSSIYLHCAEAVMPPTLEHGYFGRSSLVAADATHLLLLVVVPVKIQGMYDHEYPEEYFVYTADALRPSLADALCPTLTRLPRFPDNRQRLAGDIGILNHAAAAGDGFSFAVASLQTFMEWQSGEGSAAILHLQEMAKLSVLQCSVGSDLDEDNTKNNDSRWVVKNLAMPFDSQGDFGPRQWKSNIAFAYAGKLYWADYDVGLIYCDVLESSPKLQLIKFPVPVRKFELGVSGPDDNCGNSESFRTAGVSNGKIKFVDVDNCRAQSFAVIIRTWTLQMPQMVWKLDDVLNVKQLWGSASFKKYGLHQWVPEYPVVSLLDPHIVHFVLHKHMYHDQVWMIAVDMRAKSVKSCKNYPKGEKEDGYKGLSFNIDFICSMLSK

SEQ ID NO: 117410 - protein, 284 aa, Oryza sativa
  Clone ID: PAT_MRT4530_20818C.1.pep
MGSRGRRGGGERETETEEDETWQLRVGDDFTVPERFHRKPPFFSRIVTAGSHGKHRKIAKYYKKQENLLKDFSEMETRNEIRSLDQNAPTEEPWHQVFDHRKELWMIGSMSSVAVVKFFLMLYCRSFKNEIVRAYAQDHFFDVITNSVGLVSALLAVRYKWWMDPVGAILIAVYTITTWARTVVENVGTLIGRSAPAEYLTKLTYLIWNHHEEIRHIDTVRAYTFGTHYFVEVDIVLPGDMPLSHAHDIGESLQEKLEQLPEVERAFVHVDFEFTHRPEHKAEV

SEQ ID NO: 117411 - protein, 374 aa, Oryza sativa
  Clone ID: PAT_MRT4530_20819C.1.pep
MRKKAAAGGGGGGGGKGVVATTTAPTDLLVCFPPRQHLALMPKPICSPSRTTVDKAVAARRRRQQQQQLPAARSGGGGGGRGRGSTSSPLFRGSKAKQAAVEVDDEPQSPKVTCVGQIKVARPKKQRKVAGKPGNGGGGGGGGEGGRSWITVVEEIERLHEQRKKVSWLEAVGIRRDALPFLGGALRSLRLKVRCFGSLHGAVESSTDDEDDDDDDGRGAEEHEAVSAGCGGSAASSVFSKWLMVLEGSEETPEQDSGDDEEEPEREDDDECSNAPPSAPPANALLLMRCRSAPAKGLARRRTEEPPPPVGEAVHDEGSAAAAAAGDDGAEEERDELVFMRTAPDFLKLSIDIAKETWIVGGVDPLARSRSWKR

SEQ ID NO: 117412 - protein, 171 aa, Oryza sativa
  unsure (1)..(171): unsure at all Xaa locations
  Clone ID: PAT_MRT4530_2081C.1.pep
HEGDEDQVEAAMAVLRETRESEERRRALCVPRLLAALRRVLHSKRHTPKAHADAAAALANLTNEPENRIPIVRAGAVTALVEVLSLGTASXEACEHAAGALFGLALDEENRAAIGVLGAVQPLLDLFTARDHAPRARRDAGMALYHLSLSAVNQSKLARAPAAAKNLLSIA

SEQ ID NO: 117413 - protein, 405 aa, Oryza sativa
  Clone ID: PAT_MRT4530_20820C.1.pep
MDIFSPARPSWTFRSDESEFPACSWRPRCLCTGLATSSKQAMGSRGRRGGGERETETEEDETWKLRVGDDFTVPERFHRKPPFFSRIFPAGSHGKHRKIAKYYKKQENLLKDFSEMETMNEIGSLDQNAPTEEELRQMAKGERLAINLSNIINLILFIGKVLASVESLSMAVIASTLDSLLDLLSGFILWFTAHAMKKPNKYSYPIGKRRMQPVEHQVFDHRKELWMIGSMSSVAVVKFFLMLYCRSFKNEIVRAYAQDHFFDVITNSVGLVSALLAVRYKWWMDPVGAILIAVYTITTWARTVVENVGTLIGRSAPAEYLTKLTYLIWNHHEEIRHIDTVRAYTFGTHYFVEVDIVLPGDMPLSHAHDIGESLQEKLEQLPEVERAFVHVDFEFTHRPEHKAEV

SEQ ID NO: 117414 - protein, 248 aa, Oryza sativa
  unsure (1)..(248): unsure at all Xaa locations
  Clone ID: PAT_MRT4530_20821C.1.pep
LPAGIGMGDGGEKQAAAAEGWRLSVNDFQLPERPKDPHFVKRVIKRCHGKHRKIAKYYKKQENLLKDFSEMETMNEIGSLDQNAPTEEELRQMAKGERLAINLSNIINLILFIGKVLASVESLSMAVIASTLDSLLDLLSGFILWFTAHAXKKPNKYSYPIGKRRMQPVGIIVFASVMGTLGFQVLIESGRQLITNEHQVFDHRKELWMIGSMSSVAVVKFFLMLYCRSFKNEIVRAYAQDHFFDVIT

SEQ ID NO: 117415 - protein, 67 aa, Oryza sativa
  Clone ID: PAT_MRT4530_20822C.1.pep
MAWIKNGDQTVRISSVSVKNNKVLPPFHNVRLSSVVHIHIDVNESRHTYESRFINIYMMRAILESLV

SEQ ID NO: 117416 - protein, 153 aa, Oryza sativa
  Clone ID: PAT_MRT4530_20823C.1.pep
QERRGEETVLARMCICLKAGQGAITLGGPPPCAAADARRGRRRRRGPRAPTLRSSCSRPHLLPPPDRREPESRGAWSKRSTGWESATLPASSGVPLMKPVRSISSSPFTFAWAVPCLTSFLLVAMLITLSLSLSSIDVYDRSLLMRLAGYIYN

SEQ ID NO: 117417 - protein, 145 aa, Oryza sativa
  Clone ID: PAT_MRT4530_20824C.1.pep
MERCFLLLLLLATGIAAGEQPPRRTAVADHPAIVGTTTAAPCDPLCISGAAAGGATPEAMAAASAAVAMAGNESESALLPTPRQLDRPDSSGLPTTHQSWIYYGPLPTTPYPYSKAPPASELVRATTAAAAVVFSTVLLVAAAAR

SEQ ID NO: 117418 - protein, 35 aa, Oryza sativa
  Clone ID: PAT_MRT4530_20825C.1.pep
SIYKELFQSNRMSLIRFDLQTHKMAWFSFYGKMIS

SEQ ID NO: 117419 - protein, 71 aa, Oryza sativa
  unsure (1)..(71): unsure at all Xaa locations
  Clone ID: PAT_MRT4530_20826C.1.pep
HACNPILVLLRYLQNNQFTGYINVLANLPLDDXAPPPPPYSAPPPPNRPNSPGQNNGGSSSGGSYFDQHQP

SEQ ID NO: 117420 - protein, 55 aa, Oryza sativa
  Clone ID: PAT_MRT4530_20827C.1.pep
SHEWLSRLTLGLEKHTPELANFITDAFASVSHRFLSLTLCQYHCVVLVLNSCMYF

SEQ ID NO: 117421 - protein, 64 aa, Oryza sativa
  Clone ID: PAT_MRT4530_20828C.1.pep
FRLPTCSPPPIPNFFAVTICSDSLFELLAQSKVMSVMCLNFFFAGSLHVVWHYLNWQVLLHWWL

SEQ ID NO: 117422 - protein, 41 aa, Oryza sativa
  Clone ID: PAT_MRT4530_20829C.1.pep
DGPRADPTSWYPVAQYTSPFEFTGRVTEIWMLFAPKDASAM

SEQ ID NO: 117423 - protein, 192 aa, Oryza sativa
  Clone ID: PAT_MRT4530_2082C.1.pep
MVKEGILRTSNLILLYSSSFQGSGAAPPHQQLQTLRLSGELMNSGKQARLRAEREFPPPQASNTQPTHAANNPNGITHGIGNREIEERWREAGLTERRRPDLPRRRERERRRRRALPPAKGRAAHLPLVEPSASAAERERERETRSPLGQKDARRRRRRVSARKTRREAAAAAGGGGGLGGPEVSLCGLQAW

SEQ ID NO: 117424 - protein, 85 aa, Oryza sativa
  Clone ID: PAT_MRT4530_20830C.1.pep
KRISTTLSWQQGINKFIYLYFYFSLFYLIHPDSCLPSNLLSSTKPQLIHPKSMWQYNRNWYLLPLTFSYAAAWFLILRGRRNTMH

SEQ ID NO: 117425 - protein, 90 aa, Oryza sativa
  unsure (1)..(90): unsure at all Xaa locations
  Clone ID: PAT_MRT4530_20831C.1.pep
NPCPTPQEEIFKKDSPTSHDAAYPDTDEGKTKQLERIVTHQEDTSCSLDVGGRTLHDDAQARGDGCLIKPXPVEPHVDTYGGAVLLMNYE

SEQ ID NO: 117426 - protein, 156 aa, Oryza sativa
  Clone ID: PAT_MRT4530_20832C.1.pep
RSFNSMQLGSPYSPVPSMQYPGSYPGNAINSRPFVNSHNSMKVPNANASSPTSSSTSSNPGPQIEGPPGANLFIYHIPQEFGDQDLAGAFQGFGRVLSAKVFVDKATGLSKCFGFISYDSPASAQTAISMMNGYQLGGKKLKVQLKRDNSKHSKTY

SEQ ID NO: 117427 - protein, 375 aa, Oryza sativa
  Clone ID: PAT_MRT4530_20833C.1.pep
MWGLGLVKPMEEMLMGANPNPNGSSNQPPPPPSSAASAQRPIAPPAAGAAAGAGAAGAGAGTERRARPQKEKALNCPRCNSTNTKFCYYNNYSLQQPRYFCKTCRRYWTEGGSLRNVPVGGGSRKNKRSSSSVVPSAAASASTSAAVSGSVPVGLAAKNPKLMHEGAQDLNLAFPHHHGRALQPPEFTAFPSLESSSVCNPGGNLAAANGAGGRGSVGAFSAMELLRSTGCYVPLPQMAPLGMPAEYAAAGFHLGEFRMPPPPQQQQQQQAQTVLGFSLDTHGAGAGGGSGVFGACSAGLQESAAGRLLFPFEDLKPVVSAAAGDANSGGDHQYDHGKNQGGGGGVIGGHEAPGFWNSSMIGNGSSNGGGGGGSW

SEQ ID NO: 117428 - protein, 43 aa, Oryza sativa
  Clone ID: PAT_MRT4530_20834C.1.pep
ILSSLVRNTLYLALNYIFLAELKFSYFLLVNSYAYISTWVIIG

SEQ ID NO: 117429 - protein, 701 aa, Oryza sativa
  Clone ID: PAT_MRT4530_20835C.1.pep
MAEHLASIFGTEKDKVNCPFYFKIGACRHGDRCSCLHNRPTISPTVVFANMYQRPDMITPGVDAQGQPIDPRQMQEHFEDFYEDIFEELSKFGEIENLNVCDNLADHMIGNVYVQFREEDQAAAAHTALQGRFYSGRPIIVDFSPVTDFREATCRQYEENSCNRESHNEAGAAAQAQAHAIGGSDMIVMTIEDVTITLVVVEGGVEAADMKGMMMEEGVGTVVALQGVRGVQSGRAARSAGPRSNSGIVKGTKSRGDRLCPSLARACDRTAMRRLTKRLLPSFRGAGRACHRRMARYRQAGTGTPGGGGGFLLICSTGDALFDETEFTFGKVEIFNTMHSCFKFSNDLGNQLKTIFFKKENKGGMQGKSKSMYNPCMSTTSMNQYVSHTQSFGLPSNQVVLGSMDEESAQHGNYAFPTSHISQCFQPTSNTWISQSANGIADGIPQWEYVNGMNNAPGMTETVNGSFREYQNGPSTLCRGPLPYFHQHAGMHAHNLLDHTQVQAPYQQCHNNPVLHGVNHSGNRFHLGPRIPVLFSNSERTFGPPHHPLLANPVNHRNIRILPPEHATIMDFSRLYEVSNVVDEHRDMRLDIDSMTYEELLALEEQIGDVNTGLAKSYIVEKLKTSLFVPGSSCMSNKSSESSMENDACIICQEEYQVKECIGTLDCGHRYHEDCIKQWLMVKNLCPICKTTALSTGRRSG

SEQ ID NO: 117430 - protein, 439 aa, Oryza sativa
  unsure (1)..(439): unsure at all Xaa locations
  Clone ID: PAT_MRT4530_20836C.1.pep
MAYRNTVCTPQVIDLETEQGHSHIHSESFNRTGNDSSDQGAQHAVRGVGNATNIGLSDMRSYYDAGMNHPHQPVHNLPPNLGVDSGFVFPSSMYNPCMSTTSMNQYVSHTQSFGLPSNQVVLGSMDEGSRNENAGESARGFIKRKNAAVAGSYHCANGFASSSSSHASLNPTHRPWDPSFESNVLPNTASYNPSEYHSQTSWPSMEGSSIPSNGFNLMGAHPESAQHGNYAFPTSHISQCFQPTSNTWISQSANGIADGIPQWEYVNGMNNAPGRFSRSGMTETVNGSFREYQNGPSTLCRGPLPYFHQHAGMHAHNLLDHTQVQAPYQQCHNNPVLHGVNHSGNRFHLGPRIPVLFSNSERTFGPPHHPLLANPVNHRNIRILPPEHATIMDFSRLYEVSNVVDEHRDMRLDIDSMTYEELLALXEQIGDVNTGLAKS

SEQ ID NO: 117431 - protein, 47 aa, Oryza sativa
  Clone ID: PAT_MRT4530_20837C.1.pep
MSGYTATGICTRCMEEHEVLGRHTGMTAIGLDLSRHAKTRESPLNER

SEQ ID NO: 117432 - protein, 192 aa, Oryza sativa
  unsure (1)..(192): unsure at all Xaa locations
  Clone ID: PAT_MRT4530_20838C.1.pep
PKRRRTVTGRRRRRGRSGGALRLDDGDGDPSVDSDGGGADKDCDDLATTMVTSPSDGDDRSDGGARLERRRRRDGDARRREAKARVAVGSGDTGGPFIGARRRRRRPTATGDGEGRSRVXGREMNPIRDRIHGFPNEISRRFHKRKDRGDPGDHFPSINFIGNRKGRPDLEGDCGGVALGLGRRAAGGRRRP

SEQ ID NO: 117433 - protein, 38 aa, Oryza sativa
  Clone ID: PAT_MRT4530_20839C.1.pep
TWCRYKEKKKKKKKKKKKKKKKKKKKKKKKKKKKKKKK

SEQ ID NO: 117434 - protein, 86 aa, Oryza sativa
  Clone ID: PAT_MRT4530_2083C.1.pep
KLKTLELYVQSAQAWPPPNLSVLAETCMSRDYTDIAILNLQIQGAQSTDKSHHKLMNHHTQSSHQLNYKSSNSRADVGCNCRALAI

SEQ ID NO: 117435 - protein, 486 aa, Oryza sativa
  Clone ID: PAT_MRT4530_20840C.1.pep
MANRRPVLVLLLMAAVWVAGVVVDARHDPAVAWVWRQSMVGGEGCGDKHSTATISGGGVGVGGGEGGGVGVGGGVGGGTGGGAAGGLGGGGGGGGGLGGSGGLGGGGMGGSGGFGGGGGGGVGGGVGAGFGSGGGVGAGGGLRGGGGVGAGGGGGFGGGAGGGGGIGAGGGFGGGAGAGGGVGGGGRFGGGGMGGGGGFGGGAGGGVGGGGELGGGGMGGGSGFGGGAGGGFGAGGGVGGGIGVGGGMGGGASGGIGGGAGGGMGGDIGGGAGGGVGGGGGGGMGGGGGFGGGGGVGGNTGRDFDGGKGNGLNGGDGASGGIGGGASGGFGGGAGIGEGVGNGFGVGAGAGTGLGSGFGWSGGAGGGFGTGGGSGFGGGLGGGGGIGGGLGVGGGTGGGSGANEGAGMGGGISSGAGAGGGLGVGGGGGAGGGIGASRGARGGSGAGGGAGMGGGVGARAGGGGEHKRGGGKHHGGSGSGVLGRFI

SEQ ID NO: 117436 - protein, 91 aa, Oryza sativa
  Clone ID: PAT_MRT4530_20841C.1.pep
EQQKQKGGPQASNPGGNFLDPSSFKPRRVKGTKGHPFPGRIRPGNKNQTSFYPLGPHKNSVLGGLILRHRRYFLKKGPPQPNPPPEKVFRP

SEQ ID NO: 117437 - protein, 441 aa, Oryza sativa
  Clone ID: PAT_MRT4530_20842C.1.pep
MEMHECCYYGGSIGGDWLNPLAAIPPPCSSSSSSWSSQLLLLSDHDDVLLHSAGDHGGAVAGIGGACMTADLVVRDEEMEMAAGYLPVAASAAAAADVDHYMYQQFQLEPDQFVSTLPAVAVAVAATAGGGSHDDELLRMPFTDIDLDAFADARDVVVGVGEPKPSPQHTLDAAIALPAVGGGGAHHFGTQDDDVKFDVTKQRNDAALAGDDSLSMVIVESYEMGMRRHAAEQEQEQKPKIITSAATTLTPLPLPPPPPPPPRVTRSRRDGSSAATAGGKTRLDHIGFEDLRRYFYMPITKAAREMNVGLTVLKKRCRELGVARWPHRKMKSLKSLILNEMGSKGMSAAAMRRELEALENCCALMERNPAVELTERTKKLRQACFKENYKRRRAAAVDVLDLDHCFSFAAGHCHRHHHQQLALPPPPAAAADHRRRDFFGY

SEQ ID NO: 117438 - protein, 61 aa, Oryza sativa
  Clone ID: PAT_MRT4530_20843C.1.pep
PRVRKKKKKKKKKKKKKKKKKKKKKKKKKKKKKKKKKKKKKKKKKKKGGPFLKIQFLFPVF

SEQ ID NO: 117439 - protein, 505 aa, Oryza sativa
  Clone ID: PAT_MRT4530_20844C.1.pep
MELTTISPVFLISLLGVPLLYLLWSKASKSPSGAPAAPPPPPGPTPFPVIGNIPDLLRGGELHRALTGLAASYGPVMSLRLGMASTVVLSSPDVAHEALHKKDGAISSRWVPDNANVLGHQDVSMAWLPSSSPLWKHMRTLASTLLFTSRRLGASRGIRERKARELVDYLGARSGRPVRVGLAVFGSVLNFMSNVFFSEDVVELGSETGQEFQQLIADSVAETAKPNISDFFPFLSALDLSRRRRAAAKNLKKFYDFFDDVIDRRLSSGEKPGDLLDSLLELHAKSQLERPLIRALMTDLFIAGSHTTTTTVEWAMAELLRNPSKMAKARAELGEAFGRGAVEEGELARLPYLNAVIKETLRLHPPAPLLLPHRVSSDSEPAGGVTLGGYSVPSGARVLINAWAIGRDPAAWSPEPDAFSPERFLGREADYWGRTLEFIPFGSGRRACPGIPLAVAVVPMVVAAMVHSLEWRLPEGMAPGDVDVGDRFGAVLELATPLWAVPVKV

SEQ ID NO: 117440 - protein, 167 aa, Oryza sativa
  Clone ID: PAT_MRT4530_20845C.1.pep
MLYLAGARWVLLLLAAVTVLLCLQLSARDNAVDGAAAAAAAAGPAQTADLPLQQPAALPREAPAEGDLRGLGASSSPVFVVAVLPAYAWRKKAAVDGDDGDGECAICLGEVRRGQVVKQLPACTHLFHARCIDKWLITSQGTCPVCRTPVDSAAAALQAVRVADQPP

SEQ ID NO: 117441 - protein, 76 aa, Oryza sativa
  Clone ID: PAT_MRT4530_20846C.1.pep
CTCFLGYDKVNVNLLFLSITIHHLYTLFSRKCKRLALHFIKKKQKYQICTTEPSTKKEPSRKKKTSQKTTCNTKIS

SEQ ID NO: 117442 - protein, 105 aa, Oryza sativa
  Clone ID: PAT_MRT4530_20847C.1.pep
MDFTPSKAEQLRSRRPDGKVTRSRDGTAMGWRRARREDGSQRRPRRRAVDAMGGRWPAAPATGGAWSAARATGGRWPVAGGEREGRRWDGGVRDWRPAARFVWRG

SEQ ID NO: 117443 - protein, 71 aa, Oryza sativa
  Clone ID: PAT_MRT4530_20848C.1.pep
RDRQQAQTQIEPEERRRVTIRDRRLVWYIGSGSSPPLGRGAPLRLLHILLLLLHPGPFWLNPIPLLHVLKL

SEQ ID NO: 117444 - protein, 269 aa, Oryza sativa
  unsure (1)..(269): unsure at all Xaa locations
  Clone ID: PAT_MRT4530_20849C.1.pep
TFRSRSFTFAFSLSSRFIHLRSFVHVRPRXRTLSKVRSRTFVRLRMFKYNIKFTFVHVHVRSRSRSLTFVRSRSFTFTFVNVHSRLFVRSRSRSRTFRSFTFSFTFVHSFTFTFVRSFTFTFSFTFVRSRGGSGAAAGQRGRGFGCGGGGAARRCRAAAASWRPGVSCRRGIVARLRRHCQGDVVAGAGRIEVGVGXRQRRRRXRHAQDGVEIRRRRRCGDALGSGCEGEAERDRSGQKFLSVGREDEGAHREYIYXRSLVPVNENNRE

SEQ ID NO: 117445 - protein, 74 aa, Oryza sativa
  Clone ID: PAT_MRT4530_2084C.1.pep
ILCVYVDIVVLVVDGGDGCRATAEELLGSRGVDCCGQDHAREHDGQRGQPQEGGRPQVCMSPSAPSISHSFENK

SEQ ID NO: 117446 - protein, 70 aa, Oryza sativa
  Clone ID: PAT_MRT4530_20850C.1.pep
MASLKLRACVLLSTVFFFSGLMQLSMAQAGSPAAATATATTARVIDVKAVDQAVAYLLMLAALFVTYLAH

SEQ ID NO: 117447 - protein, 104 aa, Oryza sativa
  unsure (1)..(104): unsure at all Xaa locations
  Clone ID: PAT_MRT4530_20851C.1.pep
FFFFFVQRFLLVKKVIKFFFFGGGKNDLPEERHQXPIKGSSXMAQSTEDFSWXGFGSXKRETYXHGXTYQILGIVRXRRASILXPHHLRAXHASNHQNPCHPLI

SEQ ID NO: 117448 - protein, 176 aa, Oryza sativa
  unsure (1)..(176): unsure at all Xaa locations
  Clone ID: PAT_MRT4530_20852C.1.pep
MRQMLQRFIGVKCHHATVVYMERERGSAIFEPRGXGPTLFEPAGDRSVTPEPTRAAIVIMVAAPGAVVTCCPSASFPPHARTDQPLPSQAADSSFPSLLAADLSFPSPLAAYPSFLSLPTVDPPHAATVIVVTAHGDVVTTAARSQHYCSCGCPRPLLLQARIPPLPLGEARRPAG

SEQ ID NO: 117449 - protein, 96 aa, Oryza sativa
  Clone ID: PAT_MRT4530_20853C.1.pep
LQSYRLKGNRRKTTLQFEATKLWPCWLVPRGQSTMPDKSVCLRNIGDVHELCLVRQPETLLVGMLLLPLRGWPARSLRGAGPTTNSSSRHVDQSSG

SEQ ID NO: 117450 - protein, 51 aa, Oryza sativa
  Clone ID: PAT_MRT4530_20854C.1.pep
RRGFIIISRKTGPYIAANQLVWPHLLLFKVLLYIRKRPKEGFLGGIYKSGS

SEQ ID NO: 117451 - protein, 226 aa, Oryza sativa
  unsure (1)..(226): unsure at all Xaa locations
  Clone ID: PAT_MRT4530_20855C.1.pep
MRAAAIQTHALVCAPPGAAAAAPXPHGPRRAAGGGGGGPLLHHHRLXSDLPHTRSPPCRARSPSSSSSSNVNSGRGDDADNLLEDLLSKHGEVVYNAGGAPGIDADDDAECLSFAVSLAKVASEVKAADIRVLFVKPLVYWTRFFIILTAFSNAQIDAISSKMRDIGEKQFSIVASGDTKPNSWTLLDFGDVVVHIFLPQQRAFYNLEEFYGNATSIELPFEKQLQ

SEQ ID NO: 117452 - protein, 69 aa, Oryza sativa
  Clone ID: PAT_MRT4530_20856C.1.pep
MGRMFFAVGNWKCTGTTAQADTTRIILNEGQIASTDVAEVVSSPPYVLLAVLKSHLHPEIQVAAQNCWV

SEQ ID NO: 117453 - protein, 403 aa, Oryza sativa
  Clone ID: PAT_MRT4530_20857C.1.pep
MFAGGADGGNGHLPRPRRARRGGGGGGGMGSPPLGPPPPPCTDYDMAYFKAYSHIGVHEEMLKIVNENCDRKRGWMCPLFLVEVVLDVGCGTGVLSIFCAFAGAARVYAVDASDIALQAMEIVRENELSDKVIVLHGRIEYYYIRIFENQDVEIEEKVDVIISEWMGYMLLYESMLGSVIFARDKWLKPGGLILPSHASLYLAPITNSHRYQDSVYFWQDVYGIKMSSMMPLAKQCAFMEPSVETISGENVLTWPSVVAQVDCYTIQAPELETITATFNYTSMLQAPLHGFAFWFDVEFNGPVRQRSKKQANQCLDGNTQDASPSNKKKKADAPIVLSTAPEDAPTHWQQTLLYLFEPIELKKDQNIEGSVTISQSQQHARFLNICLKYFTRDQWYVKESVMK

SEQ ID NO: 117454 - protein, 92 aa, Oryza sativa
  Clone ID: PAT_MRT4530_20858C.1.pep
FTTAMSVSWPAVPMEAAAKVVPKGRTTLRTFAWSAKPEPSCTQQYVTTLELYLMPLYSMTSYYLIKKFRRDYGLIHELGMFNCLVTDNQETR

SEQ ID NO: 117455 - protein, 199 aa, Oryza sativa
  Clone ID: PAT_MRT4530_20859C.1.pep
MSSTAAGGAPGPAAQRHGGGGGGGGCCSSGVTLELVGAFTAVCLVLYGVILYFNYLYVRWSGRDGVHRTSGGGGGGGRGAAARKRGGGGGLDKAALAAIPVFRFKASASAAALGGGEAECAVCLSGMQDGDAVRALPGCGHAFHAGCVDAWLRAHGTCPVCRARPAVPPPPPAKPPCLKAPEPAAAAAGRQPVDLESHV

SEQ ID NO: 117456 - protein, 61 aa, Oryza sativa
  unsure (1)..(61): unsure at all Xaa locations
  Clone ID: PAT_MRT4530_2085C.1.pep
RNRQSRVEPVVVXAFYQAHNSWHKXKTSSFFRTSCSPSSPSWWQWCWATETXASTEVWGRW

SEQ ID NO: 117457 - protein, 50 aa, Oryza sativa
  Clone ID: PAT_MRT4530_20860C.1.pep
LVVVYENCLIVGHSLTYGFCLLGLGVQPQLMETKTETTSNSESHSEDEEV

SEQ ID NO: 117458 - protein, 36 aa, Oryza sativa
  Clone ID: PAT_MRT4530_20861C.1.pep
LAGGSWLFKTFVNLQKKRTPGIACRDFYSLIWVSLT

SEQ ID NO: 117459 - protein, 163 aa, Oryza sativa
  Clone ID: PAT_MRT4530_20862C.1.pep
AESTRLYKQCGEFISLRLDDASWEKTIEYDPGSRKGIDDYHPNQRAKVRRKYSENGPCQPGDHAFPISVISNKDRKFNPAWFDEFGGWLEYNKSKDRAYYFFCFLFRDRNKKEEGYKAFVNVGWNGYYRKDRLKEHVRGVGSLHNQAIYFCRPKMGFIHNMCV

SEQ ID NO: 117460 - protein, 250 aa, Oryza sativa
  Clone ID: PAT_MRT4530_20863C.1.pep
MCSEVLSVDQSDRLSRTARRRACHVAYDGEPPSPVKESHSGDRHVGHRQEPCLRHREGRGSGVEEPNCKYVVTLDCHVGRSACNARDYFHNYIKNIVSVCRYSDVSSVQLHHTYLGIPYFGGNTMTINSRPYRVQTSRTSKINAEIEQQKLVEKLRRERDDDHGSYWHLCSDRPSCPSCFCCLVRSGGRSAALLRGLPLVGREHWVRPGAERRLQLVVPVAVPRRRVQTPRRPSLLPLLLLAISTADDLA

SEQ ID NO: 117461 - protein, 102 aa, Oryza sativa
  unsure (1)..(102): unsure at all Xaa locations
  Clone ID: PAT_MRT4530_20864C.1.pep
QMTQFINAGATNHIILYKLSNKAGHIHNFTQHCGSPSDLIXTRISSSLTTETXASRQPCCLYQSSSVSSVFCSSTYRPFEDLEVGASATHQGKLSXTPQPSX

SEQ ID NO: 117462 - protein, 36 aa, Oryza sativa
  Clone ID: PAT_MRT4530_20865C.1.pep
MQDNAPVAVLGATLSLMVEEFIAAIRDMIIDHRPSV

SEQ ID NO: 117463 - protein, 86 aa, Oryza sativa
  Clone ID: PAT_MRT4530_20866C.1.pep
TRPVLRSQVVARGFAVHLVGVLVSNTFSLASRCPVAVDYGGSGGGYGGDGYVQPFNMPVALVVVKALLVSGSDPVSRLSRASIMFH

SEQ ID NO: 117464 - protein, 184 aa, Oryza sativa
  Clone ID: PAT_MRT4530_20867C.1.pep
MASGVGGTSSASARACLLHGCLVSLPPPPPPALEDARNHRHTTCPRLPPVRRAPPRRHLTHKREGSEWSLALTASASPRIMAATTAPSLPGYEVSGAAAAATRLHGSPGSVGAFLAVLAAVVAVTVLSCVVGQACAARAEGPDERYDCAGLAGRRWWLRRWRREPRRPVRPAAEEEVEVKQPAA

SEQ ID NO: 117465 - protein, 669 aa, Oryza sativa
  Clone ID: PAT_MRT4530_20868C.1.pep
MEYTSSEDDELVEGYMDVEDDTGTSNTDQGTGLMPSEMRSILPRPSSVGNGRLMAADGLGTNDDPCLGMEFESDGAARAFYNAYALRLGFGIRVARSRSERRKGVELLIMKRFVCLKEGHHKKKDAEPSDKKKRKRLSIRDGCPAMMEVVRRGPEKWVITKLVLEHTHVILSPDRVREVQLRRLSGKCAEHDNQLQELRRNVFGDTDAQGLFNYLKRMQSENSGFFYSIQVDSKNCVSNAVWADARARMSYTYFGDAVYFDTTYSKNENMLPFAAFTGVNHHGDTVPFGCALVLDRTESSYTWLFETWLTAVGRRLPFSFTTDEGKAIASAVAKVFPQCFHRLCRWRILSRCKKKLSDDYVRFPNLHDELRRCINECYTEVAFDMFWGTILDKYGLRENSWLRSIFEARHRWVPAYLTTSSFFAELTLTQRGETIGRFFRNNFSTRVPLDEFTTKFDQHIDNLYVHETQKDLGSSHPEQILKTNIALEKQARSIYTNAVFEIFQTELFEALQHYAVKVHQDGPYSKYYVDRDDPPTRHTVFYNVAEKKAWCDCCRYAFSAILCRHVLGVFILAGIMVLPETCIAKRWTKRAKTGPELIGHNLENGNCYMDSSTSRYNDLIHDAIKCAEKGAVSADNFRVAKEILRKAFMEIKCLGEKLTDDDLQQVDSR

SEQ ID NO: 117466 - protein, 139 aa, Oryza sativa
  Clone ID: PAT_MRT4530_20869C.1.pep
FDGFRMASSVAGSVTRRPPPVLLACRSRPNNRRLIRLLPLLFAVVVLLALLPPCVHGARALNDAKEAKVAEASDQTTTTTHAAAAAVARWSVTVREGGGGGGHGSGHAGAGHGHGSGHGRPEPAEHHTGRRSAAAGSVR

SEQ ID NO: 117467 - protein, 68 aa, Oryza sativa
  Clone ID: PAT_MRT4530_2086C.1.pep
SIHVLFHVTSSPKREGKGSEPTQQRPDWIISNSLSSYDHNYSGSYYFLIQRRMLIYIAIEGFGTYERL

SEQ ID NO: 117468 - protein, 88 aa, Oryza sativa
  Clone ID: PAT_MRT4530_20870C.1.pep
FLAKCCDSSQNRIFRCPMKTIFNGLEDRSWLRKNHSTLIALRLLKSFEFLCSNLKYRHEQNEIAMDSSWFSHCNGQVRYLKSLCIIPN

SEQ ID NO: 117469 - protein, 148 aa, Oryza sativa
  Clone ID: PAT_MRT4530_20871C.1.pep
VEWGGARAGGRERRVNVSTTTVTGDSLHWLNDVDVGRGSEQGGAGVGVPLAWEKPAGEEGPNRERDREKGGRKKGKKEIMIPAARPRHEMTTRSQIQPLPFRRTRMDAALAASSCQAVTDAIRDIYAQDMEKLNFEQLYRIVFFFVPD

SEQ ID NO: 117470 - protein, 66 aa, Oryza sativa
  Clone ID: PAT_MRT4530_20872C.1.pep
MRRSGESKVGKAVVARSTETASEVDGDDKVGKMMTTTERTVAQEDDDNVTTVRAGAWEGDDDFSGP

SEQ ID NO: 117471 - protein, 116 aa, Oryza sativa
  Clone ID: PAT_MRT4530_20873C.1.pep
MPDVISAPDAETTGGGGSSPHVEKLRKMLFRRMLVGVNDGRYFLGLFHCVDKQGNILLQDAVEYRTSARRRSPSSPSSSPAEQRGLGLILIPAACRSSCHVDCAVEESMSLLSLDR

SEQ ID NO: 117472 - protein, 342 aa, Oryza sativa
  Clone ID: PAT_MRT4530_20874C.1.pep
DAWGAASEAMAMMLRLQRGPAEVQMELRQFRRFADEKMALDAAEIDHLRAALARRARHLARLRSTLREYRHTCLRLGIPLAEGDQADELALDDGFVLEGEDGDGAGYYPELRCYDGEYYYEDGQKEGEEEDDPVVVDLERRIYLLEHDHKNHGVELCLEEEEGAPLYADEPLPDSSEQELNSVYVDEALPEGTVQERNQCSDDDDELPESPAARNGSEEEGSDSDGGRSGSGSYRVYTIDKVHQGATAPAARVLENYQDGEVEPDIKKLYMRLEALEADRESMRQALVAMHSEKAQLVLLREIAQQLAQDATPANTGGFGVVPTVHHFPGKQDGFRDQRFRE

SEQ ID NO: 117473 - protein, 102 aa, Oryza sativa
  Clone ID: PAT_MRT4530_20875C.1.pep
MTASFPAMASSSSSLVTVTHPAPIENIRIEAWGLDQGRRWYLVQEKKEVFLAHRGMTIGGGVNEAAQHCSCGTGSWRWARLGATIMVKDTVVVEADGTSCQR

SEQ ID NO: 117474 - protein, 94 aa, Oryza sativa
  unsure (1)..(94): unsure at all Xaa locations
  Clone ID: PAT_MRT4530_20876C.1.pep
MTVVMVGMVGNTLQPSLGLHLNYLAKTWIQRRQGRFGRTRGRPNQPTFRLAASSVAPLYRLVNFGPVXRVNSEFLAHSCRSLILDIVRLIYLLC

SEQ ID NO: 117475 - protein, 400 aa, Oryza sativa
  Clone ID: PAT_MRT4530_20877C.1.pep
MAGEGRSHEAGSLGVGAGCDLGLLFVRRREERTTEERALLGLTYELDYKGNICAVGMVYQSGVKDNKINLADAKAICLMECPIPAADGLNFVCDYPEGDIRLSIDDWINRDYDYFEFLAPDMRNSSLQLQGPCYPVIFPSVNVYWSCQFIARASNVSLKHWQQMGGINIDENILIDKTIHKAINSKSSVLKRYVADIGKSWPVLIVCGGLLPLFLSVIWLLLIRYFVAAMPWITVVVFNALVISVTMFFYIKVVMTVVMIIAFLTSIAIIRRILIATPVLKVAAKVIGEVQALIIFPVVPYFILAIFYMFWFSATLHLFSSGQVLRNDCNTDCCSYDLKLGKVNCDNCCGYSIHYTPHIGIAILFHLFGCYWATQFFIACSSTVIAGSVASYYWARGEIS

SEQ ID NO: 117476 - protein, 719 aa, Oryza sativa
  Clone ID: PAT_MRT4530_20878C.1.pep
MGGPLGAIIGRHPAAAGGGGEDGIIRHNRRCRDLAFLVLFAAFWVAMIVNSSFGFNQGNPLRLTYELDYKGNICGSRHGDPDLHELDVRYWMNPNQVYQSGVKDNKINLADAKAICLMECPIPAADGLNFVCDYPEGDIRLSIDDWINRDYDYFEFLAPDMRNSSLQLQGPCYPVIFPSVNVYWSCQFIARASNVSLKHWQQMGGINIDENILIDKTIHKAINSKSSVLKRYVADIGKSWPVLIVCGGLLPLFLSVIWLLLIRYFVAAMPWITVVLFNALVISVTMFFYIKAGWLGNDPLTVVIGESDPYVHITGREISHLHAATVVMTVVMIIAFLSSIAIIRRILIATPVLKVAAKVIGEVQALIIFPVVPYFIFAIFYMFWFSATLHLFSSGQVLRNDCNTDCCSYDLKLGKVNCDNCCGYSIHYTPHIGIAILFHLFGCYWATQFFIACSSTVIAGSVASYYWARGEISHDIPFVTVVSSLKRLLRYSLGSVAIGSLVVSAVEWVRFILECLRRKLKLFDSARESCFGKMTSSSSQCCLGCIDWTLKSVNRNAYIMIAITGKGFFKASVLATGLIMNNILRIGKVNVIGDVILFLGKLCVSLFCALFAFLMLDTHKYKSAHNKISSPLVPVVVSTFPLLRPKGVCIYSDAATLQVSWALGFIVAKLFFQVVEMSIDTIILSFCQDSEEHQGNAQYAPPLLVETLDEQSELHRLTQ

SEQ ID NO: 117477 - protein, 678 aa, Oryza sativa
  Clone ID: PAT_MRT4530_20879C.1.pep
MAGEGRSHEAGSLDVGAGCDLGLLFVRRREERTTEERALLGLTYELDYKGNICGSRHGDPDLHELDVRYWMNPNQVYQSGVKDNKINLADAKAICLMECPIPAADGLNFVCDYPEGDIRLSIDDWINRDYDYFEFLTPDMRNSSLQLQGPCYPVIFPSVNVYWSCQFIARASNVSLKHWQQMGGINIDENILIDKTIHKAINSKSSVLKRYVADIGKSWPVLIVCGGLLPLFLSVIWLLLIRYFVAAMPWITVVLFNALVISVTMFFYIKAGWLGNDPLTVVIGESDPYVHITGREISHLHAATVVMTVVMIIAFLSSIAIIRRILIATPVLKVAAKVIGEVQALIIFPVVPYFILAIFYMFWFSATLHLFSSGQVLRNDCNTDCCSYDLKLGKVNCDNCCGYSIHYTPHIGIAILFHLFGCYWATQFFIACSSTVIAGSVASYYWARGEISHDIPFVTVVSSLKRLLRYSLGSVAIGSLVVSAVEWVRFILECLRRKLKLFDSARESCFGKMTSSSSQCCLGCIDWTLKSVNRNAYIMIAITGKGFFKASVLATGLIMNNILRIGKVNVIGDVILFLGKLCVSLFCALFAFLMLDTHKYKSAHNKISSPLVPVVVSWALGFIVAKLFFQVVEMSIDTIILSFCQDSEEHQGNAQYAPPLLVETLDEQSELHRLTQGP

SEQ ID NO: 117478 - protein, 49 aa, Oryza sativa
  Clone ID: PAT_MRT4530_2087C.1.pep
MVNAAIKPQFQTNPSRVFRLYEPADNDQGSGSDQGSGSDSYRPCSLTAT

SEQ ID NO: 117479 - protein, 711 aa, Oryza sativa
  Clone ID: PAT_MRT4530_20880C.1.pep
MGGPLGAIIGRHPAAAGGGGGDELGGVGGGGGGDGIIRHNRRCRDLAFLVLFAAFWVAMIVNSSFGFNQGNPLRLTYELDYKGNICGSRHGDPDLHELDVRYWMNPNQVYQSGVKDNKINLADAKAICLMECPMPAADGLNFVCDYPEGDIRLSVDDWIDRDYDYFEFLTPDMRNSSLQLQGPCYPVIFPSVNVYWSCQFIARASNVSLKHWQQMGGINIDENILIDKTIHKAINSKSSVLKRYVADIGKSWPVLIVCGGLLPLFLSVIWLLLIRYFVVATPWITVVVFNALVISVTMFFYIKAGWLGNDPLTVVIGESDPYVHITGREISHLHAATVVMTVVMIIAFLTSIAIIRRILIATPVLKVAAKVIGEVQALIIFPVVPYFILAIFYMFWFSATLHLFSSGQVLRNDCNTDCCSYDLKLGKVNCDNCCGYSIHYTPHIGIAILFHLFGCYWATQFFIACSSTVIAGSVASYYWARGEISHDIPFVTVVSSMKRLLRYSLGSVAIGSLVVSAVEWVRFILECLRRKLKLVDSARESCFGKMTSSSSQCCLGCIDWTLKSVNRNAYIMIAITGKGFFKASVLATGLIMNNILRIGKVNVIGDVILFLGKLCVSLFCALFAFLMLDTHKYKSAHNKISSPLVPVVVSWALGFIVAKLFFQVVEMSIDTIILSFCQDAEEHQGNAQYAPPLLMETLDEQSELQRLTQGP

SEQ ID NO: 117480 - protein, 70 aa, Oryza sativa
  Clone ID: PAT_MRT4530_20881C.1.pep
FYIPREKVLLKIYMCGTFYNWAELDGPIGRSILQRITSSSFCCTNYAQGILHNNEEIAVKKLTRKRLREV

SEQ ID NO: 117481 - protein, 87 aa, Oryza sativa
  Clone ID: PAT_MRT4530_20882C.1.pep
DKTFSRCLMGKLLTTDSGCAFSYIQDERETTLIVANSSQEPSMSKAISGEEAADRRGRRRRRGASPKRRASCGAPRSNRGGSPIWRG

SEQ ID NO: 117482 - protein, 151 aa, Oryza sativa
  Clone ID: PAT_MRT4530_20883C.1.pep
MWPADVTRATNPFENRRFKYKKLKFITDGFKTTIGKGGFGPVYIGYLENGTPVAVKMRSQTSSQGNTEFLAEARVHHRNRVSLIGYCKDKKHLALVYEYMDGGSLADHLKAISSILLNSEQLADSIFFFFTGLEYMHRSCSPPLISITIDP

SEQ ID NO: 117483 - protein, 41 aa, Oryza sativa
  unsure (1)..(41): unsure at all Xaa locations
  Clone ID: PAT_MRT4530_20884C.1.pep
SFFLSLNSKLEVSPRVCAFNKPHTCLLTQPXLPDTRTHGED

SEQ ID NO: 117484 - protein, 101 aa, Oryza sativa
  Clone ID: PAT_MRT4530_20885C.1.pep
GDDLSGPSPPSPPLRPCARLPPHSSPPSAALPSTLPSAACRHPPLRLLPPSPPPARLLPPATVLMARSHTPPRAAAARPLPTTERAGEGRRVSRRGEGEEV

SEQ ID NO: 117485 - protein, 65 aa, Oryza sativa
  Clone ID: PAT_MRT4530_20886C.1.pep
NSYQKYPSLPWDFVSSILGKIKKLPRQSNDLFGPIISAQRTLLRVAPAELRGLIRPPCPVQNKFN

SEQ ID NO: 117486 - protein, 211 aa, Oryza sativa
  unsure (1)..(211): unsure at all Xaa locations
  Clone ID: PAT_MRT4530_20887C.1.pep
GSGDRGSASRSRARRRTARSAAPGLGKGEATVQGHALAEPEPRASPRPXSPDPPPPLLFTADGHEEGRRRGTAAVMAPAARSGEPAPGSGKLVRAVVGGGGRWRRAIRRHRCSTLPPDPPPPLLNATSRSAAAAAPCHHQSSSAADGELAAERGEEKPSRGREGRGEAVSHRRGEGRSWRAPPERGGISPAGWSRHRWRWRRGLEERVGRV

SEQ ID NO: 117487 - protein, 59 aa, Oryza sativa
  unsure (1)..(59): unsure at all Xaa locations
  Clone ID: PAT_MRT4530_20888C.1.pep
YYDKEKDHRHLGRIXXGGAARAGAPGGANIARAAAAAAGVAVIGVVEVQRPRALDLELV

SEQ ID NO: 117488 - protein, 85 aa, Oryza sativa
  unsure (1)..(85): unsure at all Xaa locations
  Clone ID: PAT_MRT4530_20889C.1.pep
YQVEXWNTAKXXKXGPNISQNLMVTVXWNRXGAPRXPLAILCVXMTRDAVIHNSSPHXISIXXSKLCFRXGXNLXEPFHXPQAII

SEQ ID NO: 117489 - protein, 58 aa, Oryza sativa
  unsure (1)..(58): unsure at all Xaa locations
  Clone ID: PAT_MRT4530_2088C.1.pep
LALTVADMAKDEPMMSAASYFWSNTLNAFLXANPVNMNVKNKFSFKTRSIGGWICFIS

SEQ ID NO: 117490 - protein, 64 aa, Oryza sativa
  Clone ID: PAT_MRT4530_20890C.1.pep
VESLQVFRARDSFIQDLWILVLTFELKIKKAKWYQKIFQLHIPAYGVSLCAMEFRAVCSRSSSM

SEQ ID NO: 117491 - protein, 85 aa, Oryza sativa
  Clone ID: PAT_MRT4530_20891C.1.pep
IAGLFYRMVGIGNAKQLHVSHIRYPAFNSPVSNYSHVHRAFGYLFYTREVSSHEIIAGSIHSHEDARCKTVAGSEARPKTSETNP

SEQ ID NO: 117492 - protein, 68 aa, Oryza sativa
  Clone ID: PAT_MRT4530_20892C.1.pep
DLSLLKVSHDADMRNLMADLTLKENRRGELNLTSMATPHYEPQTSGGGPQPTAHRRCDSAKIGRKRKS

SEQ ID NO: 117493 - protein, 266 aa, Oryza sativa
  Clone ID: PAT_MRT4530_20893C.1.pep
GIQVFDAKLVELYNAVSPAADAQQIEQKPASRGVPCLDPCPLVVMGGYSSGRLDRHENPVISLYRHAVDSRAVLIGVEEGLDDLGLLHDGRPYLGANMYIDIHLAAICWTSTSTTAQLRRRRQPTRLKLDYEGVIDSWARDGASPWFHGERPRFDPSESWPDFPAGSRGGLGAAVTAVTGGEREARVSRYREKRRTRLFAKKIRYEVRKLNAEKRPRMKGRFVKRAAALPPLPLPRHQHPPPPPPRALPPVPMMLAPRGAHGRYRF

SEQ ID NO: 117494 - protein, 105 aa, Oryza sativa
  unsure (1)..(105): unsure at all Xaa locations
  Clone ID: PAT_MRT4530_20894C.1.pep
PVNAGVFPEHKYEIVRFIQRGGHLCXTGNGVNDALALKKADFGIAVSDATDTARGAANIARASAEEGRHLHRRLXRDGRREGARLRGTHAESACAICDETEACGF

SEQ ID NO: 117495 - protein, 108 aa, Oryza sativa
  unsure (1)..(108): unsure at all Xaa locations
  Clone ID: PAT_MRT4530_20895C.1.pep
RGGGSEWGEDPGHQYTTPQPSLTAWRTCGAARLIXSIAHDRIVTGLSLVTSDRTGGGAPTFRPVRGGVGAGGMTRVSPVSGGRRRWAPLEDGRLLSFRAKARKVVRSK

SEQ ID NO: 117496 - protein, 70 aa, Oryza sativa
  Clone ID: PAT_MRT4530_20896C.1.pep
VLCTKYTYNLINHWSNTQNLTFRNIMCPIIFNGGNNIQLGLHIGLTYTSRYVYCSSLQTIFKHLNPTHAS

SEQ ID NO: 117497 - protein, 86 aa, Oryza sativa
  Clone ID: PAT_MRT4530_20897C.1.pep
IALTGGTWGPPQVPVKYSGVPPWGPVWPMWGPIVKVGHEVLCRGSGARIKKGDYLRGMFCKKVVWSINGVCRLFPKKKKKTPPRFG

SEQ ID NO: 117498 - protein, 129 aa, Oryza sativa
  Clone ID: PAT_MRT4530_20898C.1.pep
FFFGYETPGMFAVSLHNQIHSDMNRCPMSYYHIRSDNIGESMMYPMLMYPERWLFEHSNSSSNGPEDDRQLSRSASREGSSRSVLAVRLDRRPAQSNYELFNCNNLIYAIGAGITGCGQTCLQWILVGI

SEQ ID NO: 117499 - protein, 453 aa, Oryza sativa
  Clone ID: PAT_MRT4530_20899C.1.pep
MAQYRVERQHQHDSDSAGIAAAEDEEEGSEVSRHRPISTLACSIQMSQSKEVRYTARSITPPADRNGTSKSKSPTPVRRSTSRSPPPKKSDSRSPPPRRRSTSRSPRPRRHGRSRSRSRDRSRSRSRDDDLRNPGNNLYVTGLSTRVTEEDLEKFFSKEGKVQSCHVVLDPRTKESRGFAFVTMDSVDDARRCIKYLHRTVLEGRLVTVEKDHHPRDPTIRMGYYNGPTRYRYYWSIMICIERFWLDCDVIGSYLKRCIGKLQPCNVRMEKDLFSACSNGVLTPRADFLNFQFIWLKELGRELLHLENIVAAEALKEVPGAHHLTGLAEGSDLAQEIVRGTAHAPGIAAGTALARGIAAGTALARGIAAGTARAQGIVGAALHMTEILTGGVETGPGHRLPTGTTKRTSKFSLRVFVGLDFCFRDIIEYRCELNGSVSDSVVWSLLAAWLKFG

SEQ ID NO: 117500 - protein, 404 aa, Oryza sativa
  unsure (1)..(404): unsure at all Xaa locations
  Clone ID: PAT_MRT4530_2089C.1.pep
SKLAAHLSHQIAIPSLAHPNQYFXGPIGNSDPTEFINAETNRVPFRLANPSLNHWTNTFESWPTTNKNWPEWYNRVSASKQTHWEELGIAKSLALTVADMAKDEPMMSAASYFWSNTLNAFLFNQGPMTPTLLDVTMLTGLDITSSANPVNMNVKNKFSFKTRSIGGWICFISMNMGIGPVTSREHTAFLLMWSEKFLFCGPSYGPTTNWQHVVEALEEKKQFPLGKFLLGYLYQTLNLASARIASGSAINTGGPWWLLQTWLNLHTTRVVDRPALTKAEFPRSQPIIDEDGQEITTRRCMSFGEAASTYAGSKLLAELFKDWFGNFYDGFPKDSRIWFAYENFANFELPADFRFDEINSDKFEKSREVFSTAISPCILPVGIHQGRNIQISYEARTSSSSARH

SEQ ID NO: 117501 - protein, 713 aa, Oryza sativa
  unsure (1)..(713): unsure at all Xaa locations
  Clone ID: PAT_MRT4530_208C.1.pep
MEMGMTPEQIYGQNVYVPATANPYPYGYTEVGSPTEWYNNQSSLGYDGQDIYFPGFQTEGTQCMYYAAPDNGSVHPSYSPYPINSSFIVDGSYLPLEYVGDAADQTCQIVPSPYYVPTILPYAHDNVLGNTTAPLHPPVYVPTLPSYTVTSTNHALPSVPPVATKNDIIANPPIQSTIVASKQFLDHASDPKVQLRNPIPLKKELADGSMMPVKYPHTSQAFSNFPERRSAAKHSPQEKFSVNNGSGFVGSNVQRWAAAEKFEPNSNLSGRIGSASPKMKLSNVDGLGGADKPCGQKSSAIIAKSYTSRLSVGDPEGTIVIRCNQYNSNDLRVDYPFAKFFVIKSIGEDDVHKSIKYGVWSSSSSGNSKLDIAFKDANRIAKRNSTKCPVFLFFSVNGSGLFCGMAEMVGPVDFHKDMDFWCQDKWTGSFPVRWHIVKDVPNYTLQHILLQNNENKPVTHSRDTQEIPYVPGISMLKILKAIKVKECLLDDFMKYEEDEARSKHYFRRSKLSHNAPDFVPVAQRRKDVTDVRQPKSGNVLIDRTPVIQNMSVKPQGSNAIKPQDQCLQVVEKQASDDGKENRHQENRNVRQANDKVVKTGTKQPQASTVKTSVDGKQQYWKKVEFPRQNPNSAVHGSSKAHEKHLNESKAPEKHSNGANCSSATVSLKTAREETIVARVSSLAITSAISYQNSSVDVVKIGXSCQVLVNKANV

SEQ ID NO: 117502 - protein, 81 aa, Oryza sativa
  Clone ID: PAT_MRT4530_20900C.1.pep
IPIHYLFDGGFYSGGWLHLTSIQIIIDLYTQKLIKLQISINFNANSTGSLHNTNSYFYTPIIPEASIFLIFPLHTVLNHQY

SEQ ID NO: 117503 - protein, 576 aa, Oryza sativa
  unsure (1)..(576): unsure at all Xaa locations
  Clone ID: PAT_MRT4530_20901C.1.pep
HHVEQALPTHLNYSALDAKVSPPPXLPRRWAVPSCAAVNPAAGQPDTPADPTPSRPPSPPVPRKRSSYTSDQAVTHSSLWQALKRDMLTSSWGGAAPASGPRTSAAQEDRXHGGPSPHVATGARPPRGRPRSARADRAADGSGGQGYWRGRDRPGRPWRGGSARPPAAAAGGTGRRXRQRGKKRREEGSSPRAATARWHQGSGRRRHGSRRKRGRAHRRTGKRMSSEFPATGSGGRGSSXSMRSRGRRRHRAGWTGVAAGGGKRQWRLGFLVGWCFGGGFGEGKRMLGXVGCGNAMGGGGTSGRGGARQREAAGGSGGGDXLGFTVERAARGWKGRTEWMPGRGMTRRIFWRRRRNAAATGAAGSGGWRHGSERRTRGLARGERERARGGREGGGNGRGEHGGAFYSLGMAGSSPREARSAGDVGRLHGGGVGRLGVDFCGQSGGKGGGGGGRGVDRVNTRAGEGRRAGEVATWGRQHGGGWGDGRLGKKMTVANAGNFGNLKIHHAENSQTHSSVSLLISSLAKAKSKPSQTFRGTLQPWVLTGDALSSRRLLSPRVTNTIEDLLAMNSSAQRME

SEQ ID NO: 117504 - protein, 69 aa, Oryza sativa
  Clone ID: PAT_MRT4530_20902C.1.pep
GVRTVYILPDINIKPFRGKETGRPNTIPKGNSIHGNGTDDEHLGLDGWSEGLHDFERDTGHEPYLDKKI

SEQ ID NO: 117505 - protein, 66 aa, Oryza sativa
  Clone ID: PAT_MRT4530_20903C.1.pep
GFFPEVPRCEFFPPQWIPQHMPFRKNVMIRSWRLRHRCGPSCPSQQNMGHVERVEQIQRQNKCRTP

SEQ ID NO: 117506 - protein, 78 aa, Oryza sativa
  Clone ID: PAT_MRT4530_20904C.1.pep
GFQEDKPTKNPPFLVKQTNKTATDFGRGKKTPPYSRGGGGAKNFFFFKNYLFGGNWVFFFFFGKTGIVSLGNWENRNF

SEQ ID NO: 117507 - protein, 196 aa, Oryza sativa
  Clone ID: PAT_MRT4530_20905C.1.pep
LYCLHVNNTDAELGGGVRQRVSSCEVEGNDGVFSTQESVNVFDFRVPAGIGLKMARHGGTASSIFSRGDSVFIGSTEGRLQIKGGLKSRVQQYSLRKGKLVATYELPDFNAHFHHSSITQVWGNSNLVLAACGMGLFAFDAFKEDGQQTYSFDRGATLGVKKAIGFDDLYCPTFDYSSSRVLLVSRDRPAQWRYLS

SEQ ID NO: 117508 - protein, 63 aa, Oryza sativa
  Clone ID: PAT_MRT4530_20906C.1.pep
FCSNSLMQNVQLCRLFSNKLLIHSWTKKGYQLVKNNRILSTGMYMLRSNWSPAMTKPTQQDST

SEQ ID NO: 117509 - protein, 489 aa, Oryza sativa
  Clone ID: PAT_MRT4530_20907C.1.pep
MEDEATSVAAPLLRPRGGVDAEAVKQQLWPAGARVAGEWWVESKKLWRVVGPAIFQRIALYGINVVSQAFIGHMGDLELAAFSIASTVVAGFNFGFLLGMASALETLCGQAFGAKKYHMLGVYLQRSWLVLLMFAVALTPTYVLMEDLLLLIGQPADLASLAGKMSVWLLPQHFAMAMLLPLTRFLQSQLKNWVTAVTAGVALALHLVITYLLVNTLHLGLLGAVAAANVAWWIVVLGQLVYVVGGWCPLSWKGFSMEAFADFWEFIKLSSASGVMLCLENWYYRVLVLLTGYLNNAEIAVDALSICLTINGWEMMIPFGFLAATGVRVANELGAGSGKGARFAIVVSVTTSVAIGLVFWCLIIAYNDKIALLFSSSKVVLDAVSDLSVLLAFTVLLNSVQPVLSGVAIGSGWQALVAYVNVGSYYLVGVPIGAILGWPLHFGVGGIWSGLIGGTAVQTLILAYLTISCDWDEEAKKASTRMEVWASSK

SEQ ID NO: 117510 - protein, 121 aa, Oryza sativa
  Clone ID: PAT_MRT4530_20908C.1.pep
MPTPAGGLCCGVPSLPTYNYKSLLKWRRQSEEEEIGDRKSNHPIQDSKSGWINRVIEMSSPGGVNEWEDSPGEMESEAASAVGMGMMEVDADDRHPPSSSLPIDADFFNSFPDDFDDQDLA

SEQ ID NO: 117511 - protein, 139 aa, Oryza sativa
  Clone ID: PAT_MRT4530_20909C.1.pep
MANSASGLAVNDECKFKFQELKTRRGFRFIVFKIDDKAMEIKVERLGQTAEGYEDFAATLPADECRYAVYDLDFVTDENCQKSKIFFFSWSPDTARTRSKMLYASSKDRFRRELDGIQCEIQATDPSEMSLDIIRARAH

SEQ ID NO: 117512 - protein, 351 aa, Oryza sativa
  Clone ID: PAT_MRT4530_2090C.1.pep
MTKIPFESSNASVRAAWKNVVDCLLKLKRFKLLPPSVVDQDGGASTVSSSTERLGHRAKSESGVIFPSSHRGAGTSRHVFGMIGRFSQFLSLDAGGESLLFMGSEFENNLKIIQQCRIGSIFTESEKLPDESVQNLGRALIFAAAGKGQKFSTPVEEEETVGFCWDLIVLVSSANVHRFTTFWPQLHDCFTVVSQLPLFSPCPFAEKAIVALFRIAVRLLSGGGGVDRMAEELVVTRFNYAACIEAAFGFAALKISPLDISTKILQLMADSVNWLILWHKSGYSNPGNTWSSSSSSSSSVVAAAATMMMMEDASRMGNLATSMFIKLAEALRKTSLVRREEIRNQAVAKLG

SEQ ID NO: 117513 - protein, 523 aa, Oryza sativa
  Clone ID: PAT_MRT4530_20910C.1.pep
MAGRRSSPPRRTMSMGSGSLPRRPTAAAGGAGSMLPGLSRSMTMGGGGVGGERTVRRLRLSKALTVPESTTVLEACRRMAARRADAALLTDSNALLCGILTDKDIATRVIARELKIEETPAWKVMTRHPVFVPSETLAVEALHKMVQGKFRHLPVVENGEVIAMLDIAKCLYDAIARIERASDKGKAAAIASAVDAAAGNDPTASSMVEAFKEQMLRPSLSTITTAESTVVIVSPGDSVLTATQKMVEVHASSAVVAVGNKAQGILTSRDILMRMIAKNLPADSTPVEKVMTLDPECATVDMPILDALRIMQERKFLHLPVMDRDGSIVSILDVIDITHAAFSIRGIEVADDVGHPQRAVVLVQAPGQARTDAPVQLWYYTSTRTVPVFVQCFHFWLAEVQSLTPLITCILQRLGPDLDRDHLPQILYEDEDRDKVVLASDDDLTAAGLKLYLDYSGSSGVRRKSVVPSVGVGGGGGGRSSGGSTAVMDLSSRDAWAAAYSGVAAGAALVTGLGLMAYLRRAS

SEQ ID NO: 117514 - protein, 387 aa, Oryza sativa
  Clone ID: PAT_MRT4530_20911C.1.pep
GIPGSTHASAVFVPSETLAVEALHKMVQGKFRHLPVVENGEVIAMLDIAKCLYDAIARIERASDKGKAAAIASAVDAAAGNDPTASSMVEAFKEQMLRPSLSTITTAESTVVIVSPGDSVLTATQKMVEVHASSAVVAVGNKAQGILTSRDILMRMIAKNLPADSTPVEKVMTLDPECATVDMPILDALRIMQERKFLHLPVMDRDGSIVSILDVIDITHAAFSIVEGNGDGAVNDDAAISMVQRFWDSAMALGPLDDEIESQSQISEASRSQMMSDIHNEQSFSFKLQDRRGRMHRFSCEVQSLTPLITCILQRLGPDLDRDHLPQILYEDEDRDKVVLASDDDLTAAVDHARLAGWKGLKLYLDYSGSSGVRRKSVVPSVGVGGG

SEQ ID NO: 117515 - protein, 111 aa, Oryza sativa
  Clone ID: PAT_MRT4530_20912C.1.pep
MSMGSGSLPRRPTAAAGGAGSMLPGLSRSMTMGGGGVGGERTVRRLRLSKALTVPESTTVLEACRRMAARRADAALLTDSNALLCGILTDKVTHHNYFWQNLRSIYEKLLY

SEQ ID NO: 117516 - protein, 106 aa, Oryza sativa
  unsure (1)..(106): unsure at all Xaa locations
  Clone ID: PAT_MRT4530_20913C.1.pep
VWGLYSCRYTLADRPPMVKGRFERNGEAVADGDXRKAFDSSYSCNYCACGYMDYRCGSDSSSVICXYNYNRRGCTGTRXHVVSGCDNGDWWCQPLGSIPDEFGVKR

SEQ ID NO: 117517 - protein, 396 aa, Oryza sativa
  unsure (1)..(396): unsure at all Xaa locations
  Clone ID: PAT_MRT4530_20914C.1.pep
RVRVCTPVHKALALEAARRGVVLLKNDARLLPLRAPTVASAAVIGHNANDILALLGNYYGLPCETTTPFGGIQKYVKSAKFLPGCSSAACDVAATDQATALAKSSDYVFLVMGLSQKQEQEGLDRTSLLLPGKQQALITAVATASKRPVILILLTGGPVDITFAQTNPKIGAILWAGYPGQAGGQAIADVLFGEFNPSGKLPVTWYPEEFTKFTMTDMRMRPDPATGYPGRSYRFYKGKTVYKFGYGLSYSKFACRIVSGAGNSSSYGKAALAGLRAATTPEGDAVYRVDEIGDDRCERLRFPVMVEVQNXHGPMDGKHTVLMFVRWSSTDGGRPVRQLIGFRNQHLKVGEKKKLKMEISPCEHLSRARVDGEKVIDRGSHFLMVEEDELEIRFQD

SEQ ID NO: 117518 - protein, 122 aa, Oryza sativa
  unsure (1)..(122): unsure at all Xaa locations
  Clone ID: PAT_MRT4530_20915C.1.pep
IYFXXMVXXXGXHXPWXXLPSPCSRXTTLXGXLQGXCSFXNQEPCXXINLGYFTLLTXSXXSTMNRLFPXGXTRXECGXSPSXKSHRVGXXIXGPVTXYWNKETXSXXVSHSPXXLLTPMTT

SEQ ID NO: 117519 - protein, 98 aa, Oryza sativa
  unsure (1)..(98): unsure at all Xaa locations
  Clone ID: PAT_MRT4530_20916C.1.pep
MRMFDVNEMLLSNLPYYADHRYRNKRIGGAPIPSTRSALPTLXEGHGRRWHALRRVLRGEGASDDGMLCAECSGKDVASAMVQSSLEWRSLSAVQNHR

SEQ ID NO: 117520 - protein, 82 aa, Oryza sativa
  Clone ID: PAT_MRT4530_20917C.1.pep
ARGPLFFFFFFFFFFFFFLTGEPDTNISISEGLKIFYITTADDSMMKYSHRMGQMRFKQSITVTSDNKNRGIPNLQQWRKTP

SEQ ID NO: 117521 - protein, 365 aa, Oryza sativa
  Clone ID: PAT_MRT4530_20918C.1.pep
MDDDDRKEKMQKLMPLPMRIGQQSLFGKEETAPKPHEPNKVVYCTAYAGGDLVPPFSEFYLQMFVGLLPLVDLFCRTFVVRHAPKSKMSSLLELIGCVTFTARPIQEFLHIPMKDKWDEWHQKWVYISVESPRMPHPPCCLHDGPAVIDQRNTTRLALEPSFLVDHGIGEGQGHRVHDSRRFPSLEIGTPEPEEPCLVALTRSHPDDLEELGLDVLLAASLKGGSIENLGHRWAAPRWLGAGTVFGLSGVHGGEAKAGGGLLGVPRRCYRELINLGKMWLEGAAKVGARGGARSSSAFYPGATVHAKHRRQGKIGDAQAGDDYGAPRGIFRREDDALNRSKAVEGLVQLGPEPIRSWHALALVRA

SEQ ID NO: 117522 - protein, 66 aa, Oryza sativa
  Clone ID: PAT_MRT4530_20919C.1.pep
MVSVQELAGNHDATQDLEGEAPAPHSQFLAAQGDVTARTQEGNGNGGVDGVWEDAVEIGPRSVDWA

SEQ ID NO: 117523 - protein, 201 aa, Oryza sativa
  Clone ID: PAT_MRT4530_2091C.1.pep
MSKYGTIPTSSSSSSSGAAPPPLPLGGGGGASPLDFFSRAKARGATALATRRPWRELADPHALGLPPSLADAYLRVRANLAHYAMNYAIVVLAVVFLSLLWHPASLIVFLVCMVAWLVLYFLRDEPIVLFGRVVGDGAVLAALAAVTLVLLLLTGATANIVSSLLIGVLLVVLHAALHKAEENVDDEVGRWYTPVPPVSAH

SEQ ID NO: 117524 - protein, 366 aa, Oryza sativa
  unsure (1)..(366): unsure at all Xaa locations
  Clone ID: PAT_MRT4530_20920C.1.pep
MPVRRRQTRRRETGAAERYREMGISAALSWPWDYPTACGEIVALLRIGSSSSSLIFGYIVFPLAAAAAARTQGGGSARDLFIRREYGSTVVQFLVADRSRSSSSPSMAWRSGFGEEDAVTAGESGLELSLGLPAYFSSSKPSEGSTAAPAFALQYNGTTASKPXAAPVVGWPPVRSFRRTRVRSPPASLCLLRCSPRRPTPRGCFTAGSDTTSSTVFATGHRPRLLPRRCHRLLSRVAPAASSPTMPPPSSLSPRSGGLLPSNATALLSPASPVGLCTHRFTSPKERGGERVRVMTWITLTCGAHSTLSSLFSLSLSLSSPLFLTAERRGAATGNEGRGRKAYRRRRRWRRRWRRTARHTARRGGT

SEQ ID NO: 117525 - protein, 86 aa, Oryza sativa
  Clone ID: PAT_MRT4530_20921C.1.pep
MDLSSSLSTILGLFLSCVQMLCKRLLRHVISKADYKMDQNERLLCRCIDAIIAGRRQDRKDVTAKMGCKGWIASQLGSVKLVRITS

SEQ ID NO: 117526 - protein, 231 aa, Oryza sativa
  Clone ID: PAT_MRT4530_20922C.1.pep
MAAQIRIIMKSFMSQANKVQGVIPYAQKIGLPESRSLYTVLRSPHIDKKSREQFSMHVKKQFLVQKAETHELQKKLFWLKRLRLLGAQYEIQISFKTRLDKMLDHVDTVYTPCLHGTDLQCLMLPRKINNYVGSFETGNVVRTSLSLIQPYLVYSKDQLFELKHNNSIIRNIEHKQGGRRSSHENEQVKASMSKGKFRQHVRFYRQWQLQLVITLYFKECWKLMSTCWKGF

SEQ ID NO: 117527 - protein, 102 aa, Oryza sativa
  Clone ID: PAT_MRT4530_20923C.1.pep
LQYNTSSPHSVALKGAPFRVFKCAYLLGFSMGRHDISPLSEARTLKTNVSSLSRSHLSHTIISPFSSPEQPSRVFSLSYRWSTLSSVPSMWRLCHLSLFPCC

SEQ ID NO: 117528 - protein, 76 aa, Oryza sativa
  Clone ID: PAT_MRT4530_20924C.1.pep
LIETERDTPKTKVWTASRPQSTRDSETISEPWTSWAQLKRSKHTHCWAPLKEPERRDQACTMLGGLPTMLGYTQAN

SEQ ID NO: 117529 - protein, 119 aa, Oryza sativa
  unsure (1)..(119): unsure at all Xaa locations
  Clone ID: PAT_MRT4530_20925C.1.pep
GEEGGVWGYSKEGDGRAHRGERCSHRGARHRSCCLHXELEATCAASLLSSPLRXTKLRRPRTSGSSVVASLLSAEPEIRRAPAVAGPSSSSAGPCPPVIGGAIADARLARKDGERRYTQ

SEQ ID NO: 117530 - protein, 144 aa, Oryza sativa
  unsure (1)..(144): unsure at all Xaa locations
  Clone ID: PAT_MRT4530_20926C.1.pep
MLRPQLNPSSSHHHTTTTSSSSSTQLYFASSSCIASXLRRPSPPSLIAGAGCRTTRRRQQGRQRVVVRCASSSAASSASEAARRGTGSSDMAPAAVVKVKAVATIKVTVEGLLNSLRPSKAIDNIRDLIGRSLFLELVSSELEA

SEQ ID NO: 117531 - protein, 103 aa, Oryza sativa
  Clone ID: PAT_MRT4530_20927C.1.pep
MDPCKFRPSSSFDTKTTPITPRPVVGRRQKATIHKQNDFKQPGERYRSWAPDRQERFIRRFAGELAHPKVSPELRAIWVNYLSQCDESLGVKIANRLNVKPSM

SEQ ID NO: 117532 - protein, 241 aa, Oryza sativa
  Clone ID: PAT_MRT4530_20928C.1.pep
MDPASVSASASGDPMAECPPAAAAAEGSDAMDCGGGGRSNARVAGVLRGFLAVQQRRAEAYSTLRRGFSEYMANGGELAFQQLCASVTAEFNDCSKQVLEMVALLSTPEICRGDLANLLKDVQAHEKEKLHLTARIQVLKKAGRPSERLVNHADCRSSNMAQHVCVHVKEITEAAGTEDAEADAEYDGALKEAIQGVQEAVTSINEHMEEVRYEIDALGAEIIGNNLAEVEEAFPDTLLIK

SEQ ID NO: 117533 - protein, 468 aa, Oryza sativa
  Clone ID: PAT_MRT4530_2092C.1.pep
DMSKNLLIGNIPTSLSNLSSLNDINLADNNLSGEIPKRLLQVSHYSYIGNHLNCGQHLISCEGNNINTGGSNNSKLKVVASIGGAVTLLVIIVLFLLWWQRMRHRPEIYVDVPGQHDHNLEFGQIKRFSLRELQIATNNFSEQNVLGKGGFGKVYKGVLSGPHGRKVAVKRLFEVEKPEGEIAFLREVELISIAVHKNILRLIGFCTTTKERLLVYPYMENLSVASRLRDIKLNEPALDWPTRVRIALGAARGLEYLHEHCNPKIIHRDVKAANVLLDGNFEAVVGDFGLAKMIDRERNTVTTGVRGTMGHIAPEYLKTGRPSVKTDIFGYGVMLLEIVTGERAVFPEFSEGDSEIMLNDQVKRLVQGGRLTDIVDHNLDTAYDLQQLEKMIQIALLCTHVEPHLRPAMSEVVQMLEGNVVPAEQWEEWQVAELARRHQHEMNQQRRLFSFSEKSLNIQEAIQLSSAR

SEQ ID NO: 117534 - protein, 330 aa, Oryza sativa
  unsure (1)..(330): unsure at all Xaa locations
  Clone ID: PAT_MRT4530_20930C.1.pep
SGSPGCRHTFFFLFDDVGIPTDYRHMDGFGVNTYTFVTRDAKARYVKFHWKPTCGVSCLMDDEATLVGGKNHSHATQDLYDSIAAGNFPEWKLFVQVIDPEEEERFDFDPLDDTKTWPEDEVPLRPVGRLVLNRNVDNFFNENEQLAFGPGLVVPGIYYSDDKMLQCRVFAYADTQRYRLGPNYLMLPVNAPKCAHHNNHYDGAMNFMHRDEEVDYYPSRHAPLRHAPPTPITPRPVVGRRQKATIHKQNDFKQPGERYRSWAPDRQERFIXPLRRRXAHPKVSPELRAIWVNYLSQCDESLGVKIANRLNVKPQHVKKLRHKNASSLVN

SEQ ID NO: 117535 - protein, 349 aa, Oryza sativa
  Clone ID: PAT_MRT4530_20931C.1.pep
MKISANFLLNNCARTYTKKKTLKKCKRELVEVVDGLVGVMMTSSNREKPDIESGYDGSSDEDSTENSRAEICPSALCFFDQIVASAQDKKVVLFLDYDGTLSPIVNDPEKAFMSSEMRATVKSVAKHFPTAIVSGRSRDKVFDFVKLTEIYYAGSHGMDILASFADSDSTIEKTKETKLFQPANEFLTMITEVSKSLIEVTKAIKGATVENNKFCVSVHYRNVDKKNWKLVAQVVNNVLKDFPSLKVSTGRKVLEVRPMINWDKGKAVEFLLRSLELDDSETVLPIYIGDDKTDEDAFKVLRERKNGCGILVSQVPKKSEAFFMLRGPSEVVILPVMLNFFAALLIMPS

SEQ ID NO: 117536 - protein, 48 aa, Oryza sativa
  unsure (1)..(48): unsure at all Xaa locations
  Clone ID: PAT_MRT4530_20932C.1.pep
XFQCKARSSKXNASGSGMVMAPGQLLEYIAALADRNQGRATSSTSPPP

SEQ ID NO: 117537 - protein, 165 aa, Oryza sativa
  Clone ID: PAT_MRT4530_20933C.1.pep
MESEPAQVHGGVNLNLRVLETSPRRRSANGGGGGAAPAAAAAVDPREAFSCNYCHRKFFSSQALGGHQNAHKLERTLAKRSRDIVMTAAVSPSPSSSSSSRAVHGFDGVAGGFFWTAPPYGHAAAAEAAEEDHDVAPPAPPPADGGCGGGRYGRNGEEIDLSLKL

SEQ ID NO: 117538 - protein, 101 aa, Oryza sativa
  unsure (1)..(101): unsure at all Xaa locations
  Clone ID: PAT_MRT4530_20934C.1.pep
RGRGNTNSSSSSGTNGLTPNTTGDGWEPGXNPNLHFISSSLQRGVHFTHTTLLTRITQPVRSVTSGDLKAFMTRHFDSRHRFTICQREGSQTNTRLGPRPY

SEQ ID NO: 117539 - protein, 129 aa, Oryza sativa
  Clone ID: PAT_MRT4530_20935C.1.pep
HASAHRPAVAFTFSALPPPPPPPLPHLPEPSFPEIATPTLPYPTHPRQDPRRRRARALGGAPAGVVAVGSAAAGAGDAALSFLRVLPGGRLMAMVRCSLARLPSPPLLSPLLAHATYLPPPPELLCCSY

SEQ ID NO: 117540 - protein, 448 aa, Oryza sativa
  Clone ID: PAT_MRT4530_20936C.1.pep
MSLKVFGIIFGNDFPWDREAYPEAVDSFWDLCISEARVPGSRTPEVPGYSSYPEVPVFITRRFRALCLDDCGLIDLGFTGAKFTWCNKQDAQSNVKVRLDRAVANGRANRGLSSILQKKESMGVIQGIRNGHLGPPISHLLFADDSIFFARSDLHSVQGLKDALQAYCKASGQKINLQKSSIFFGQNCPEEIKNSVKETLQVSVEILQDTAGKETMLKAVAQAIPTYVMSCFKLPVTTCGISQLLMAVASVKGMTESSTFFSSALLLRLGVMLFVQFPDGGLRLKARGLDEGRQRRAHRRETVIFRGEEPSPPPDLAGGEAAAGAAGSPGVGGGRQWACGGDAAMGSPEGGGGPAEETRRWARRWEVAGSPVGVSGLVDGRWRDGSKTTDRATATMADLKSAFLEYQDSSKPLVGIDHRIGREDAGTKVVVGIHKDRYASLDPQHPGV

SEQ ID NO: 117541 - protein, 153 aa, Oryza sativa
  Clone ID: PAT_MRT4530_20937C.1.pep
MERNSGVTGGVFSLKRAVLLKNSSNNTGKIEMQEAKISPWIASNSTEYLCSRRGDLRLLLIPEILLMLFIFKNKLYVRCRKRIQRSPEAWRLRLSHKVYVNTTTLKNTTTLNQQCRSWVDVAKGMADEASLWHKANPAIPALQFRREGVFSSR

SEQ ID NO: 117542 - protein, 102 aa, Oryza sativa
  Clone ID: PAT_MRT4530_20938C.1.pep
MQEPKAGAGLWEAWKGCGWEGVAVGAWGGARRKCRSRRAELGGGWHGGDAAGRARCCGRREIRLLLRSRLLPLLPQLLLHVLFPTPLQRGRVDVGNRICSLP

SEQ ID NO: 117543 - protein, 60 aa, Oryza sativa
  Clone ID: PAT_MRT4530_20939C.1.pep
EDVYKSAEAVEWVTKELGGRILRQPGPLPGLNTKIASFLDPDGWKVVWLLSSCSTIFYYC

SEQ ID NO: 117544 - protein, 1407 aa, Oryza sativa
  Clone ID: PAT_MRT4530_2093C.1.pep
MARTAAAAVSDDDDDGPPAYTVPRGPRRDPRLKDLGISCMLNTEVAALLAVIRRRPDPYSYLPPAVAAAEEATFAGLIQSLKNLRGLLFQPRHGAWRCSDPAMYLKPFLDVVQSEESPPAATGVALSSVLKILRIDVFDECSPGARDAIQAVLTAVSSCRVERIADPGAEEAVLLRVLQVLAALLRARAAPLLSDHAVCNAVNTCFQVVQHAASGRGSELLQRTARHCMHEILQAVFARLPDIPAADAADADDLSVAGFGARCMADIFNFLCTLLLNAPDMVATGDGHGAFITEEDVQLFSLVLINSAIELGGEAIGKHPKLLRLIQDDLFYHLIHYATESSPLVLSMICSTALNLYHFLRRFLKLQLEAFFMYVLLRLCGGGGGAQLQEVAIEGLISFCRQPTFVIEMYVNYDCDPMLRNVYEEVGKLLCKAAFPASSPMTTVQLQAFEGLVNMLTTIADNVEVDKAPDHAAYAVDISDYRLFWVERWDAAAAGGSGNNETWVDFVRKRKLRKKKVAIAANHYNRDEKKGMEYLRLSQLVPTPPEPRSMAFFLRYSPGLDKNKIGELLGDPEEQSLRVLKEFTETFDFTGVILDTALRTYLETFRLPGESQKIQRILEAFSERFYEQQTAEVFATKDAAFILCYSLIMLNTDLHNPQVKKKMSEDDFIRNNRAINAGKDLPREYLSELFHSISGNAITVFSQASAAAEMTPTRWADLVKRSRAIDPFTPCDFKHKLTREVFVTVSGPAVATLAAIFDYTDDEDILNQCVEGLISVARIARYGLEDVLDELLCCLCKFTTLLNPYATTEETLFTFSNELKPRMATLALFTITNRFGESVRGAWKNVVDCLLKLKRLKLLPPSLVDQEGGAGAAVSTERLGHRAKSESGVIFPSSHRGAGTSRHVSGMIGRFSQFLSLDAGGESLLSVGSEFENNLKIIQQCRIGSIFTESGKLPDESVQNLGRALIFAAGGKGQKFSTPVEEEETVGFCWDLIAVVSSANVHRFTTFWPQLHDCFAAVSQLPLFSPCPFAEKAIVALFRVAVRLLSGGGGDRMAEELVFKSINLMWKLDKEILDTCCEGISECIVKLLMEYASNVQTPIGWKTVLHLLSVTGRHPETFDQSVAAMIKLMNDGAQVVTRFNYAACIEAAFGFAALKISPLDISTRILQLMADSVNWLILWHKSGYSDPGNAWSSSSSSSSAAAMMMMEDASRMGNLATSMFIKLAEALRKTSLVRREEIRNQAVAELGRAFALAAAGELELGPTGSLACFNLVIFAMVDDLHEKTLEYSRREGAERETRSMEGTLAAATELLADVFVLFLGTLAQGAGFRTFWLGVLRRLDTCIKSDLAAGGGAGVMQELVPRMLKRMIVEMKDKGVLVAMEGDELWEITHIQIQWIAPAVMEELFPD

SEQ ID NO: 117545 - protein, 260 aa, Oryza sativa
  unsure (1)..(260): unsure at all Xaa locations
  Clone ID: PAT_MRT4530_20940C.1.pep
GKAPRDAVKSVQSPPSPSHHLPPLSPLSQISPSIATRAQFPHSIRFDSVGIPPWRAAPRSDEIEPASGCGARHGALGRVGGRVGGRVGGPGSRVGDWGVDLGEGWDWRSIPKLLSSAXCLFICSGGCFGCCDKAVRHVGQLSKSLITPDQNYTIGDELWSTTTXIEVEQSWALDQQGVGSSQGPTEFVNHGLVLSKEIRKDWTAKTRQXPETKQIREPILSWNAAYESLLGSNKPFHQPIPLHEMXDFLVDIWEQEGLYD

SEQ ID NO: 117546 - protein, 713 aa, Oryza sativa
  Clone ID: PAT_MRT4530_20941C.1.pep
MSRYHLDAAAGGAFFSKMVQGAVELIEKMVSNMGWNEERLQMRQRGMHTVKESELLAAKLDLLMKCLDDHEKRPQGTVKALDSHVTCEVCGNTGHSGNDYPETREEAMYMGNNNGYRSQGGTNGISKQAPSSDSADKEVQPEKTVPQEYCDTRLLPFPQRCRKPSVDEQFARFVEVIQKIHINVSLLDAMQVPTYTRYLKDIVNNKRPLPTTEVVKQCSNVILHKLPEKKKNQGIMPKDVFDRLNFTVLAPTPMRLQLADSSVRYPAGIAEDVSVKTRDFFIPVDFVVLDMDTGKETPLILGRPFHVNGKEEKFEFQPRTEQYSMNFMEKETTMPKNRYWKMPVEPPILAKKLEQPAQKKPPSAPKPKKVWRKKPKTPTPSPPETDVLMEDAEAPRRLLNDTDLDLVSDRKRQAYYMLSDREYAHTREYSPELLKKIGGTYRETRNMIRNEQESSSSSTPVQMYEAARYWILARRKLGDQKAPLFPTPHITIGAGGSSTSYYESWEERAFAEDSAGHLGGCIWPPRSYSCSFCGREFRSAQALGGHMNVHRRDRARLKLSGVVEDGTGGESHGMPPNQNYMIQPCPPQIGTLQHAYSPNPRSGSILAADTNPNSICDVVAYPARSLLQVAAARTALGKQVLNAPLVSSKSPSAGREHGKRETLFLGAVRLAQDHDTQDGGDDQHHEKILKLYRSSSVEELDLELRLGEAPKEQ

SEQ ID NO: 117547 - protein, 341 aa, Oryza sativa
  unsure (1)..(341): unsure at all Xaa locations
  Clone ID: PAT_MRT4530_20942C.1.pep
MGTVHKEVVKLTEQCSNVILQKLPEKKKDLGCPTITCSIGAQQFDQALCDLGASISIMPKDVFDKLNFTVLAPTPMRLQLADSSVHYLIGIRDFFIPVDFAVLDMDTGKETPLILGRPFLSTVGANIDVGMGSIRFHINRKEEKFEFQLRTEQCSMNFLEKETTMPRNRYWRTPVKPSTPAKKLEQPAQRKPPSAPKPKKVWKEKPKTPAPSPPEFXLAFSARMRRRLSRLFKGXGSSSSHHDESSTHSSADVSMKDAEAPRRLLNDTDLDLVGDRERQAYYMLSDREETRNMTKNERESSSSSTPVPMYKFANINNMMQQQHDDLQAYFRFQGFNPYQGP

SEQ ID NO: 117548 - protein, 606 aa, Oryza sativa
  Clone ID: PAT_MRT4530_20943C.1.pep
MADKTLSEFAAPSTDNVAIGPQINMGDMDFDLKSSLMTMAQASLFCGKPNEDANAHLQQFLEICSTYTIKGVSPDAIRLRLFPFSLLGRVKQWFYANRATINTWDKCSTAFLSKFFPMGNFYNGLTPVSRNHLDAAAGGTFFSKTVRGAVDLIEKMVSNMGWSEERLQTRQRGMHTVKETELLAAKPDLLMKRLDDHEKRPQGTIKALDSHVTCEVCGNTGHTRNNCPETREEAMYMGNNSSGYRPQGGQGWNQPHPYYQGGRILRQPDSSVENVKAIMMRGGINRTAKEAPSSDSADKEVQPEKTVPPEYYDTRLLPFPQRSRKPSVDEQFAHFVEVIQKIHINVPLLDAMQVVKLTEQCSNIILHKLPEKKKDPGYPTITCSIGAQQFDQALCDLGASVSVMPKDVFNKLNFTVLAPTPMRLQLADSSVRYPAGIAEDVLVKIRDFFIPVDFIVLDMDTGKETPLILGRPFLSTVGANIDMGTGSIRFHINGKEEKFEFQPRTEQSSMVRIKYEPNTQNIQVVEVEPTKMDSLLKFMQNFLEKETTMPRNRYWKTPVKTNTPDKKLEQPAQRKPFSAPKPKKVWKEKPKTPAPSPREMGGKSTN

SEQ ID NO: 117549 - protein, 883 aa, Oryza sativa
  unsure (1)..(883): unsure at all Xaa locations
  Clone ID: PAT_MRT4530_20944C.1.pep
FKLRSPTRRHFGLVYMLFMHREYRAGFISIDCGLPEKTSYVDDATKLKFTSDDAFTDAGTIHNVSSEFATPTTTTDRSLYNVRSFPAGARNCYTVPSVVPGSKYLVRAKFLYGNYDGLNKPPVFDLHLGVNFWQTVTVPSADWLGNAEVIAVVPDDFLQVCLVNTGAGTPFISGLDLRPLPSSLYAPANATQGLVLLDRRNFGASGSTVIRYPDDTYDRVWWPWSNPPAEWSDISTADKVQNTIAPVFDVPSVVMQTAITTRNSSIPIQFSWDTKPXTSIFTLYVTELELLAGNAVRQFNVTINGVIWTKAPYKPVYLSTDAMYNGDRPYRGITRYNFSLNAAGSSTLPPILNAAEAFSVISTADLATDAQDVSAITAIKAKYQVNKNWTGDPCAPKTLAWDGLTCSYAISTPPRITGVNMSYAGLSGDISSYFANLKEIKNLDLSHNNLTGSIPNVISQLQFLAVLDLTGNQLNGSIPSSLLKRTSLLFDRYGNNPNLCSNSSSCQLPQKKSNSMLAVYVAVPVVVIGAVAVFLIFFIRKKKNKCVQSHSQNGSGGSLLELHNRQFTYKDLAVITNNFQRVLGKGGFGPVYDGFLKDGTHVAVKLRDESSSQGYSEFLTEAQILTRIHHKNLVSMIGYCKDGDNMALVYEYMSEGTLQEHIANSRRRFLPWRRRLQIALESAQGLEYLHKGCNPPLIHRDVKATNILLNAMLEAKIADFGLSKAFNRNNDTHVSTNTLAGTPGYVDPEYLMTMQPTTKSDVYSFGVVLLELVTGKPALLRDLDNTSIIQWVQQHLARGNIEDVVDARMHGDHDINSVWKVVDIALKCTMQESIHRPTMTGVVAMLQECIELENRHLKDYAANSENHNSSYNTYGVDQSTNVI

SEQ ID NO: 117550 - protein, 882 aa, Oryza sativa
  Clone ID: PAT_MRT4530_20945C.1.pep
MDKPSGRVSVPCLSMEQHDESAADKPALFSISDKKAIDGDIPGLTNTNAWFTPQGWILLRQSTATFLQNPQDPQDKIHLPEGLSTRCSCQLSGKPSLPGCIVLLVEPVATNIWYCRIGDDEEWTRHDDDIGTQPLDPPMDGKDHEKVPICEIAACRGKFYFNCFFESIGVLEFTPTPVFSTIEIVDPIPGGLGVIGAAVVFLVESEDELYMICLRLDHDFAIYDMTVHRMDFLSLQWRRAYEAINVLRYPRWRMMQLSRKIRALAVLLDGRAATYLLMISTERTHRILTKRFICRTYRKSCTADVLACSLSDKPTIPGCIVLLVEPEDTIIWYCHVGEDEEWVRHEYDIGTQHLDPPMNGKDYEKVLICSIAACQGKFYFNARFHNISVLEFTPEPTFSSIAITDPMDFVGAACIFLVESESELYMVCQLLEYDFKTVYDVTVYKMDFSKHQWCIAEDIGGRTFLIAPCYFGASRSADECGLEKDCVYAIFARDKYFEVSKAAIRGASGRDSCDRLVIHRLYSATSDLVTRLQPASNPLHKRGFGSVADPTKRIGDRSALITMDKTSRVPVPCLALYLKHGADTDKPALFSISEKKAINGGDIPGLTNTNSWVTSQGWILVRDTASATTFLQNPRDFDDKIQLPHLPQDVHISSTCLLSCKPTMPGCVVLLVEPVGTIIWYCHIGDDEKWVEHDYDIGTQVLDPPLDGKDHEKVPICWIAACQGKFYFNGGFESIGVLEFSPSPTFSSIAIIDPIIGGLGVMGMASLYMVESLDELYMVCQMYDSDMKTIYDVTVYRMDFLKQQWCIAEDIGGRAFLVASCYFGASRSADECGLEKDCVYSIFARDKYFEVCKVEDGETEEYDLIEAPDSQGGMWILPVEKK

SEQ ID NO: 117551 - protein, 404 aa, Oryza sativa
  Clone ID: PAT_MRT4530_20946C.1.pep
MDKTNALRGRISSFQQTRDESIPEVWERLQEYVAACPRHGMDDWLILQNFYNGLTPMSRDHLDAAAGGAFFSKTVQGAVDLIEKMVSNMGWSKERLQTRQKPSVDEQFAHFVEVIQKIHINVPLLDAMQVPTYACYLKDILNNKRPLPTTEMVKLTEQCSNVILHKLPEKKKDPGCPTITCSIGAQQFDQALCDLGASVSVMPKGVFDKLNFTVLAPTPMRLQLADSSVRYPAGIAEDVLVNIRDFFIPVDFVVLDIDTGKVTPLILGRLFLSTTGANIDVGTGSIRFHINGKEEKFEFQPRTEQCSMVRIKYGSYPQNYQVVKVEQPKMDSLVKFMQNFLEKETTWPKNRYYRPSVKPPILAKKLEQSAQRKPLSAPKPTKVWREKPKMPAPSPPEMGRKSAK

SEQ ID NO: 117552 - protein, 432 aa, Oryza sativa
  unsure (1)..(432): unsure at all Xaa locations
  Clone ID: PAT_MRT4530_20947C.1.pep
MANKTLHEFAAPSADNVVIGPQVNIGDVDFDLNSSLITMAQASPFCGKPNEDANAHLQQFLKICSMYTIKGNFYNGLTPMSRYHLDAAAGGAFFSKMVQGAVELIEKMVSNMGWNEERLQMRQRGMHTVKESELLAAKLDLLMKCLDDHEKRPQGTVKALDSHVTCEVCGNTGHSGNDYPETREEAMYMGNNNGYRSQGGTNGISKQAPSSDSADKEVQPEKTVPQEYCDTRLLPFPQRCRKPNPEDPYQRVVVGCYASTNIHPLSQGHSQQQETAPNNXEIGAQQFDQALYDLGASVSIMPKDVFDRLNFTVLAPTPMRLQLADSSVRYPAGIAEDVSVKTRDFFIPVDFVVLDMDTGKETPLILGRPFHVNGKEEKFEFQPRTEQYSMVRIKYGPNPQNIQEVEVEPPKMDSLVKFMQNFMEKETTMPKN

SEQ ID NO: 117553 - protein, 343 aa, Oryza sativa
  Clone ID: PAT_MRT4530_20948C.1.pep
MAQASPFCGKPNEDANAHLQQFLEIYSTGWTTTRNGHKAPSRPWTHTLRVRVCGGTGHPGNDCPETREKAMYMGGTVHKEVKGGINHAHIIKELSFNKMIETQLAQLASLVPANETGRIPGQPDSSVENVKAITMRGGATGITKEAPSNDSADKEVQPEKTVPQEYCDTRLLPFLQQMRKPSVDEQFARFVEVIQKIHINMPWLDAMQVPAYARYLKDILNNKRPLPTTEVVKLTEQCSNVILHKFPEKKKDPGCPTITCSIGAQLFDQALCDLGASVSVMPKDVFDKLNFTVLAPTPMRLQQAYSSVRYGTSCMVMTGCRKELGSQGWLLEVPGGHRIEGIS

SEQ ID NO: 117554 - protein, 314 aa, Oryza sativa
  Clone ID: PAT_MRT4530_20949C.1.pep
RYWILARRKLGDQKAPLFPTPHITIGAGGSSTSYYESWEERAFAEDSAGHLGGCIWPPRSYSCSFCGREFRSAQALGGHMNVHRRDRARLKLSGVVEDGTGGESHGMPPNQKYMIQPCPPQIGTLQHAYSPNPRSGSILAADTNPNSICDVVAYPARSLLQVAAARTALGKQVLNAPLVSSKSPSAGREHGKRETLFLGAVRLAQDHDTVSSNLDLRVGKNELKITTVLGCRSRRDFMYDNDRADDEKTVEASHKKRRIDLEVNPLILTSSTSNHQQQDGGDDQHHEKILKLYRSSSVEELDLELRLGEAPKEQ

SEQ ID NO: 117555 - protein, 35 aa, Oryza sativa
  Clone ID: PAT_MRT4530_2094C.1.pep
SLVASSSTNRVTHHVSFNHGTQKSHYRDRHSQWLK

SEQ ID NO: 117556 - protein, 55 aa, Oryza sativa
  Clone ID: PAT_MRT4530_20950C.1.pep
MTSTMTAAVGLAWSGAGWLRGAGAAGLTAATTGRSATRERGKRRRRWRTTLSDGR

SEQ ID NO: 117557 - protein, 627 aa, Oryza sativa
  unsure (1)..(627): unsure at all Xaa locations
  Clone ID: PAT_MRT4530_20951C.1.pep
MANKTLREFAAPSADNVAIRLQVNIGDMDFDLKSSLITMAQANPFCGKPNEDANAHLQQFLEIYSTYTIKGVSPDVVRLRLFPFSLLGRAKXWFYANRAAVNTWDKCSTTFLSKFFPMEAWERLXEYVAACPHHWMDDWLILQNFYNGLTPMSRDHLDAAAGGAFFSKTVQGAVDLIEKMVSNMGWSEERLQTRXRGMHTVKETELLAAKLDLLMKRLDDHEKWPQGTVKALDSHVTCEVCGNTGHSGNDCPETHEEAMYMGNNNNGYLPQGGLGWNQPRPYYQGGNNNGNFSNQPSLKDLVFAQAKTTDALSKKLATNDKLASLVLTNETRRIPGQPDSSIENVKAITTRGGKSTRDPPYPNPTGINGISKEAPSKDSADKDVQPEKTVPQEYCDTRLLPFPQRIRKSSVDKHFARFIEEIQKIHINVPLLDAIQVPTYACYLKNILNNKRQLPTMEVVKLMEQCSNVILHKLPEKKKDPGCPTXTCSIGAQQFDPALCDLGASVSVMPKDVFDKLNFTVLAPTPMRLQLADSSVYYSAGIAEDVPVKIRDFFILVDFVMLDMDTGKETPLILGRTFLSTAGANIDVGMGIICFHINGKEEKFEFQPRMEQCSMIRIKLGANWGCT

SEQ ID NO: 117558 - protein, 193 aa, Oryza sativa
  unsure (1)..(193): unsure at all Xaa locations
  Clone ID: PAT_MRT4530_20952C.1.pep
APPRHACPSPPPTPRRRLKSTGAPASSTSSHPPPHRPPPPPTLPPPPPXGLTTTTKNKNNAATAAAAHRPPSRQQHKQQQQQPVIIYTHSPKVIRTSPXTSCPSCRGSPDSTAPAPRPRTRTTTPPPPPPAPTAAPTPPTTTHTRRHRRRPTPTPTSLSIRRAATANDAPLHSAGDPTARACTSLRPAAGSLR

SEQ ID NO: 117559 - protein, 43 aa, Oryza sativa
  Clone ID: PAT_MRT4530_20953C.1.pep
MQKSTMIGKELKVGARGHEGGGSAMEVVVREEEQLRGGIRGGG

SEQ ID NO: 117560 - protein, 485 aa, Oryza sativa
  unsure (1)..(485): unsure at all Xaa locations
  Clone ID: PAT_MRT4530_20954C.1.pep
MDAGDAATTRARKPVVLYPSPGMGHLVSMIELGKVFAARGLAVTVVVVDPPYGNTGATGPFLAGVTAANPAMTFHRLPKVEVPPVASKHHESLTFEVTRLSNPGLRDFLAGASPVVLIIDFFCNAALDVADELGVPAYMFYTSGAEILAFFLYLPVLHAQTTANFGEMGEELVHAPGIPSFPATHSVLPLMERDDPAYAEFLKASADLCRTQGFLVNTFRSLEPRAVETIAAGSCAPPGVSTPPVYCIGPLIKSAEVGENRSEECLAWLDTQPNGSVVFLCFGSIGLFSAEQIKEVAXAGLEASGQRFLWVVRSPPSDDPAKKFDKPPEPDLDALLPKGFLERTKGRGLVVKSWAPQRDVLAHAAVGGFVTHCGWNSVLESIVAGVPMLAWPLYAEQRMNRVFLEKEMRLAVAVEGYDDDVGEGTVKAEEVAAKVRWLMESDGGRALLERTLAAMRRAKAALRDGGESEVTLARLVESWREAASA

SEQ ID NO: 117561 - protein, 69 aa, Oryza sativa
  unsure (1)..(69): unsure at all Xaa locations
  Clone ID: PAT_MRT4530_20955C.1.pep
EAPVQRQRGGANMVASGYSXGTXLGAEIIGXFVLVYNVFXXXXPKRNXRXSXVPVLXPXXIGFAVFMVH

SEQ ID NO: 117562 - protein, 204 aa, Oryza sativa
  unsure (1)..(204): unsure at all Xaa locations
  Clone ID: PAT_MRT4530_20956C.1.pep
MGVLTILFAKGPWENVKYDTNLEGLIGPTLCFGKNHITTADRVKILTKSYFHSTHIESIAFPWEAKSKILEAIDINWEAQRHVAKDSSLIACKLWKEVDMSGSKINQYLIFWLLHRKSTIMWRMIKQPWFYEGITLVGASREILIDVVWKKVIFNDKILKAMTSNGKLKDMFAKILHSLPANYWKEVXMSGSKIMRGGDILALP

SEQ ID NO: 117563 - protein, 72 aa, Oryza sativa
  Clone ID: PAT_MRT4530_20957C.1.pep
VPPGAFICLSGVAVRYSLIIVCFSGGGKGGGHVAALFFCAFLAWNGVDPMLPLFVLSLGKKEIVLNNLNSPA

SEQ ID NO: 117564 - protein, 63 aa, Oryza sativa
  Clone ID: PAT_MRT4530_20958C.1.pep
NFRCAVPPLFRSLLFALYEYSVHHIGCASNCHMLGVYTLFIWYNLQRYVCLWWLIVMFLTFAY

SEQ ID NO: 117565 - protein, 63 aa, Oryza sativa
  Clone ID: PAT_MRT4530_20959C.1.pep
DLILCQTIKGNPHWKLTIRLLWHSMEITSTFAVNVTIPFRDSIKTLYATTTTGCEDGILHIPH

SEQ ID NO: 117566 - protein, 106 aa, Oryza sativa
  unsure (1)..(106): unsure at all Xaa locations
  Clone ID: PAT_MRT4530_2095C.1.pep
VLHIGXCNVGGXSGSXXCXIKLFGKTSPCHXPXACAAGDVXXDLXHSGSXXTEXKXRXNTVXDSTXSPPXPQVLXTRGLFPHMNSXHNXHXQGGYRQPXXEXKXPD

SEQ ID NO: 117567 - protein, 72 aa, Oryza sativa
  Clone ID: PAT_MRT4530_20960C.1.pep
DRLTRNYQQGEEQDDTLLEGPADPVLGDPIASVHDASPLLRQVPLIVDSPTEGFGTRLSLCPWGKTPSASFS

SEQ ID NO: 117568 - protein, 335 aa, Oryza sativa
  Clone ID: PAT_MRT4530_20961C.1.pep
MTTKLELMRSNYLKKLLTEIVPALAENSPEAALVVVSDPPVDDVLTYVCIDVAASDTASEGGTDQQLRRRSNKLSPSSLGSVGIMVASAAITEITGAGTTTSPAYGPYIFLLLYDKVLVFNLQQPNGLGGAAVAWASSPVANGVAKRKKCVHASCAPVGGLNAADGDSSKYVGVAQVVVRLGMLVNVELRFDLGKYSVQCMNVCYRGSWMLTKVGARSGKVWTATAAVGTSRRHRGLRVDVDGVLPTTSWKYNMSRYHGDGVGETARPDLHRGGRNARTTPAAALGARRGAPMARSRSRDDHGSSAVETPLSSSRPMTEKRRWRMAVMAVCSASP

SEQ ID NO: 117569 - protein, 435 aa, Oryza sativa
  Clone ID: PAT_MRT4530_20962C.1.pep
MMVVEGELSEVPSNRHWDVILYVHAEPYIQRRQDRFGRTTKFGRTMGWAIFGWRPPLLLLYADFSVFLINVEYDTLLQRLETRPQVVRPNDVASILRNFRARAAPLLRRVSCRSAADVVQPSARRASPPLPRRSSMDPTIPSTSRCGYEVAYTSHSHPSFQHTPAPEYTMGSARSGGASGSAHFPYMPTGDNVLNTPAWGLHIIPHDEYGLASTHHGMPAYSPRSAFVEDFFSTEPPQGEAGMDYRHAAPSVTQPTLETEAVQAPKSYESDHARARLVPVKSIHTSALSSALRFLQSLQFNTMEAPFREHLDWRRDPLAGLFPPWCDLPICACGQRCFVYPNIVDNDFIEEDRKCSYVKWIDTVRRTSIGSTITQPETTTQFIQAWMEDRCHVVTSFSQDIYGMRYFVCPNIDDNFVGNPRICAFTSWINMVSPM

SEQ ID NO: 117570 - protein, 86 aa, Oryza sativa
  unsure (1)..(86): unsure at all Xaa locations
  Clone ID: PAT_MRT4530_20963C.1.pep
HLKLLHDCRSATLSAGERKPXTITTQHLKLCLLEVQVLCLSGIISIMSSSSSRSGSINQHNAXSSFSHXEWQSPMYRPGRRVQLPA

SEQ ID NO: 117571 - protein, 89 aa, Oryza sativa
  unsure (1)..(89): unsure at all Xaa locations
  Clone ID: PAT_MRT4530_20964C.1.pep
MATTRCVCIVLCLGSVVXEGLALTQAEAARALAEYAAPPRGDYDDDAGCADCCRGFGIRGRRPPLRRNVRSLHGGTRKVPGRPYPQHHY

SEQ ID NO: 117572 - protein, 58 aa, Oryza sativa
  Clone ID: PAT_MRT4530_20965C.1.pep
STLVVMPRILFRVRALMCSRQDLPDASMCNYGCQAGHHAEFCPVSLIMEVEETAHGSL

SEQ ID NO: 117573 - protein, 73 aa, Oryza sativa
  Clone ID: PAT_MRT4530_20966C.1.pep
ASLLSKEEEHVGRKFQHPWHGSLRCLPRKRSSRHRCKVKFFPPVGVWKPWLFVFLRWPPGGGLPFPRVGLRPG

SEQ ID NO: 117574 - protein, 46 aa, Oryza sativa
  Clone ID: PAT_MRT4530_20967C.1.pep
RQNRTPPIVVIWSVLLASIFSLLWVRIDPFPIKARGPDVRQCGINF

SEQ ID NO: 117575 - protein, 117 aa, Oryza sativa
  Clone ID: PAT_MRT4530_20968C.1.pep
MAGKEAGEDGNADADVDEIERGDARRPHRGTSSLLPPPPPAVCDNKIRRSGLSADCNNKIRASGVCDIEPLKFTSAMMSWLRSLVKQSACRASAIRRHSHRHHHFSFPRSGAHPPPL

SEQ ID NO: 117576 - protein, 1055 aa, Oryza sativa
  Clone ID: PAT_MRT4530_20969C.1.pep
MEASAGLVAGSHNRNELVLIRGHEEPKPLRALSGQVCEICGDEVGRTVDGDLFVACNECGFPVCRPCYEYERREGTQNCPQCKTRYKRLKGSPRVPGDEDEEDIDDLEHEFNIDDEKQKQLQQDQDGMQNSHITEAMLHGKMSYGRGPDDGDGNSTPLPPIITGARSVPVSGEFPISNSHGHGEFSSSLHKRIHPYPVSEPGSAKWDEKKEVSWKERMDDWKSKQGIVAGGAPDPDDYDADVPLNDEARQPLSRKVSIASSKVNPYRMVIILRLVVLGFFLRYRILHPVPDAIPLWLTSIICEIWFAVSWILDQFPKWYPIDRETYLDRLSLRYEREGEPSLLSAVDLFVSTVDPLKEPPLVTANTVLSILAVDYPVDKVSCYVSDDGASMLTFESLSETAEFARKWVPFCKKFSIEPRAPEFYFSQKVDYLKDKVHPNFVQERRAMKREYEEFKVRINALVAKAQKVPAEGWIMKDGTPWPGNNTRDHPGMIQVFLGHSGGHDTEGNELPRLVYVSREKRPGFQHHKKAGAMNALIRVSAVLTNAPFMLNLDCDHYINNSKAIREAMCFLMDPQVGRKVCYVQFPQRFDGIDVHDRYANRNTVFFDINMKGLDGIQGPVYVGTGCVFRRQALYGYNPPKGPKRPKMVTCDCCPCFGRKKRKHGKDGLPEAVAADGGMDSDKEMLMSQMNFEKRFGQSAAFVTSTLMEEGGVPPSSSPAALLKEAIHVISCGYEDKTDWGLELGWIYGSITEDILTGFKMHCRGWRSVYCMPKRAAFKGSAPINLSDRLNQVLRWALGSVEIFFSRHSPLLYGYKNGNLKWLERFSYINTTIYPFTSLPLLAYCTLPAVCLLTGKFIMPPISTFASLFFIALFISIFATGILEMRWSGVSIEEWWRNEQFWVIGGVSAHLFAVVQGLLKVLAGIDTNFTVTSKATGDEDDEFAELYAFKWTTLLIPPTTLLILNIIGVVAGVSDAINNGSEAWGPLFGKLFFAFWVIVHLYPFLKGLMGRQNRTPTIVVIWSVLLASIFSLLWVRIDPFTIKARGPDVRQCGINC

SEQ ID NO: 117577 - protein, 143 aa, Oryza sativa
  unsure (1)..(143): unsure at all Xaa locations
  Clone ID: PAT_MRT4530_2096C.1.pep
RGSANXSNGGRIRCMQVWPIEGIKKFETLSYLPPLTVEDLLKXIXYLLRXKWVPCLXFNKVGXVYXRENHRSXDLQXRVWNIXKLPXFGCXDPPXXLXXXXEAKKXFXDXFFXFXXFXNFREVQLIXFXPLKTPRKKSGWQLN

SEQ ID NO: 117578 - protein, 75 aa, Oryza sativa
  unsure (1)..(75): unsure at all Xaa locations
  Clone ID: PAT_MRT4530_20970C.1.pep
KSSFLEAQTSXESXAXRNAGETAAAWQASRGEAREXAAERSSSGNXAIXXRPSPSSSXHPSVLESGLMAKVYITS

SEQ ID NO: 117579 - protein, 256 aa, Oryza sativa
  unsure (1)..(256): unsure at all Xaa locations
  Clone ID: PAT_MRT4530_20971C.1.pep
MKEESQPSLRFISIHVVGLERERVREEXDPLSPILARPAWPSYGRKPPPQKDICLERKLATGFNTSSWRYCRRRLDQAGQPGHIAVASVLPPLPPHRRYEPVVSPSLGRHRTPRRNMRRPSPRRPQPTPPTTGSQHHRELHHRPQPLLGVPRRPPPSPAAPSHRVVVRRRQLLLDARRRPPSVPAAPPSGEPLPSSRLSSADCCHRPRLLPSGRHRLTLPPTSASSRRPSAVARVVPRIVQFDPAAGVPDPAAGRL

SEQ ID NO: 117580 - protein, 291 aa, Oryza sativa
  Clone ID: PAT_MRT4530_20972C.1.pep
MASPKPFACSAIALLFAANLVSAQLSANFYDKSCPNALPTIRIAGCDGSVLLDDTPTFTGEKTAAPNNNSLRGFDVIDNIKAHIEGICPQVVSCADILAVAARESVVALGGPTWVVQLGRRDSTTASLDTANNDIPAPTFDLGDLTKSFSNKGLSATDMIALSGAHTIGQARCVNFRNRIYSETNIDTSLATSLKSNCPNTTGDNNISPLDASTPYAFDNFYYKNLLNKKGVLHSDQQLFNGGSADSQTTTYSSNMATFFTDFSAAMVKMGNINPITGSSGQIRKNCRKVN

SEQ ID NO: 117581 - protein, 136 aa, Oryza sativa
  unsure (1)..(136): unsure at all Xaa locations
  Clone ID: PAT_MRT4530_20973C.1.pep
LRRGNLLLLRRRRRPRRRRTGRSRSAPCGAWRRRRPACPRRSSPPPGWRRARPPKTPARRRRRSCSSSTRPPSGSRSRPRTRRRRAPPXRRRPQPQHLEEELVQQPRXAPPASSSSPRRRRPPQRRRRPSAAAAAT

SEQ ID NO: 117582 - protein, 90 aa, Oryza sativa
  Clone ID: PAT_MRT4530_20974C.1.pep
TLFCVYQKKNQQRRMERTGTLLFLMLIVLLGNSSIHAEEHCNSYDFAKLVCVKPLCYLNCKIFFRKHLRSYSCEGTWPQRKCVCYACDDN

SEQ ID NO: 117583 - protein, 759 aa, Oryza sativa
  Clone ID: PAT_MRT4530_20975C.1.pep
ENAVQANMELEFHRNKERFGFLKWGSTAFRNMLVVPPGSGIVHQVNLEYLARVVFNNGGILYPDSVVGTDSHTTMIDGLGVAGWGVGGIEAEAAMLGQPMSMVLPGVVGFKLTGKLRNGVTATDLVLTVTQMLRKHGVVGKFVEFYGGGMSELSLADRATIANMSPEYGATMGFFPVDGKTLDYLKLTGRSDDTVAMIESYLRANKMFVDYNQPEAERVYSSYLELNLEEVEPCLSGPKRPHDRVTLKNMKSDWLSCLDNDVGFKGFAVPKESQGKVAEFSFHGTPAKLKHGDVVIAAITSCTNTSNPNVMLGAALVAKKACELGLEVKPWIKTSLAPGSGVVKKYLDKSGLQKYLDQLGFHIVGYGCTTCIGNSGELDETVSAAISDNDIVAAAVLSGNRNFEGRVHALTRANYLASPPLVVAYALAGTVNIDFEKEPIGISKDGKEVYFRDIWPSTEEIAEVVKSSVLPDMFKSTYEAITKGNPMWNELSVSASTLYPWDPTSTYIHEPPYFKDMTMSPPGPRPVKDAYCLLNFGDSITTDHISPAGSIHPDSPAARYLKERGVERKDFNSYGSRRGNDEIMARGTFANIRLVNKFLKGEVGPKTIHIPSGEKLSVFDAATKYKNEGHDTIILAGAEYGSGSSRDWAAKGPMLQGVKAVIAKSFERIHRSNLAGMGIIPLCFKSGEDADTLGLTGHERFTVHLPANVSEIKPGQDVTVTTDNGKSFTCTLRFDTEVELAYYDNGGILPYVIRKIAEQ

SEQ ID NO: 117584 - protein, 61 aa, Oryza sativa
  Clone ID: PAT_MRT4530_20976C.1.pep
LELDAMLALRQLVCLLLSALLFFFFFFFFFFYVSLGPRFCFNTSCENPHEECQEHPDDYKS

SEQ ID NO: 117585 - protein, 417 aa, Oryza sativa
  Clone ID: PAT_MRT4530_20977C.1.pep
AEQKPKEDLISKLPDDILVPILSMCPYADAERAAAVSRRWQHLHTRLPNVRFSMSVQGLLAPLGESSKPRVQSMARTLQRRCCGGGDTVKTLHIGYRKDVPFECRYAEEFVALANATRLELGVQCARGLPDEDAGEWSLELPPATAELQLRLYWYAVRPPGLHGPGVASLRWLARNGLAVLRPESFLSGGGVVFPALEELHIVKCTLPAGGGIDITSAAMPRLRRLIVTDVAVMSAATKAGIAVLADELAELRVSCRCDTEPMATSDPAAYHLKPRFRALFTRYSCVRVRAPRLRVFEWRCCFADEVRVESVGRLSDVAVELAAGRLPRLWDEESKSLSVEDCDKLMKGILRGLLPGLRPRSWDWVQSHPVRRYRRAGRHRHGARRVTLEAGQHEGPIAMVLSLLLRQEVSGVESQS

SEQ ID NO: 117586 - protein, 57 aa, Oryza sativa
  Clone ID: PAT_MRT4530_20978C.1.pep
AATRPSVLEQRMRELVELHRWPSLRWRQVQPPYVRCRGLSPLQVCQRPDCPEAQAHA

SEQ ID NO: 117587 - protein, 112 aa, Oryza sativa
  Clone ID: PAT_MRT4530_20979C.1.pep
MSTSIKARKLELAAGSGKGDASSLPAPPLFLGREVLDQSPSPSRTHSATPPSCDRVVHDQCALPVTLHRAPRCVSRHARVGPPPDQAAEILHKGRVATSACVIPSHRESPSS

SEQ ID NO: 117588 - protein, 261 aa, Oryza sativa
  unsure (1)..(261): unsure at all Xaa locations
  Clone ID: PAT_MRT4530_2097C.1.pep
YITGHSSLDFQRIDGDNDRSENDGDSWTDQETLLLLEGIEKYNDNWNNIAEHVGTKSKAQCMYHFIRLPVEDGLLENIEVPDASVPFRAETNGYPHLDCNGXLQVGFLASAMGPRVAASCASAALSVLTVDDDSRVNSEGICSDSRGQGPHPNFRDHNGGVSSSISPEKVKHAAMCGLSAAATKAKLFADQEEREIQRLTATVINHQLKRLELKLKQFAEVETLLLKXCEQVERIRQRIASDRVRIVXTRLASPGNSLPGG

SEQ ID NO: 117589 - protein, 82 aa, Oryza sativa
  unsure (1)..(82): unsure at all Xaa locations
  Clone ID: PAT_MRT4530_20980C.1.pep
GSSRECSHADPSGPSEDCHLXGLPDIGDLLSPVPRHDILRELVEATVLAEGHHLQLLPIRGALHRLDERAVAHQSIRLYFRQ

SEQ ID NO: 117590 - protein, 46 aa, Oryza sativa
  Clone ID: PAT_MRT4530_20981C.1.pep
NSLISIPFHSTGYSSSSDNTLTKANSIYGNITDEEHLTLDGWIEGF

SEQ ID NO: 117591 - protein, 503 aa, Oryza sativa
  unsure (1)..(503): unsure at all Xaa locations
  Clone ID: PAT_MRT4530_20982C.1.pep
MHEPLYRVHKKQQPVTAQHRPRLRGEATTLGSIRGRRRGSPHETGGRFNETVKWALLKHENFDGSLWVGELAQVTSPRSPPGAPPPPEFEISRQSRLLAALSKKVIDLDELRMLAAQGVPDGAAVRPTVWKLLLGYLPSDRALWEQELAKKRSQYAAFKEEFLSNPMEIARQRELEGQGSENAGSIYNGLLHRSEVTQEEHPLSLGKTTAWNQFFEYSEIIEQIDRDVKRTHPDMHFFCGDSSFAKSNQEISNIXLIIFAKLNAGIRYVQGMNEILAPLFFVFRNDPDDKNANFAEADSFFCFMELLSGFRDNFCQKLDNSAVGIQGTLSKLSQLVAKYDGELQRYLEITTEINPQFYAFRWITLLLTQEFNFADTIHIWDTLLSDPDGPQGRSIYRDGTGESMYTNIETSVAHAYQSSRNSAVPVVEKLHRCRKATGAARLQFAAAPFLSPFRSPETTENAEAFAFPCRFLAATRPISVQGDLNLFPSLPYSCSLAAAGLVL

SEQ ID NO: 117592 - protein, 233 aa, Oryza sativa
  unsure (1)..(233): unsure at all Xaa locations
  Clone ID: PAT_MRT4530_20983C.1.pep
MATSPRSPPGAPPPPEFEISRQSRLLAALSKKVIDLDELRMLAVQGVPDGAAVRPTVWKFCXLLLGYLPSDRALWEQELAKKRSQYAAFKEEFLSNPXMEIARQQELEGQGSENAGSINNGLLHRSEVTQEEHPLSLGKTTAWNQFFEYSEIIEQIDRDVKRTHPDMHFFCGDSSFAKSNQESLKNILIIFAKLNAGIRYVQGMNEILAPLFFGFXNDPDDKMLYGNFAEADS

SEQ ID NO: 117593 - protein, 178 aa, Oryza sativa
  unsure (1)..(178): unsure at all Xaa locations
  Clone ID: PAT_MRT4530_20984C.1.pep
CPFKRTPKSAATCRHPRLRLSPISACKVNMKIKVFGWLFLMDRVNTRDLLDRKHCALLSASISCSLCQENARETREHLFFDCAFSKGCWNRLGWCWNTSLEFNQMLHSQRSSFSHHGFMELFLLAAWNIXKERNGLIFQGIQPSITSCLANLKSDLSLHLIRFRESDRPLVQSWIGHL

SEQ ID NO: 117594 - protein, 41 aa, Oryza sativa
  Clone ID: PAT_MRT4530_20986C.1.pep
RSLLKKGIINLCKYTNLRITIILQKVQPPVNFTLNYHMGLT

SEQ ID NO: 117595 - protein, 50 aa, Oryza sativa
  Clone ID: PAT_MRT4530_20987C.1.pep
NLKKKTAIVVVGEPPYAEGFGDNLNLTIPEPGPTVIQTVCKSIKCVVVLN

SEQ ID NO: 117596 - protein, 59 aa, Oryza sativa
  Clone ID: PAT_MRT4530_20988C.1.pep
MASSTARCYLPRRCSPDHLCYHAQPGRRGAAARVGQRIRSCARSIHSRQPLKTEGLGMK

SEQ ID NO: 117597 - protein, 173 aa, Oryza sativa
  Clone ID: PAT_MRT4530_20989C.1.pep
MGSMGAAAHVDATQAGVHASWRGSTCLGRWYTTGALNGGEDVWLQIPEIPHRAIGPEEGEADPKTDPPKCSVISGPGTENIFRPIKHPMLMHTGYNQRGPWMRKVSTLAPDKRGDQIRTCGRHEIMHVFNVSRGSKLINDSVNRSEHPKASLPVIRPPKPIHAYALPAASKGD

SEQ ID NO: 117598 - protein, 54 aa, Oryza sativa
  unsure (1)..(54): unsure at all Xaa locations
  Clone ID: PAT_MRT4530_2098C.1.pep
RPSALHSPTELKCTDTVHNAXDRKSCLLVSCLAGIDMMTTGETSWARSRESLSN

SEQ ID NO: 117599 - protein, 185 aa, Oryza sativa
  Clone ID: PAT_MRT4530_20990C.1.pep
MEHHHHHVRPDGELRLLLLPATAPTTPRDDDGAAATLFPPAQPPRDHPQLDLSLSIRIGPPPPPPSHTRTATATAQAQAGQQKKASAAAGFDDGDGDDVRALKQQAAEQARLASAERAYAERVMELARRELEVAEREFARARAIWERARGEVHKVERMKEVAAARRIGAAALEITCHACMQRFHS

SEQ ID NO: 117600 - protein, 479 aa, Oryza sativa
  unsure (1)..(479): unsure at all Xaa locations
  Clone ID: PAT_MRT4530_20991C.1.pep
GGGGGXEDRLSALPDDILLPILAALRCARAAAHTSVLARRWRGLWARLPVLTFHRVAPAPLHAALATVAAAGGAAPALLDIDLFSHHDLDPASLLAAAAAVAPGELVVNASWSARSTELPCFDRTASIKIDVHFAGFTLPPAGVFPALETLHLENCFVDLGDMIPRCPRLRKLSIPFWNATAVTVRSPSLEEMEVYANFKITIDIVAPALKRLYLDARRGINTDAGGFTLSAPSVEDLTWNCECQAVSDSFGVRWRMWSLSFSSSCLDPHGIMQMQQMDNNGEAETAHSLSLSSSSQRRPRGGVLSLNLETNVMTGDSTRSFEQEIFRFQVTDNFSVLELDLKAQGHVYGAIVLHLLGICTSTQRLRVLLDEFLSQDSCFVSCRCDQPNNWRNQSISLTDLKEVEIRGFRGQNHEVDLLKVLLRCATVLERVTVRFSRKVTPSDCRCRELSGILEAYPSVKCSVYYLQSGKQVFICRQQ

SEQ ID NO: 117601 - protein, 345 aa, Oryza sativa
  Clone ID: PAT_MRT4530_20992C.1.pep
MMKVEGNVGFTLFDRVQIETATGNFSKTHIIGEGGQGTVYKADLDGVAVAIKQCKEIDESMKRDFVQELVILCRVNHPNIVKLLGCCLQFKGPMIVYEFVQNKTLQELLDLQRSRRFHVTLGTRLRIAAESAEALAHLHCLPHPILHGDVKPANILLAEGLIAKVSDFGCSTIDEENQAVPKGTPGYIDPDYLLEYQLTSKNDVYSFGVILLELLTGKKPLSKERRSLTSMFQEAIAHDTLRELLDIDIVDEASMRVIYRAAMLASQCLVVPGTTRPAMTVVAEELRRLALADEVQRCPQSPLVLEDLSFTDTGGSTVSIWYNGSQTSGVYNLEKKAVLSTGFAR

SEQ ID NO: 117602 - protein, 205 aa, Oryza sativa
  Clone ID: PAT_MRT4530_20993C.1.pep
MGAAATAASTGYGRRHGGGGQRRRRRGTGAAAAADGRGGGEGGDGGRTRQRRGTVMAASSKTLKHLKPPDDLGRAFPQLPEVIPPINKAEYIANVVISMQSYSHPPYTGPALGHGPHGNEGDGLGPDLARGPCLKLYEYCPYSELGSDDIMLGAQAQNMSSTSARAEGTDKRRVPWRRSCGLAGGSMRTTVTASRAAGRDWPAPL

SEQ ID NO: 117603 - protein, 176 aa, Oryza sativa
  Clone ID: PAT_MRT4530_20994C.1.pep
MEDETISIDEMLVRDGSNDITVKFDLSRVFSAKAGIHSREILPSSRSFLRRFANRLRRWPLPHAPRRTPSLKTLAHRASLFTSPANAPAPAKEHGCYERGYAARRASAAGTMRAGVGWLTPWLDERPKGYLFKQLLPPAGEFHKWVDWELPCNLTIVILGIRLNAKPNLTLQTWPH

SEQ ID NO: 117604 - protein, 50 aa, Oryza sativa
  Clone ID: PAT_MRT4530_20995C.1.pep
PLIRPRFDKSHYKVNWVTFKCRLGISGVSRVVRRGFLKSISQINNKLQCF

SEQ ID NO: 117605 - protein, 153 aa, Oryza sativa
  unsure (1)..(153): unsure at all Xaa locations
  Clone ID: PAT_MRT4530_20996C.1.pep
FCPPGGDGGGRKGGKGKAAAHRQRRWRQRWRRHRKSRRGAAQCEVTEXTDFEVEQCHGAKGVDQWTGVSSHLDCEGQFCELENLLDAKYDALITELQNKQSYMYEDADDITKESRRRLSXLAKICYCLDDVGLVLASEVFVIFIDITQDKFWF

SEQ ID NO: 117606 - protein, 102 aa, Oryza sativa
  Clone ID: PAT_MRT4530_20997C.1.pep
GFPSLFCQQHSGELLQEHGPSPKMQWFSRPFICNFMPCSFLLWILIMAASGAGISPLRGPICSKLSDGLSTCLSYKCWSNSFCFCRGVSTCMHTTCLSFSGF

SEQ ID NO: 117607 - protein, 75 aa, Oryza sativa
  Clone ID: PAT_MRT4530_20998C.1.pep
MHTTRKSVIASSRKGSLQARRPSACKPTTVKIADLRRRGGRPPAKIIFAGGHWLVRSVCKNRNRPPAKKKTSAYE

SEQ ID NO: 117608 - protein, 109 aa, Oryza sativa
  Clone ID: PAT_MRT4530_20999C.1.pep
LTGWSNITSNTAVIPVLCRKGSIPPDIESISHSSVSFFPRCRCPSVIKGRKDSNCRRRRPPCDGLVGARIHHVVAAAEDSVAVRNRPCRWRSVSVRKRPPEPSDRRWGN

SEQ ID NO: 117609 - protein, 149 aa, Oryza sativa
  unsure (1)..(149): unsure at all Xaa locations
  Clone ID: PAT_MRT4530_2099C.1.pep
RCTTRDHSLLGSTTCLARPGRRPCPVERAVVVMEADAQAKVALIRIGTRGSPLALAQAHETREKLXAAHSELAEXGAIEIVMIKTTGDMTSDKPLADIAGKGLFTKEIDDALLQGRIDLAGHSMKDVPTYVPEGTISPCNLTREDVRYA

SEQ ID NO: 117610 - protein, 703 aa, Oryza sativa
  Clone ID: PAT_MRT4530_209C.1.pep
MGMTPEQIYGQNVYVPATANPYPYGYTEVGSPTEWYNNQSSLGYDGQDIYFPGFQTEGTQCMYYAAPDNGSGHPSYSPYPINSSFIVDGSYLPLEYVGDAADQTCQIVPSPYYVPTILPYAHDNVLGNTTAPLHPPVYVPTLPSYTVTSTNHALPSVPPVATKNDVIANPPIQSTIVTSKQFLDHASDPKVQLRNPIPLKKELADGSMMPVKYPHTSQKFLISLSELTNLVLNDQAFSNFPERRSAAKHSPQEKFSVNNGSGFVGSNVQRWAAAEKFEPNSNLSGRIGSASPKMKLSNVDGLGGADKPCGQKSSAIIAKSYTSRLSVGDPEGTIVIRCNQYNSDDLRVDYPFAKFFVIKSIGEDDVHKSIKYGVWSSSSSGNSKLDIAFKDANRIAKRNSTKCPVFLFFSVNGSGLFCGMAEMVGPVDFHKDMDFWCQDKWTGSFPNNENKPVTHSRDTQEIPYVPGISMLKILKAIKVKECLLDDFMKYEEDEARSKHYFRRSKLSHNAPDFVPVAQRRKDVTDVRQPKSGNVLIDRTPVIQNMSVKPQGSNAIKPQDQCLQVVEKQASDDGKENRHQENRNVRQANDKVVKTGTKQPQASTVKTSVDSKQQYWKKVEFPGQNPNSAVHGSSKAHEKHLNESKAPEKHSNGANCSSATVSLKTAREETIVARVSSLAISYQNSSVDVVKIGSMPVLVNKANV

SEQ ID NO: 117611 - protein, 750 aa, Oryza sativa
  Clone ID: PAT_MRT4530_20C.1.pep
MATTPAAAAAAAAAGGAAILDTLGDFTSRENWDKFFALRGTGDSFEWYAEWDDLRAPLLSLLHGGGGAEGGGKAPEILVPGCGSSVLSERLYDAGFRRVTNVDFSRVLVADMLRRHARARPEMRWRVMDMTDMQFTDGSFDVILDKGGLDALMEPEAGTKLGMKYLNEAKRVLKSGGKFACLTLAESHVLALLLSEFRFGWDMSIQAIGNESSKSAFQTFMVVMVKGKMGVVHPIQSLLDQSGKFCNMKQANDVIHSLEKENTIRESYSSGVDITLSLRDLQLGAVGDLKVIIPGRRRMFILGDQGNSLYCYKAVLLDARKRTETFVYHCGVFIVPKVRAHEWLFASEEGQWHVVESAKAARLIMVFLDSRHANADMDVIKNDLSPLVKDLEPGNPEEEARIPFMMAGDGVKQREILQEVTSEITGPMVVEDVVYENNDEDQSSMTEKMFRRLIFKRNSGLVQSEALLVKDSTSDKADENNKKSPSASKKRRNQKKGPSGSKTVLRIDHSYLGSSYHSSIISGFSLIASALDSAAVAGTKVSTTVIGLGAGTLPMFLRGCLPFLDIKVVELDPLVEEVANKYFGFSTDEQLQVHLGDGIKFIDDIAVANSRATTQQLMSTGNENNAVKILIVDVDSSDVSSGLSCPHANFVEDSFLLAVKKFLDEGGLFIINLVSRSSAVREMVVSRLKAAFEHLYSLHLEEDLNEVLFATPSERCLDNNNMDEAVAKLKAMLKFPVNVESDMKKLQKLQ

SEQ ID NO: 117612 - protein, 58 aa, Oryza sativa
  Clone ID: PAT_MRT4530_21000C.1.pep
RLYLHALQIQESDELMLQIIMTSRTKSIKNDMGPRKEQIHRIYSRFFLWRILARGLKG

SEQ ID NO: 117613 - protein, 43 aa, Oryza sativa
  Clone ID: PAT_MRT4530_21001C.1.pep
SRGLCIHVSITYVLLSMGVGCGCNMYICTMSALQAWLHDYVVC

SEQ ID NO: 117614 - protein, 303 aa, Oryza sativa
  Clone ID: PAT_MRT4530_21002C.1.pep
MAGMSLQHPWAFAFGLLGNIISFMTYLAPLPTFYRIYKSKSTQGFQSVPYVVALFSAMLWIYYALLKSDECLLITINSAGCVIETIYIAVYLVYAPKKAKMFTAKLLLLVNVGVFGLILLLTLLLSAGDRRIVVLGWVCVGFSVSVFVAPLSIIRLVVRTKSVEFMPFSLSFSLTISAVVWFLYGLLIKDKYVALPNVLGFSFGVIQMGLYAMYRNSTPKAVLTKEVEAATATGDDDHSAAGVKEHVVNIAKLSAAVDVVKTREVHPVDVESPPAEAPPEEDDKAAAATAAAVAGAGEKKVAA

SEQ ID NO: 117615 - protein, 208 aa, Oryza sativa
  Clone ID: PAT_MRT4530_21003C.1.pep
MVKHNNVIPNGHFKKHWQNYVKTWFNQPARKQRRRIARQKKAVKIFPRPTSGPLRPIVQCQTLKYNMKSRAGRGFTLEELKAAGIPKKFAPTIGISVDHRRKNRSLEGLQANVQRLKTYKAKLVIFPRRARKVKAGDSTPEELATATQVQGDYMPITRGEKRSVEVVKVTDDMKAFKAYAKLRVERMNQRHIGARQKRAAEAEKEEKK

SEQ ID NO: 117616 - protein, 240 aa, Oryza sativa
  Clone ID: PAT_MRT4530_21004C.1.pep
ANGCTFSYSCTFTYEHTNITIKPGIFFREQELKEGNVVRMPDIANELTTARSSFLPRSIADRIPFKAEAVKSLFGLEPNTTLAKAVDETVAQCQSSPSKGETKRCVTSAEDMIDFAVAMLGDDIVVRSTVLPNGPGESIMIGKVKGINGGKITSSVSCHEYLFPYMVYYCHSVPKIRVYEAEILSVQTKEKINSGVAICHIDTSAWNAGHPAFVALGGKPGQNKVCHWIFNGSMTWVIAD

SEQ ID NO: 117617 - protein, 99 aa, Oryza sativa
  Clone ID: PAT_MRT4530_21005C.1.pep
MKKLWALPLEDELLLLDEEAATTMFADKDVDAAAVDRSACIRGGRAGVVTSRARMPLLFALPTSAQSAAVPLHRTLARGAAAPPCRALAFARRRFSLGF

SEQ ID NO: 117618 - protein, 133 aa, Oryza sativa
  Clone ID: PAT_MRT4530_21006C.1.pep
KLWALPLEDELLLLDEEAATTMFADKDVDAAAVDRSACIRGGRAGVVTSRCAQQPAAGRRAVATTADEPGCARARRVLDLFDLGKSFQQVGSFSEPRAHLTTVKTRGRRLLHLKKAETKSQTLKSESKITIEL

SEQ ID NO: 117619 - protein, 112 aa, Oryza sativa
  Clone ID: PAT_MRT4530_21007C.1.pep
MSARRPIEMRGALDGSGALSTAETGEESLPSRATSLVARAASAEQSVFHRRRGIWSNRPLAGQQGHGQSFHVAAALFFLVTERKGKQKGMYVPSKQGQGQLAIGLNKKGSVE

SEQ ID NO: 117620 - protein, 196 aa, Oryza sativa
  Clone ID: PAT_MRT4530_21008C.1.pep
MEARSSTGSPTWAFSSLMGNVPFAPGQPKMKGHPHRIVTRKKRAAATWKLCPWPCCPASGLFDQMPRRRWNTLCSADAALATKLVALLGRLSSPVSAVDKAPDPSSAPLISIGRLADIDAATPNVIYHELLFKILKAWTATATATRKTCHGVGAAPQTLKIDFTVRDEKGGVNEQIRRKDATRSRCMMAINSTGTN

SEQ ID NO: 117621 - protein, 82 aa, Oryza sativa
  Clone ID: PAT_MRT4530_21009C.1.pep
GAIAKEIKFYPKPGLNSKTPSGGDLTGWGLGIHPTFRGWFKLVGVWTHGPTVRVCFSWGGVQTPQNNGGGVKGPPGLLIPAL

SEQ ID NO: 117622 - protein, 812 aa, Oryza sativa
  Clone ID: PAT_MRT4530_2100C.1.pep
MPRKASSTSDSRLKWRKWKRNPTASPSPSNRSSAAAAAADHSDDSDSAAVNEDDDSAVPEDADDETLAGAEDPVLDLREAEVLPSAEPVSAFPVATRRVVNRPHPSVLAVIAAERSACAGEGSAAVAAAPVLENISYGQQQVLSGVLPDHASLATDTDKPSTYVCTPPNLMEGHGVTKQFQGRLHVVPKHSGPPALCNQKPECLSYNAALTCLRFVDWFSPGIVHRLERQVVPQFFSGKSPGNTPEKYMLLRNKVIAKYLENPSKRLAFAECQGLVANTAELYDLSRIVRFLDTWGIINYLASGSVHRGLRMATSLLREEPTGELQLLTAPLKSIDGLILFDRPKCNLQAEDISSLASNSEVVDFDAGLAELDGKIRERLSESSCSYCLQPLTSLHYQSLKEADIALCSDCFHDARYITGHSSLDFQRIDGDNDRSENDGDSWTDQETLLLLEGIEKYNDNWNNIAEHVGTKSKAQCIYHFIRLPVEDGLLENIEVPDASVPFRAETNGYPHLDCNGSTSGNLPQKIPPDNQLPFINSSNPVMSLVGFLASAMGPRVAASCASAALSVLTVDDDSRVNSEGICSDSRGQGPHPNFRDHNGGVSSSISPEKVKHAAMCGLSAAATKAKLFADQEEREIQRLTATVINHQLKRLELKLKQFAEVETLLLKECEQVERIRQRIASDRVRIVSTRLASPGNSLPGGSTSTMSSNPMSMSPRPMGVPGSMPQSSMPAPFANNMQGHGHPQMAFLQQQQQQQRQQMLSFGPRLPLSAIQTQPSPQTSNIMFNPGMPNSVTPNHHQLLRSSSGNNSSVG

SEQ ID NO: 117623 - protein, 62 aa, Oryza sativa
  Clone ID: PAT_MRT4530_21010C.1.pep
FYSNSLPPRSGPYPSNKIAFYDSLRSVALQPKLVSLLYAFFGFGRGIFHVSVKAHVGAWPGH

SEQ ID NO: 117624 - protein, 101 aa, Oryza sativa
  unsure (1)..(101): unsure at all Xaa locations
  Clone ID: PAT_MRT4530_21011C.1.pep
KETEGGGSLPLHRSKPCRRPWRRRPSPSPFESRSPPSLSRSHLSTQCRAFPLLTSEQAAAPSSSPQPPLQYASRTPAXCLGEPLFDSSHIHHLLDLTNLVH

SEQ ID NO: 117625 - protein, 91 aa, Oryza sativa
  Clone ID: PAT_MRT4530_21012C.1.pep
IFTFSNSMCFTFNSNSRTHEQSDSLKTALFDTLNLQGTMCVWVSQLHNWSPLRLRNCNQEPRSSRPAMPSSGTSLFCHSYYYQIPTKLDLV

SEQ ID NO: 117626 - protein, 608 aa, Oryza sativa
  Clone ID: PAT_MRT4530_21013C.1.pep
MAAVVPLYVAMFLAYGSVRWWGIFTPDQCSGINRFVAIFAVPLLSFHFISTNDPYAMNLRFLAADTLQKLLVLAGLAAWSRLPSRTGAPRLDWSITLFSLSTLPNTLVMGIPLLIAMYGPYSGSLMVQIVVLQCIIWYTLMLFLFEFRAARMLIADQFPDTAASIVSLHVDPDVVSLEGGHAETEAEVAADGRLHVTVRRSSVSRRSLLVTPRPSNLTGAEIYSLSSSRNPTPRGSNFNHADFFAMVGGGPPPPTPAAVRGSSFGASELYSLQSSRGPTPRQSNFDEHSARPPKPPATTTGALNHDAKELHMFVWSSSASPVSEVSGLPVFSGGGGGGALDVGAKEIHMVIPADLPQNNGSGKEHEEYGAVALGGGGGGENFSFGGGKTVDGAEAVDEEAALPDGLTKMGSSSTAELHPKVVDVDGPNAGGGAAGAGQYQMPPASVMTRLILIMVWRKLIRNPNTYSSLLGLAWSLVAFRWHVSMPAIVEKSISILSDAGLGMAMFSLGLFMALQPSIIACGKSAAVVSMAVRFLAGPAVMAAASIAIGLRGTLLHVAIVQAALPQGIVPFVFAKEYNVHPAILSTAVIFGMLIALPITLLYYILLGL

SEQ ID NO: 117627 - protein, 117 aa, Oryza sativa
  Clone ID: PAT_MRT4530_21014C.1.pep
NINIQFTFSLLCFVLWKKSWLAPNKQFFFFSLFFQIAVVPYKLALKETLYNGVIYDAESERYCMVDLQTPKICMTKATWNGSIKGKINVCIKPWPNDQSFHSSSEQCITVIGCKMQM

SEQ ID NO: 117628 - protein, 123 aa, Oryza sativa
  Clone ID: PAT_MRT4530_21015C.1.pep
GGPLAPGGLFPLYKKPREKKAPETAPRPKIPGEFGPRGRVGPGGYPFPEPPRKKKAPKRPEESPGEKKPPLLGGGPPYQGSRGGRRPPRKFPPPGWAIWGGKNLFFFPRGGFFFFQKVPAPPQ

SEQ ID NO: 117629 - protein, 417 aa, Oryza sativa
  Clone ID: PAT_MRT4530_21016C.1.pep
MTAGALRRSNAAADFDLHRHDATNKLKRRKNNLPLPKRSAAIAAPIALLLVVGLISLYDFTFADRYPNIDAASSSSSSSSSPSPATVSKCNLTRGEWVPDGEAPYYTNLTCPFIDDHQNCMKFGKPSLEYVSWRWKPDGCELPRFDAARFLEAMRGKSMAFVGDSLARNHFKSLLCLLSKVAQPVELVGAAPEIDVTGRAGQPSERDARLVGLHLDTADARWAAHVAEFDYVVLSDTNWFLRPSVYYEGGRAVGRNGAAPVTNATEIAVPRAVRAAFSTALGALAAAPGTFRGKAILRSVTPAHFENGEWNTGGDCVRTRPFRRDERALGAVEAEYLAVQVDAVREAEAAVRRNGGELRLLDITEAMDLRPDGHPSRYGHPPGGSVEGSFVVDCLHWCLPGPIDLWSELLFHMLVDQ

SEQ ID NO: 117630 - protein, 72 aa, Oryza sativa
  unsure (1)..(72): unsure at all Xaa locations
  Clone ID: PAT_MRT4530_21017C.1.pep
GSYQESFFLVRQGLVSTHGYXNMYTRGLCNQSXRSILLSAHRHPLPXGFYLSSGGIWXLTRGCIGFRSPVKG

SEQ ID NO: 117631 - protein, 75 aa, Oryza sativa
  Clone ID: PAT_MRT4530_21018C.1.pep
KVVLVPLCPILEPLHKSSMPASQLRIRQINYTMVVGSLPSDFPRRKKVRHYDVPAKMLKRKAQVWYLLLELCCNS

SEQ ID NO: 117632 - protein, 91 aa, Oryza sativa
  Clone ID: PAT_MRT4530_21019C.1.pep
GGLSLSTPLKMGPQQGPPKTEGRILAPIGFQVHKQCRRETVGWQNVLGCSLCRFCFQDHHLVKIQDQLPRFNPANFHPWPLGSSISPRLAH

SEQ ID NO: 117633 - protein, 133 aa, Oryza sativa
  unsure (1)..(133): unsure at all Xaa locations
  Clone ID: PAT_MRT4530_2101C.1.pep
ARGEGHSTCPNSGQTLADHRLVPNRALRSLISQWCGVYGLQYDSPESNEGMAECVAASCSSRAAMEANKATXRILVRMLEDGSENVKAVAAKEIRLLAKTGKQNRAFIADLGAIPLLCRLLLSNDWMAQENAV

SEQ ID NO: 117634 - protein, 617 aa, Oryza sativa
  unsure (1)..(617): unsure at all Xaa locations
  Clone ID: PAT_MRT4530_21020C.1.pep
MLPQSQSSSLQRLNHVEQRIVQLMQLAGAVMEELGNSQGPRPEKVVAHCREYMLTIKEIQTTLREEIKSACEYRPFEKSDYSARIANEISCKKVEYVLEKLDAMQTNIEKCTIRGCSGHYFPSEHAAPASPGGARCRPWPSECRWRWLRRRVASADLLVEDNDWEESIFRRFRQEVMTAGALRRSNAAADFDLHRHDATNKLKRRKNNLPLPKRSAAIAAPIALLLVVGLISLYDFTFADRYPNIDAASSSSSSSSSPSPATVSKCNLTRGXWVPDGEAPYYTNLTCPFIDDHQNCMKFGKPSLEYVSWRWKPDXCELPRFDAARFLEAMRGKSMAFVGDSLARNHFKSLLCLLSKVAQPVELVGAAPEIDVTGRAVRRDFRYDSHGFTASLFWSPFLVKANLANATLGLWDLHLDTADARWAAHVAEFDYVVLSDTNWFLRPSVYYEGGRAVGRNGAAPVTNATEIAVPRAVRAAFSTALGALAAAPGTFRGKAILRSVTPAHFENGEWNTGGDCVRTRPFRRDERALGAVEAEYLAVQVDAVREAEAAVRRNGGELRLLDITEAMDLRPDGHPSRYGHPPGGSVEGSFVVDCLHWCLPGPIDLWSELLFHMLVDQ

SEQ ID NO: 117635 - protein, 475 aa, Oryza sativa
  Clone ID: PAT_MRT4530_21021C.1.pep
MAAAAAAATVEAVGVAGGRRRRSGSVALGDLLRREASAERASASASAGAGGRERERRPSVAAGQACRAKKGEDFALLKPACERLPAGGAPFSAFALFDGHNGSGAAVYAKENILSNVMCCVPADLSGDEWLAALPRALVAGFVKTDKDFQTRGTTVTFVIIDGYVVTVASVGDSRCVLEAEGTIYHLSADHRFDASEEEVGRVTECGGEVGRLNVVGGAEIGPLRCWPGGLCLSRSIGDQDVGEFIIPVPYVKQIKLSSAGGRIIISSDGVWDALTVDTAFSCARGLPPEAAADQIVKEAIASKGLRDDTTCIVIDIIPPEKISPTVQPAKKAGKGLFKNIFYKKATSDSPCHADKDQCTQPDLVEEVFEDGCPSLSRRLDSEYPVRNMFKLFICAICQVELESGQGISIHEGLSKSGKLRPWDGPFLCHSCQEKKEAMEGKRHSRAVSSLTSILHEYYREDCYEDDTCLLVPEC

SEQ ID NO: 117636 - protein, 40 aa, Oryza sativa
  Clone ID: PAT_MRT4530_21022C.1.pep
TAPDIPGSTHRAHTRPEGSTTKRAEWCVADISLTRRGACA

SEQ ID NO: 117637 - protein, 57 aa, Oryza sativa
  Clone ID: PAT_MRT4530_21023C.1.pep
SSLVMERVFSVLFVSAATYIPITYSYSTVVWRTIFFTAVMRLVHQYIKQHPHTGSKR

SEQ ID NO: 117638 - protein, 205 aa, Oryza sativa
  Clone ID: PAT_MRT4530_21024C.1.pep
MESEADKAAAPAPAAAASVAETSDDAIQEESPAPAPSGKPGSEAAAKPEVEVQLFRRGRGPVAVFRSPLGGYTQDQLEVGDILEQHGLKSVFVFHPASRTRGVAIRFHPRNGRSLLTYVAGSTIFLDGEPKDSLLKPVTKVMIGVAAMTAVAAVLLKEGKMPEWLKESKLGNLNFPPWVLACMVIVFMRLRKRTKDAMKKFGWSS

SEQ ID NO: 117639 - protein, 148 aa, Oryza sativa
  Clone ID: PAT_MRT4530_21025C.1.pep
MNGSGLQGYSTEDGVAMDSDQHGRDGSDNGWWLCKSIHVLTALAHQRTPVQLLLFVCQNELNAPVALGRERSDTGHPEQWTVELIVVNTTVISLSHPRGNHRGNLNLAVTRGFYLNFVQNIMENSVNRTRNGAHHAMIHTRSDVDVTQ

SEQ ID NO: 117640 - protein, 181 aa, Oryza sativa
  Clone ID: PAT_MRT4530_21026C.1.pep
MAALLMNTGAVSMPFPTTRTAARRRTSRSRCQASSSGGSSNEGGGESYRGRSGRGGSTTWVTEYDLYGLLGVERSSPQSEIKAAYRSLQKRCHPDVAGAKGHDMAIVLNEVYSLLSDPAARLAYDQEQAKQSEFVGYTGKPLYSAWFGGEAEQRAVFVDEVRCVGCLKCALYANKKCAVEV

SEQ ID NO: 117641 - protein, 148 aa, Oryza sativa
  Clone ID: PAT_MRT4530_21027C.1.pep
MASKRILKELKDLQKDPPTSCSAGPVAEDMFHWQATLMGPSDSPYAGGVFLVTIHFPPDYPFKPPKVALKTKVFHPNINSNGSICLDILKEQWSPALTISKVLLSICSLLTDPNPDDPLVPEIAHMYKTDRAKYESTARSWTQKYAMG

SEQ ID NO: 117642 - protein, 134 aa, Oryza sativa
  unsure (1)..(134): unsure at all Xaa locations
  Clone ID: PAT_MRT4530_21028C.1.pep
SLPGPLGQQGVKSIFGFLGQLFGPVRPKELIFLGLDWLAPRAKNNXKSFKRFRLVKVPVAPQLKKERWRKDLKVKGRTLVAKEKPKPMDXMVLPPGQPSMLVLFWGLNSSFQLKWTQPPGWNFVKVLLLSSNVL

SEQ ID NO: 117643 - protein, 574 aa, Oryza sativa
  unsure (1)..(574): unsure at all Xaa locations
  Clone ID: PAT_MRT4530_21029C.1.pep
AGIGARAQTVSQVVSAHDGGTSSHERQGGVDGARVDDGTHRLRSLALVQDDAHRVRGRFGGVLVLGAGGVVLHRGSDEEDELAAGDGGLEGVGVVHVRLEQHQPLRRAGQLSHRRRLLLISKISPRLHGRRSVISKSFQTGSGALLVDAPMALGFGHTRIDWIISILASSSSKVILNGRAGLSFMHGRGLRQGDPLSPMLFILAIDPLQKLLAAAQEEDLLQPLHRRIARFNVALYADDAVVFTRPDKQELHTVHSILQHFGQATGMITNLTKSEVYSIRCENLDLQDILAPFPAQQKTFPCTYLGLPLHIRKLRKMDVQPLIDRFSARLPKWKGKLLNKTGRSVLIKSTLSALPTYHLTVFPLKKWAAKKMDKIRRGFLWTGADQANGGHCLVNWKKVCKPKNLGGLGITNLEFFSRSLRLRWLWYDWKADGKPWQGSTLPCDETDKQLFRASTIITLGNGGKTKFWHDRWLDGQSPKDLSPSLYKLAMWKNKTVAQELENHKWLRPLRRMNSTTEVREFILLXHLIQQVQLDEDREDDLMWKWNANGIYSANSAYKIQFTGSIQDNRANFIW

SEQ ID NO: 117644 - protein, 86 aa, Oryza sativa
  Clone ID: PAT_MRT4530_2102C.1.pep
LAILNNDDIAGDMEQATSRRRRVNQGRLYTSPTTYSSHPPPPTSKKGKKKKKEEERPPARHQQPGRGRVQYSMQAMAEFYSKGTMN

SEQ ID NO: 117645 - protein, 133 aa, Oryza sativa
  Clone ID: PAT_MRT4530_21030C.1.pep
LAFGSANDSGLCFSVHKRLILGSPDPVQNSLFCCSGMSNPALQYTMMASKIGNVQRVFIDVQEKVMSSLSTFSRTNSEDRCCKFMQLCRVECLCIAVFWPVGACLRPWGLGVNIMCVIRVDVIHLFISSDDVC

SEQ ID NO: 117646 - protein, 252 aa, Oryza sativa
  Clone ID: PAT_MRT4530_21031C.1.pep
MRDLIYTFSKWQTLPVGSGLAPILAQLLRPNKQKEKRALRLGLDIIGIFVRLLPEFVLMGFAVIQNFGTSTRWPGYLLHRFTLYLGIVSPICKMLPKDTFDNLQAKVQMCFVRIIAMSAGKPTLFAPGIVIAKKKLSCYVITDKGTFCYGSEGLYAAVFPGLNMEIVSFMLSKPKCTNPLAAVKICESGPLINEDVYTLGYQNPKVPFISWIGPAIKDILQPFMDQKNVLLEKRKPPVDTSAGASKKSKTTR

SEQ ID NO: 117647 - protein, 116 aa, Oryza sativa
  Clone ID: PAT_MRT4530_21032C.1.pep
AITTNKNLIFDMISMQQQIKTLFFLLVSTMHSPAVRYIWMDMLYIFMNYKSHSPANNNLITSNCLFSFSCSYNEEKNYWLPKVKLSKYSDSLSKPANELLRTRKMKYLFHISSNQH

SEQ ID NO: 117648 - protein, 150 aa, Oryza sativa
  unsure (1)..(150): unsure at all Xaa locations
  Clone ID: PAT_MRT4530_21033C.1.pep
FFFFTXVKLGRSLYCHCSXVHRTLXKRXQKGXGTTXXYTXXHLLXNSSRIFQPSIHTTSHARGTMCRXPKRXIKPHSSQCTSYSDHXSIGRFQGLLGXQQMPPGSSKSFNPPNTILALHTGIAFHKQFLHSQHHPLRPGILSCHSPGSAR

SEQ ID NO: 117649 - protein, 195 aa, Oryza sativa
  Clone ID: PAT_MRT4530_21034C.1.pep
MAAANKIPLLLAAAAALSLAASAVAAAPGPRRRPVRMRLYMHDVIDGPGQTAIRLIWGAGPPHASMPGRAFGDTVAVDDLVTEGPSIASAAVGRAQGTYMLSSQREAVLVVAITVALTSAGGPYNGSNLVIAGRDRVRDETRELAVVGGTGALRGAAGYVLWRTAKVWSEIHMALELDVHASVPATADDDAVATE

SEQ ID NO: 117650 - protein, 104 aa, Oryza sativa
  Clone ID: PAT_MRT4530_21035C.1.pep
WVMYAHGGSKNPAIISQGDRYIGPPNLTGKRITKQLGATEEEWKNWVWPFEEGLFMEGAYFPTSGGPIQKQFSNKDLVKPKAGSYVTRVTRFAGSIPRVAGKPW

SEQ ID NO: 117651 - protein, 406 aa, Oryza sativa
  Clone ID: PAT_MRT4530_21036C.1.pep
MGNCSPSPRRRGRPTSPSGSPPLDRTPSAKAAGGGATTTVSPYALARSPSVSAAEADGDDGVVRVYGSDGCPVAWRVRVALLYKAAAPVHFTPSEAAPLGRPVLRLSASDPELCGTADELLRHVDARFEGKPLVTPPERPARVSAAAAAAEEVAELVRLQHRSAERHLEGVAAKVAEMVKKGAKKAGKGAKVVVVEGAEVRRLGKWYGDAMEVMLEHARMEETVLFPDIQRASFPGVLDKANEQHGRHLPMMNGIKEDIKTLLTLELGSSLFQEVLVNLSVRLKALQDHTKEHFKEEERELLPRLEGVRRMQREEGNVSDKSNTAWASEAMGTMEMTHSKLFPFFMTGLLPQEAMQYLDLVCRCTKNTRHLVSMLRSLAERLEDANPAIIHNNPTKLYEHLLVKSP

SEQ ID NO: 117652 - protein, 129 aa, Oryza sativa
  Clone ID: PAT_MRT4530_21037C.1.pep
MAVGRQSAQCGSGLREPRQCQANGERRPAREPATPAGEVVCGNMGRSRRRSGWTPSMAASRLGFTVSGGERGTREWQGKLPPSRRQPGTATSTRPLRAPPAAAVLPPAAKLPPHRAGLLSLRPLPRWAD

SEQ ID NO: 117653 - protein, 646 aa, Oryza sativa
  Clone ID: PAT_MRT4530_21038C.1.pep
MDSTPAPAAAAAETPTTAPAFEECLRLLRGERDEQKLAGLLVAANLCRAGDAASVVEVYRAVGPRFLRRLLNTGLGKVEGGKEEDREAYLRLSVTVLSGLARFPEVAADEGVVSTVPLIAEIVSKSSDLAITEECFELLSLIAIASDGGAHTFCEPGVMDMLFLQISNFPDGSRCLELAIHLMQLLVHKIRIDNMTVEKLQGMTSMVTSLARLFAVLHTTVKFEALHMLTALLSQKESPLHDALRSVPSMIWKCQIRVGITAVLQNRVVSSEKLQALLLAECMMSILGENWLSEEYKVPDDQNMMPVDKFVLLVLESARIEVSVLLNELAYLKYESSKNSQRDDAISQKERNLAILFSLIERIIKMISNASSGEGAVCQTIRESTIMKAITGLNETVGLVLDFLQDAKDHGQRKGDDLLAAVRIVGSYLAEAPYACKEKIRHLLEFIFSVEGQDESSSFHSICFMLPMLSQITMEADGCRILASFGGYKMVIDCLIKMIEQNGMMIDTGNMFLACDTIINFLSNMKNAHIQMGSCFVGLLKALVSWTGTADDSSVIITASCLCTLVLDLTTEEFLLSSSDFDSKTLEKLSKLIARSLHQGIPDDDIEQSNQKQIILSGKYYTLFNINWKKEKKSSHLICYRLQEVV

SEQ ID NO: 117654 - protein, 57 aa, Oryza sativa
  Clone ID: PAT_MRT4530_21039C.1.pep
TREIKGLFLLGGVGRGAFAHWLIHQKYPRICRVIREMKNVRKVAYTSFWQKASLSTS

SEQ ID NO: 117655 - protein, 98 aa, Oryza sativa
  Clone ID: PAT_MRT4530_2103C.1.pep
KNIYTLGLLIDQMASRRFSRGLMAAWGIRPLQRMSRTGSPRRHLPARLTTTPKVAVAPPSRMQVRTERTGGVPASRMGELQRACHALSRLVVVVVGIL

SEQ ID NO: 117656 - protein, 127 aa, Oryza sativa
  Clone ID: PAT_MRT4530_21040C.1.pep
QLFGPTTTTTPARPRATPGPPPVGPTFIRAHPQSLAEWAPRRHGMARHPHVGVPLSRRRRPRTSGAPAAASLLAAEAEYEARAGGRWPVKLTSWASAPDLCKKMAMVDERQPAPDLREKMASAAAGL

SEQ ID NO: 117657 - protein, 753 aa, Oryza sativa
  unsure (1)..(753): unsure at all Xaa locations
  Clone ID: PAT_MRT4530_21041C.1.pep
MAHLVGGGGGGGGGVEEEGDARRRRRAGMMPAAAAAAGGMSLGGGGGGRSRCVRSNDTIVVVLGGGGSSGMEEARGSMEAQEPNSAAKKTLMTPRSRSGVADSRSIPFSRSHPPRRQPPPPPASRQLAARHRQAPPPPASHHRQAPPPRHRRSGAAAASGHSSATVHRRNSTPPTPWPSVPPGYESSTISICPTTRRNAEPNGRRFLRQQSLRRGPSDRPVRLLQRHVIRRXPRPLQRLPLPMPLPRRRHDVDLRLPLVGVEAAPQNTNNVIDKHPISQNIIDKREFYKILSYKARIDNGQRPAAAGHVSRWRIHVTGMLLTRQFQSMNFLAGSEWGPHPKARIKRQRRPTESPGKSPRRRQLFGPTTTTTPARPRATPGPPPVGPTFIRAHPQSLAEWAPRRHGMARHPHVGVPLSWIGFAVARSRGRTKGKNKNYPLELSPTRNPTRRRRPRTSGAPAAASLLAAEAEYEARAGGRWPVKLTSWASAPDLCKKMAMVDERQPAPDLREKMASAAAGLIVLERHPQEDGESACSFPIYVDNKPEKRAHAGVLRPTTCCCADEEEDARPASLTGLPPPPELRRAGVLPLPRSDLLRCYADKEVEARLASSTGWPPPRASAASPELHRWPTGERMFFEGVRNKGELHISNQYTSASIYSSSPPQAKADRNDPPTNGPPRSRKRHKAVIFYYENGEEQPFYPTLTKQVLKPERASATHIFGFSFNANKTRFLYYLPVFSRRTSLVAVDLIDASSG

SEQ ID NO: 117658 - protein, 465 aa, Oryza sativa
  Clone ID: PAT_MRT4530_21042C.1.pep
MGCFGRVRDMIKKRKGKKRPPPHEGPAPPPPPPSALAGSSHSTSTVSSSAVATSQSTEDSSAAAARPAAGWSRSSGSVSSARSIPELYEERGASSLQEFGLRELQAATRDFSRLLKIGEGGFGSVYKGVVRLPGGPAGGTEVAIKKLNPNSRQGHKQWLTEVQFLGVVEHPNLVKLIGYCAAQSERGPQRLLVYEFMSNKTLDDHLFNKAYPVLPWDIRLKIALGAAEGLLYLHEGLEVQVIYRDFKASNVLLDEEFRPKLSDFGLAREGPTADNTHVSTAVMGTYGYAAPDYVETGHLTNKSDVWSFGVVLYEILTGRRSMERNRPKNEQKLLEWVRQYPVETKRFSRIIDIRLRHNYSKQGTREIAKLANSCLAKHAKDRPTMREVVESIKQVMQHNELDGDVEASGESSPPHEVPGKPTADDVAVAAARRRMLHLAALGENANNIARRRFMLMRAAAAPTPT

SEQ ID NO: 117659 - protein, 137 aa, Oryza sativa
  Clone ID: PAT_MRT4530_21043C.1.pep
TPPRAGSAPRRRAASTRCCSSLSSPPPAPAAAPLQFAGASPPSRQRCSSPAPPAASSSARGATSATCFDDGDAPSSSSSPPHCSPSALSALLLPAPPRRRSTAPTSSSTPPPPARRRRQHRHRLLGHLSAAPPPMHG

SEQ ID NO: 117660 - protein, 51 aa, Oryza sativa
  unsure (1)..(51): unsure at all Xaa locations
  Clone ID: PAT_MRT4530_21044C.1.pep
RPRIWSDNMIERCTKLDWXKDTTLIEAIDQINXPRGHXNKPVRFALHDVYK

SEQ ID NO: 117661 - protein, 243 aa, Oryza sativa
  unsure (1)..(243): unsure at all Xaa locations
  Clone ID: PAT_MRT4530_21045C.1.pep
PRWRQPPPTLPPSPTTPFPEPXPPPPPPLPPLPPLARAXPPPMHPSLPPLPLLRESPTLPPSLAPQQLPPPPPNKRNPPSLPPDPLPHRPHWTPTVRDPLLPPTPPLPTPPITPPPPTCPPSHPPHPLFGVSTPQSPRPPDPPPPGLPXSPRAPPPPRPPCPPPDPPPHPPAPVFTRYPPRYRRPPVCRVPHPDRSLSIDAPQYPPPPMHPAPXTPPPIGTSHTSPAPTPEYPPADHPPLSPS

SEQ ID NO: 117662 - protein, 787 aa, Oryza sativa
  Clone ID: PAT_MRT4530_21047C.1.pep
MVEIVTGAISTLLPKLGEVLRKEYQLHKTVRGEIMFLMAELERMQAAILEISESDEPNKLVKLWVRDVRELSYDIEDTIDSFMVHFDKHRSFRGFIDRSLNLLTKFKIRHKIGANIRDIKSHIKEVSELRDKYKVDGVTVARPVGHQTVDSLRLQSALYKNVSELVGTKKKTDDLVSRLMEMHDDVESKRNLKVVSIVGFGGLGKTTLASVVYHKLKLEFDCGAFVSISLHPNMVGVFKNMLRQLDEKTYLNINGETWEEVQLIDELRKFLQNKRYIVVIDDIWSKSVWKTIKYVLVDNQLGSRIITTTRAVDVAEQVGGAYKLEPLSPDDSIKLFNQIIFHSEDKCHPYHLSEVSQKILKKCGGIPLAIITIASMLASKKACDIVNDYPEYYRVHDMVLDLITSLSNEEHFLTRLDGHPSLSLPKKIRRLSIQTNEEEYVKQLATISLCHLRSLTVCGQGCLSKLRRLTIYFDKWDESYEKPFIQCLSNLVSLELLEVDGTLGSTCGSLSPGPQRLQSIDMSFCTLTAFPGWMSSLCSLSSLHLILLTLGEDELQVLGSIPHLNDLYISISVNKAIHDKNKRLVIGKGCPFLCLTQFSLASSSMYVGFAQGAMQKVRDLSLYFGVSETMGQFGDFDFGLENLSSLEHVDVWMRCFGSKTGEADDAEIAIKRSLQLNPNNPTMELEKIYRDSVKSTSRYDDRKRFGIVRYRYLEVSTKTRNTRAKRKASRRERTGSSRAKRFPKKPYCRLLPVQNVEGRGSGDLLSRSLVHAGERDGVVYERRRSTE

SEQ ID NO: 117663 - protein, 1293 aa, Oryza sativa
  Clone ID: PAT_MRT4530_21048C.1.pep
MAAAAIGGMLASAAIKETTRKLGSAIGGEIKLHRDFRRDLECFRNTLESIEAVMEDAEKRSIKEKTVQLWLNRLKNASYDICDMLEEFEAKTATPAARMLSRKLFHHPKITKFTMVHKMKELRLELKDITDQYHNFGFKQGSTFSEQHVPDKRETSPKEYEAFIVGRTEQKNFILSCLFDNIKDKIIILPIYGIGGIGKTTFAKMVFNDTRLNDYSKVWVYVSQAFDLNKIRSSIMSKLSKEESQLSNQTNPAEPFGDKKIMVVLDDLWEIDQSELDRLRAILVNDVGIGSKVIVVVTTREKEIANKFCTVAPFELPPLTDDMCWTIIKQKVEFDTRPDKDQLEQVGREIALKCGGVALAAQALGYMLRSMTVNRWNTVKNSDIWNENNSEDRSNQHHNVMASLMLSCNNMSPYLRLCFAYCALFAKGQKIVKDDLIYQWISLGFVEKQGIFSIWENGENYVCHLMGMSFLQYSKSPSIVQVHQEDVTLLTMHDLVHDLARYVMVDEILDASKQGNITGRCRCRFALLNDCTKPLNSLTHSPTQVRAVRYLENEENVLRDASFSSAKYMRVLDLSGCSIQKLPDSIGHLKQLRYLKALGIKDKMIPNCITKLSKLIFLSISGSSAILTLPKSIGEMESLMYIDLSGCSGLKELPESFGKLKKLIHLDLSNCSNVTGVSESLESLINLKYLNLSYCRNIGQLPEVMGNLSKLVYLNLSSCSYMKGRLETEVLGTLTKLEYLNLSTEHFYTERLAQGSLNYLGSSIDISFLGCLNNLEHLVLSKNIYLNGVVLPDCFDTLKKLHTLDLSDCPLLSSLPASIGKADSLKFVNLNGSDLSKVPQWNKNLLTLPRFVVQPNDDGSSSNLVLLNDVNPPNLQIRCLENVRSVKEVQKIELIEKQRIKELELHWTQHVKRSMEDIDLLRELVPPRSLKKFRMEGYKDTKYPSWLMDISLYLPNLIQITMAQMPKCVRLPPLGQLPNLEELCLERMKSVVKIDEDFCGGPGPFPRLKKFTIEGMPSLEVWNTMYSCDEDSVSEFMFPNLCELEISNCPKLQLTPCPPRAKKWTIVRSDGIISSWAGNAPHTSTSCSTPLVSSLVVQQCDSPLREWRLLHHLPALNYLKIQYFGDPTISAEIIGALSTLQSLALEGIYSHQPQLPDWLGHLRSLKELKIKFFEVKATHENITRLTSLHKLSLSRCDSLTSLPLWVGDLVSLQELSISDCPNLNDLGDCMGRLTSLKRLEIKGCYEIKSLPEGIKKLTMLEYMLIFHCRELREWCELEDNKKTLAHVKQIKLR

SEQ ID NO: 117664 - protein, 1003 aa, Oryza sativa
  Clone ID: PAT_MRT4530_21049C.1.pep
MVEIVTGAISTLLPKLGEVLRKEYQLHKTVRGEIMFLMAELERMQAAILEISESDEPNKLVKLWVRDVRELSYDIEDTIDSFMVHFDKHRSFRGFIDRSLNLLTKFKIRHKIGANIRDIKSHIKEVSELRDKYKVDGVTVARPVGHQTVDSLRLQSALYKNVSELVGTKKKTDDLVSRLMEMHDDVESKRNLKVVSIVGFGGLGKTTLASVVYHKLKLEFDCGAFVSISLHPNMVGVFKNMLRQLDEKTYLNINGETWEEVQLIDELRKFLQNKRYIVVIDDIWSKSVWKTIKYVLVDNQLGSRIITTTRAVDVAEQVGGAYKLEPLSPDDSIKLFNQIIFHSEDKCHPYHLSEVSQKILKKCGGIPLAIITIASMLASKKGNQHEYWYKVYHSMGSGLEDSPDLRNMRRILSISYYDLPPHLKTCLLYLSSYPEDYLSTRETLIWKWVGEGFVETKQGSSFYQVGGEYIYELMNKGMIQPACDIVNDYPEYYRVHDMVLDLITSLSNEEHFLTRLDGHPSLSLPKKIRRLSIQTNEEEYVKQLATISLCHLRSLTVCGQGLSSLLPTLPSMCPFLRVLDFSGCDKVENQHCKDICKLFHLRYLRLYGTSISELPKEIANLQFLQVLDISITNIKELPPTFIQLKQLVYLHFPNMMRLPDGLGSLNRLQEIPNVITIDSPTMLHDLGCLSKLRRLTIYFDKWDESYEKPFIQCLSNLVSLELLEVDGTLGSTCGSLSPGPQRLQSIDMSFCTLTAFPGWMSSLCSLSSLHLILLTLGEDELQVLGSIPHLNDLYISISVNKAIHDKNKRLVIGKGCPFLCLTQFSLASSSMYVGFAQGAMQKVRDLSLYFGVSETMGQFGDFDFGLENLSSLEHVDVWMRCFGSKTGEADDAEIAIKRSLQLNPNNPTMELEKIYRDSVKSTSRYDDRKRFGIVRYRYLEVSTKTRNTRAKRKASRRERTGSSRAKRFPKNLIAAFSRCRTSKAEVPETCSPDRWCTPASEME

SEQ ID NO: 117665 - protein, 118 aa, Oryza sativa
  Clone ID: PAT_MRT4530_2104C.1.pep
MLLYGEIVMRGNAVMKGYLKNPKANAEAFAGGWYHSGDLGVKHPDGYIEVKDRMKDIIISGGENISSLEVEKVLYAHPAVLEASVVARADEQCGESPCAFVTLKEGADSSDEAAVAGD

SEQ ID NO: 117666 - protein, 45 aa, Oryza sativa
  Clone ID: PAT_MRT4530_21050C.1.pep
EWVPSGPRKKKKNPWTHPLCFLPYFSWGKLSYGVRHRPHPDPQPP

SEQ ID NO: 117667 - protein, 244 aa, Oryza sativa
  Clone ID: PAT_MRT4530_21051C.1.pep
MVSSMKLPLVDGEEQSSYDPMGEKLKMMSGKIISEEQRLVELELELEDEEEVEDEELAELITARDFRVSWEHRFTPRYSFNDTTTVCPMRYTEGPIPRYACCGDTLQIFSLQVKEAKGGLDWPLHVYGLVATRDSVDQRRNLLFRCTRDNCQILTPQDSHLLLTGPSRAVVVIDPVTFEVELKACRLQLIQSRPRSNRFNSLTPINIWMDAISKMQNEQDIFPTSIWDWKGHDMPTLVIVKYQS

SEQ ID NO: 117668 - protein, 80 aa, Oryza sativa
  Clone ID: PAT_MRT4530_21052C.1.pep
MVPPSSSQPKASTGFRQRHPKPHNPSTQRTSPDRHIVPLAAKPSPPPIAQAGSQVRQAAAIHCCTDHRPMRPWDRLSRLG

SEQ ID NO: 117669 - protein, 64 aa, Oryza sativa
  Clone ID: PAT_MRT4530_21053C.1.pep
TRHRAERQYYPLASHGIPRPPGRRYRPSLSSLSIKRGRCSSGPAPSANASWDNQLHFVSQSTPL

SEQ ID NO: 117670 - protein, 96 aa, Oryza sativa
  Clone ID: PAT_MRT4530_21054C.1.pep
EMLLSRRTPSTSLTLLSTSSMHIESPLPNSNIFIINIYSYIIYMHLQTFEEFNIFHSILTPFYVHFLTHFLILLTFSIFPSHFLFSCLQTYCINLK

SEQ ID NO: 117671 - protein, 38 aa, Oryza sativa
  Clone ID: PAT_MRT4530_21055C.1.pep
MVSSGFHADQMEHRDPPNEQLQACRPLAESEYESYLCA

SEQ ID NO: 117672 - protein, 112 aa, Oryza sativa
  Clone ID: PAT_MRT4530_21056C.1.pep
MGRDEMLRRSLVALAAAVVVTGVVTASVRKAAATYGFGILAIAGVLLPDWEFFDRDYSQWLTPMPASRRTAAEAAADREHDVWKFKPYPLRMAMLTTIYGFGLYKWWMYVSS

SEQ ID NO: 117673 - protein, 90 aa, Oryza sativa
  Clone ID: PAT_MRT4530_21057C.1.pep
PPAHRRGHAVVAEKRNRKEKKKSSYASRPGPPAAARSDPPTARRHGAAAAMSLAWGGRAFGGFSAPSSSRARQGWSLGGLRGTTRSPTPT

SEQ ID NO: 117674 - protein, 139 aa, Oryza sativa
  Clone ID: PAT_MRT4530_21058C.1.pep
MQWITTVVRSCPLCVLLLVQVTHWPNGDKELLHRRDVKYSLTKALVAFYPFAGQLGVDGAGHIQIDYTGHVPPRLRCGGVVLSLASIARASAEALLPPTETPHLYRDSDVLRPQAAHHMCHVYYARSLGPLKQRRWHMR

SEQ ID NO: 117675 - protein, 150 aa, Oryza sativa
  Clone ID: PAT_MRT4530_21059C.1.pep
MGRDEMLRRSLVALAAAVVVTGVVTASVRKAAATYGFGILAIAGVLLPDWEFFDRDYSQWLTPMPASRRTAAEAAADREHDVWKSKLAVNRYILLNYQFYPNEFKPYPLRMAMLTTIYGFGLYKWWMVERLVQRDARLISGVIVLSLQLI

SEQ ID NO: 117676 - protein, 90 aa, Oryza sativa
  Clone ID: PAT_MRT4530_2105C.1.pep
MVWGGSVVTIGHKVSPEHVSAADGMDGDEVGQDVDILYRRRLASFHGGGLRWTGSMVQEGNERPCCLVRGWGGDEVDAVVCMCSRLGKRK

SEQ ID NO: 117677 - protein, 73 aa, Oryza sativa
  unsure (1)..(73): unsure at all Xaa locations
  Clone ID: PAT_MRT4530_21060C.1.pep
SCRSYGGSGRPWDGISPCSRWYILLQNEGSXRLEIPEGPLGKLIXADCWAEPQDRPSCQEILTRLLDCEYAVS

SEQ ID NO: 117678 - protein, 43 aa, Oryza sativa
  Clone ID: PAT_MRT4530_21061C.1.pep
MAPSSSPPTPDCRIIAASGRPCHWQCQSHRYQPCHPDYNPGQI

SEQ ID NO: 117679 - protein, 124 aa, Oryza sativa
  Clone ID: PAT_MRT4530_21062C.1.pep
MGGVGQLLFPIGLSSIVPRDNPVPVYPDLEISRSTSMLVLRLLCDSRKRLTKAARRGFDTIATLVAWTIWKERNSSVFNQQQKTWAEVARAMAAEAELWRLARAAIPEFLPQPTVERSQHRIGE

SEQ ID NO: 117680 - protein, 281 aa, Oryza sativa
  unsure (1)..(281): unsure at all Xaa locations
  Clone ID: PAT_MRT4530_21063C.1.pep
PPPPPLTVSASTHLALFWEDNWLQGESIRCKAPALYAAIPARIRKKRTVAEALSDRRWIKDISGALGIQAILXVFIPVARHSCSAPHGPAGITRFQSTPIWKSLAPPRCXYFVWLVALNRCWTGDRLRRRGLPHPDRCVLCDQCDESIDHLLVACPKSRXLWWMALRAIGQTSSLPTNEVSFHLXLCDSRKRLTKAARRGFDTIATLVAWTIWKERNSSVFNQQQKTWAEVARAMAAEAELWRLARAAIPEFLPQPTVERSQHRECSGRDAAIPDSAIGRL

SEQ ID NO: 117681 - protein, 40 aa, Oryza sativa
  Clone ID: PAT_MRT4530_21064C.1.pep
WDRCFTTFLSKFFPMGKTSALRGRISSFPMSHDHLDTAAG

SEQ ID NO: 117682 - protein, 83 aa, Oryza sativa
  Clone ID: PAT_MRT4530_21065C.1.pep
VTVNIKEKGDITSYSIINYIATWLARTSQIFHLSKPCKRHVSIFLSHLWYRGIGQLRQSTQHFLVGTPVPKRSSSLWCLCHVI

SEQ ID NO: 117683 - protein, 372 aa, Oryza sativa
  Clone ID: PAT_MRT4530_21066C.1.pep
PFSFSYVLKKFPCILNWIGHTKVRRRSVVPSLHKRFLSVMVDRVFCKCAERLVEKLETSALSGKPVNMEARFSQMTLDVIGLSLFNYNFDSLTSDSPVIDAVYTALKEAELRSTDLLPYWKIDLLCKIVPRQIKAEKAVNIIRNTVEDLITKCKNIVHAFNLQIEGEEYVGEADPSILRFLLASREEDPAALRRAQAEVDRVLQGRLPRYEDLKELKYLMRCINESMRLYPHPPVLIRRAIVDDVLPGNYKIKAGQDIMISVYNIHRSPEVWDRADDFIPERFDLEGPVPNETNTEYRFIPFRGGPRKCVGDQFALLEAIVALAVVLQKMDIELVPDQKINMTTGATIHTTNGLYMNVSLRKVDREPDFALR

SEQ ID NO: 117684 - protein, 68 aa, Oryza sativa
  Clone ID: PAT_MRT4530_21067C.1.pep
FLRRDWESKGWKHWTWSPLWVGTLAMLSRSINLVIGIKFSAAVLSGKFGYGLNMSVLLVTYIYPEVIV

SEQ ID NO: 117685 - protein, 101 aa, Oryza sativa
  Clone ID: PAT_MRT4530_21068C.1.pep
MERGDELSRQLNCTYVVVPQLISYVHVPIDIIHPLTSQFVVRTRKGLLRSATVQIGWMELLAPAAAGRERDNWTRRGAMDQVPPTAWAMKGHAPALDGSGA

SEQ ID NO: 117686 - protein, 531 aa, Oryza sativa
  Clone ID: PAT_MRT4530_21069C.1.pep
MAAAAAAAVPCVPFLCPPPPPLVSPRLRRGHVRLRLRPPRSSGGGGGGGAGGDEPPITTSWVSPDWLTALSRSVATRLGGGDDSGIPVASAKLDDVRDLLGGALFLPLFKWFREEGPVYRLAAGPRDLVVVSDPAVARHVLRGYGSRYEKGLVAEVSEFLFGSGFAIAEGALWTFLVCVEEISLHFELDRTHEDSPVIDAVYTALKEAELRSTDLLPYWKIDLLCKIVPRQIKAEKAVNIIRNTVEDLITKCKKIVDAENEQIEGEEYVNEADPSILRFLLASREEVTSVQLRDDLLSMLVAGHETTGSVLTWTIYLLSKDPAALRRAQAEVDRVLQGRLPRYEDLKELKYLMRCINESMRLYPHPPVLIRRAIVDDVLPGNYKIKAGQDIMISVYNIHRSPEVWDRADDFIPERFDLEGPVPNETNTEYRFIPFSGGPRKCVGDQFALLEAIVALAVVLQKMDIELVPDQKINMTTGATIHTTNGLYMNVVNIGVQVDEARKHGYNSFIVYGYTLYAYISPRIWSAMPVL

SEQ ID NO: 117687 - protein, 548 aa, Oryza sativa
  unsure (1)..(548): unsure at all Xaa locations
  Clone ID: PAT_MRT4530_2106C.1.pep
MAAERDIDDLPRGGANYTALTPLWFLERAALAHPARASVVHGPVRYTWADTYRRCRRLASALERRFLPCYVSMETEWFFLLMLMGNGNLPNPVAVIAPNIPAVYEARFGVPMAGVVVNGVNIPSVARPRKCLTGKIAMRGQLRDEGLXLKNPKANAEXRRRVVPLRRPWGEAPRRVHRGEGPDEGHHHLRRGEHQQPGGGEGAVRAPGGAGGVGGGEGGRAVGGVAVRVQDAGVLGAQVGGVRAAAQDGDGEDQEARAEDQGQGARPRQEEQDVSSSFASALGWLLSSLCSSDKRIWVAMLLYANCSVKTDVPIICFIKKNNEMSETYGPSTVCAWKPEWDELPDDERARLHARQGIRYVGLEGLDVVDPKTMAPVPADGSTLGEIVMRGNGVMKGYLKNPRANAEAFENGWFHSGDLGVKHTDGYIEVKDRAKDIIISGGENISSLEVEKAVYQHPAVLEASVVARADEQWGESPCAFVTPKDGADSSDEAALAGDIMRFCRERLPGYWVPKSVVFGPLPKTATGKIKKHELRAKAKELGPVRKSRM

SEQ ID NO: 117688 - protein, 49 aa, Oryza sativa
  Clone ID: PAT_MRT4530_21070C.1.pep
MERTRRHLERGLEVWRISKGVQVKMEGVIETAGRVQPSAINGAGMPASH

SEQ ID NO: 117689 - protein, 68 aa, Oryza sativa
  Clone ID: PAT_MRT4530_21071C.1.pep
MGQGILAPTPLDTGRDVGALPPVQLLGTGAEQRILLRPLSLPCGGQTWASGQHAPGDPRGVTWHPEAS

SEQ ID NO: 117690 - protein, 75 aa, Oryza sativa
  unsure (1)..(75): unsure at all Xaa locations
  Clone ID: PAT_MRT4530_21072C.1.pep
LQHTIFILHLHPKQNLLHXXTYKXLIIXSXHFXNNSINFXXITXXYNSXXXLKKXLPSPYNFXXXXFIPNXXKTX

SEQ ID NO: 117691 - protein, 46 aa, Oryza sativa
  Clone ID: PAT_MRT4530_21073C.1.pep
SLPERDKCARPPLSALRRVDDPRAEFMSLGSAMGAPPENREGGPRA

SEQ ID NO: 117692 - protein, 318 aa, Oryza sativa
  unsure (1)..(318): unsure at all Xaa locations
  Clone ID: PAT_MRT4530_21074C.1.pep
MAALHHQAAAAPVTTTTDGGELRAMDLYEKLEKVGEGTYGKVYKAREKATGRIVALKKTRLPEDDEGVPPTALREVSLLRMLSQDSHVVRLLDLKQGQNKEGQTILYLVFEYMDTDLKKFIRAHRQNLQKIPVPTVKILMYQLCKGVAFCHGRGVLHRDLKPHNLLMDRKTMALKIADLGLSRSFTVPLKKYTHEILTLWYRAPEVLLGAAHYSTPVDIWSVGCIFAELATNQPLFAGDSEXLLGTPNEQVWPGVSKLPNWHEYPQWNPSKVSDLVHGLDADALDLLEKMLQYEPSKRISAKKPMEHPYFNDVNKELY

SEQ ID NO: 117693 - protein, 154 aa, Oryza sativa
  Clone ID: PAT_MRT4530_21075C.1.pep
MRRRRGPSPRAPPPSFSPRRRRRKVETKRGGQRPRAASSPRRRPREEEPRSAPPPPSRACTVLRAPDPRRHRRLRGRRRSSAPRTTPPHGSEDAAVASSRTTPGGEESRHWRWRREEGSHRPEERRAGAGGGRRGVGVSEGRRGEPAGRSGFGD

SEQ ID NO: 117694 - protein, 38 aa, Oryza sativa
  Clone ID: PAT_MRT4530_21076C.1.pep
MGEVGKLYAFGSLGTGAQSPSTAVKVACVNGPWLFGLY

SEQ ID NO: 117695 - protein, 228 aa, Oryza sativa
  Clone ID: PAT_MRT4530_21077C.1.pep
MAAWIWRATNRRLDDQIQQWAPLLPPLYPIPSLPPWKSHGSRRSGGAGSRRGGGRQSGVTAAGATTAREAEGAKQGGGERSSSNPLSAPISTMEVCVLLFLLLEPIAIVFVIFNGHNGGEAGGKRELTRCRPRQGRCQGQRAARRMANVAARAAMVMVRNRKRIKDRGKWRKTEGFKAKKTSQRDSSRTVTTRPKVVGLVRTQRALVQIFMLKDPMFCDRLIKVYVVS

SEQ ID NO: 117696 - protein, 103 aa, Oryza sativa
  Clone ID: PAT_MRT4530_21078C.1.pep
SMTAPKPAGPAGAEKNYMVKTISALAASQAHSREARLRRDGEPPNLQREQVHIGAESSRPQPPCSHALESSRSPQPPAAGPPLPSSPVGLLATRRQAAPAYPQ

SEQ ID NO: 117697 - protein, 185 aa, Oryza sativa
  Clone ID: PAT_MRT4530_21079C.1.pep
MAGRGSPIHSTGLSGCSFQRTRAAASSAPWLRCACGKAAAVNKSNTPRNPGRRWIQCGKEPKCCSLWIWEDLLNEYVEEMVAYSHAGEDDGLRDMLRQLAEEHKEERSRMQGLVEANHRQMQSIYQQLNDSKKKCEQLKKMLKEEKCSRSRQLYVMLFLLAIIMYFYVWSGSSGAMLGACGYSKS

SEQ ID NO: 117698 - protein, 101 aa, Oryza sativa
  Clone ID: PAT_MRT4530_2107C.1.pep
MPSSLALPAASSSPSLPCYDGSRPEPRRAATARAPMPLAGSGKLVGEREKEPGETAAAAAAESRCGGMRLEIDGMPLIWSQRNTPFARSELEVDGEVVDPG

SEQ ID NO: 117699 - protein, 175 aa, Oryza sativa
  Clone ID: PAT_MRT4530_21080C.1.pep
SRPRACWPPPGPRSPRSSRRPRPPPSPTRPRARSAPPRASLPSPPTSASRPPSPPPRSSASPPPRRPPSRPPPASRPSRYSSLGTSSPRTRPRSSRVSSASRCTRASGMVSTRSGWSSRSPSSPPRSPYGSAADAGAAGVGAPCDFSALPARAVYSLFGTANLKPKLCSLIMDLE

SEQ ID NO: 117700 - protein, 66 aa, Oryza sativa
  Clone ID: PAT_MRT4530_21081C.1.pep
THPITAVLFKPNKNGHDRRIPRHALNLHRFEFASSKSTIPREPLTQAVTTLVNPSFHIINRFDFFS

SEQ ID NO: 117701 - protein, 50 aa, Oryza sativa
  Clone ID: PAT_MRT4530_21082C.1.pep
MMRRKPRHTGTGFARVPNLVVGRPSGPLRPQGISPDRWAEPFKPCRGLDH

SEQ ID NO: 117702 - protein, 163 aa, Oryza sativa
  Clone ID: PAT_MRT4530_21083C.1.pep
MYTSKQPFHKSKQTFHKSKQTFRKSKQTFRKFKQPFRKPKQPFRRRPRIGPGDRIDYRNMSLINRFISEQGKILSRRINRLTLKQQRLITLAIKQARILSFLPFRNYENEKQFQAQSISIITGPRPRKNRHIPPLTQKFNSNRNLRNSNQTLRNNNRNLSSDC

SEQ ID NO: 117703 - protein, 234 aa, Oryza sativa
  unsure (1)..(234): unsure at all Xaa locations
  Clone ID: PAT_MRT4530_21084C.1.pep
RRSSPAAKPAASREGGDETLPSWRLPPGATWTGRRRRSPSTTVGGGDGGAMRGGSRSGASKAGSGHPAPGSGATAAXGGWGAAATAQRRRGRPGAAAWARWRRLDGWDGGSLEAVAAGSGGSSTGGPASAAGQPGCRCSALLGQVGCAARPDGVRRPGDGXAGGLCRSRSSSSFTGVGSSPDGSVKGAGGGWSSSPLPVGTLALPGAPPLLCGDGGWWNGGVLGQLSGAVVDVG

SEQ ID NO: 117704 - protein, 246 aa, Oryza sativa
  unsure (1)..(246): unsure at all Xaa locations
  Clone ID: PAT_MRT4530_21085C.1.pep
TGRRRRRPSTAVGGGDGGAMRGGSRSGASKAGSGHPTPRSGATAARGGWGAAAAAAQRRRGRPAGXAAARRAAGPGCPGSRGSAVRPNGSPWRGSAVSREPPWRGQASAAGQAGCRRSAFLGRVGCAARPDGARRPGDGGAGGLCRSRSSSSFTGVGASPDGSVKGVGGGGSSSPLPVGTLALPGAPPLLCGEFLGWIEAATRQRGKPRLPKQCHPVPGSPFVQSWRGGRRVVERRGPGPALRGGG

SEQ ID NO: 117705 - protein, 80 aa, Oryza sativa
  Clone ID: PAT_MRT4530_21086C.1.pep
MATAAKAFWNSPVGPRTTHFWGPVANWGFVLAGLVDMNKPPEMISGNMTADVTIFFYKLDQIKWNLALRQALHPGAHGNP

SEQ ID NO: 117706 - protein, 741 aa, Oryza sativa
  unsure (1)..(741): unsure at all Xaa locations
  Clone ID: PAT_MRT4530_21087C.1.pep
MTMMTPPPIEQQQEDEEMLVPHQELPAAAAAVVADAVQPMEVVAQTEPANAAESQPPEDPQTSRFTWTIENFTRINGKKHYSEPFVVGGFKWRVLIFPKGNNVDHFSMYLDVADSVNLPYGWNRYAQFSLAVVNQIHPKYTIRKDTQHQFNARESDWGFTSFMPLSDLYDPSRGYLVNDTVVVEAEVAVRRMVDYWTYDSKKETGYVGLKNQGATCYMNSLLQTLYHIPYFRKAVYHMPTTENDMPSGSIPLALQSLFYKLQYSDNSVATKELTKSFGWDTYDSFMQHDVQELNRVLCEKLEDKMKETVVEGTIEQLFEGHHINYIECINVDYKSNRKESFYDLQLDVKGCSDVYASFDKYVEVERLEGDNKYHAEQYGLQDAKKGVLFLDFPPVLQLQLKRFEYDYMRDTMVKINDRYEFPLQLDLDRDDGKYLAPDADRSIRNLYTLHRYKFDDERVTKEDTKKALEEQYGGEEELPQINPGFNNTPFKFTKYSNAYMLVYIRESDKDKIMCNVDEKDIAEHLRIRLKKEQEEKEHKKKEKAEAHLYTIIKVARDEDLKEQIGKNIYLDLVDHEKVGQLREVSNKAHNAELKLFLEVETGVDLRPIRPPEKSKEDILLFFKLYNPEKEELXMISTGHYVPTRYPRKRRTLAHEMPVIHVYDFIKDPNEIKXDPNVLSELFDSKLTMRNSKRDVGDKICFQKSPVSDGETQVRYPDVPSFLEYVHRCRLLNFTFSEKPKE

SEQ ID NO: 117707 - protein, 50 aa, Oryza sativa
  Clone ID: PAT_MRT4530_21088C.1.pep
NELIRSSFSMHGSYYWWTVISNDQALATGKMQNPSHVLTSTCALRSEIKN

SEQ ID NO: 117708 - protein, 176 aa, Oryza sativa
  unsure (1)..(176): unsure at all Xaa locations
  Clone ID: PAT_MRT4530_21089C.1.pep
LXHPDAELRLLEVFYHKIYKIFPPHEKIENINDQYWTLRAEEIPEEEKNLGPHDRLIHGYHFMKDPNQNQQIQNFGDPFLLVIREGETAAEILERIQKKLRVPDEEFSKWKLAFISMNRPEYLQDGDVVSARFQSGDVYGAWEQYLGLEHTDTTPKRSYTANQNRHTFEKPVKIYN

SEQ ID NO: 117709 - protein, 52 aa, Oryza sativa
  Clone ID: PAT_MRT4530_2108C.1.pep
CYVRLSSKLGRLLWWLVHKKIIRCQLLVCSNCSAIRVNLASAVPYIDDIWYD

SEQ ID NO: 117710 - protein, 509 aa, Oryza sativa
  Clone ID: PAT_MRT4530_21090C.1.pep
MAFAATKPSKSPLLILLVSGVAFLLLASAAECYGGGRHDVTRSAVARRSGVGSRRQYVRHRLTGGAVDVPHRYMLAEKGSNSTRANHTSPAASNSTPSATTTEAPAAGKHHRSHKHRVRNWIIGFVVGSLAGVVSGLAMSVLFRMALNCVRGGYRSKSDTVIFIPKLIKSKEHLAFLEKDQDGLASLAVIGRGGCGEVYKAQLPPEREGDAPRFIAIKKIKKRSGDGSGGQNNNLSDEESRQLDKWTRQIQSEIRTVGHIRHRNLLPLAAHVPRPDCHYLVYEFMKNGSLHNALKATTTDTTTNDYNDNNSGEHPPPSPALPWPARLRIAVGIAAGLEYLHVSQRPQIIHRDLKPANILLDDDMEARIADFGLAKAMPDAHTHMTTSNVAGTLGYIAPEYHQTLKFTAKCDVYSFGVILAVLGTGKEPTDKFFAQQVVDDVGIVRWLRRVMQEGDPAAQAGVIDAAIAGAGHDEQILLVLRIAVFCTADDPKDRPTAKDVRCMLSQIKN

SEQ ID NO: 117711 - protein, 78 aa, Oryza sativa
  Clone ID: PAT_MRT4530_21091C.1.pep
ARGTHSPNSPLLFALISASSHGSATLSLRKALPPFRHHGQCRRRCRVQGRLSQAQEGRRRRQALSAASPRSSPSWLSS

SEQ ID NO: 117712 - protein, 209 aa, Oryza sativa
  unsure (1)..(209): unsure at all Xaa locations
  Clone ID: PAT_MRT4530_21092C.1.pep
TRPGWDTYDSFMQHDVQELNRVLCEKLEDKMKETVVEGTIEQLFEGHHINYIECINVDYKSNRKESFYDLQLDVKGCSDVYASFDKYVEVERLEGDNKYHAEQYGLQDAKKGVLFLDFPPVLQLQLKRFEYDYMRDTMVKINDRYEFPLQLDLDRDDGKYLAPDADRSIRNLYTLHSXLVHSGGVXGGHYYAFIRPTLSDQWYKFDDER

SEQ ID NO: 117713 - protein, 209 aa, Oryza sativa
  unsure (1)..(209): unsure at all Xaa locations
  Clone ID: PAT_MRT4530_21093C.1.pep
YGGEEELPQINPGFNNTPFKFTKYSNAYMLVYIRESDKDKIMCNVDEKDIAEHLRIRLKKEQEEKEHKKKEKAEAHLYTIIKVARDEDLKEQIGKNIYFDLVDHEKVRSFRIQKQLPFTSFKEEVAKECGIPVQFQRFWLWAKRQNHTYRPNRPLGPHEESQSVGQLREVSNKAHNAELKLFLEVATGVDLPPIRPPELPRPLILLFFX

SEQ ID NO: 117714 - protein, 80 aa, Oryza sativa
  Clone ID: PAT_MRT4530_21094C.1.pep
MARGPAQGMPFWPGPSTARPDSGSCPCRPGPTAGLCLGCTLGTHHIPAKANTNAEQINTDDVHYLPARHYKVFSRKNRAK

SEQ ID NO: 117715 - protein, 62 aa, Oryza sativa
  Clone ID: PAT_MRT4530_21095C.1.pep
DTPEHTAVVVYALSPEAMLQMTDTNGCHVAQRCLTKLLPECKAFLLDVGGLGSFRLPKDQHG

SEQ ID NO: 117716 - protein, 138 aa, Oryza sativa
  Clone ID: PAT_MRT4530_21096C.1.pep
IFGGILTLLPKNKATPTPPKNPQQQRGSKQPQKIPPHLRGKIKNKRSLTLNLTHLKTGDPLGFSQNGKKPGLFLQLGKTEPTRDYKYKTVNPPPKEISFLKGGNLLGKAPLPQIGKTQAPKSRFGGKKKVPPHNFFPC

SEQ ID NO: 117717 - protein, 45 aa, Oryza sativa
  Clone ID: PAT_MRT4530_21097C.1.pep
MPPQAPRGSSPRGIGPEVPTYRIYGIPSDRATPYLMRRAVHSTVL

SEQ ID NO: 117718 - protein, 78 aa, Oryza sativa
  Clone ID: PAT_MRT4530_21098C.1.pep
IPFMVGLHVRLRSESDSYNAVTVRTCLTLYGHHASAHSAAQVSDLGRTCLSFAGHGSIRGRWCCCSPSRLGSDYRSRC

SEQ ID NO: 117719 - protein, 930 aa, Oryza sativa
  Clone ID: PAT_MRT4530_21099C.1.pep
MGLHCWLFPVSNHKNCRRLVQVEYMQKHCPRSGARTGWEEQRGTCSQHHYRIASGPSRQTPSSCGMRIDARTTHAWCTVTSERDRSARMRTGPKPDRADPTVAQCITHPIRATETCRVRPVPSNRKEKEEEEENLPDHTWALNKQKRCANLAQQYPSGPLLLNQNTEANLWASESPTSPTPPQQQRRRVADDAFWTDVSQGWSAGVLMMIMHAQQQHSTGVNARARLRRMHAAACTLCACYCDNYGCRPAGRPPAAATGRSSYTTWHHTQLKQDKTKADDTPNTTAVPASILNGQISGCICNSAPIHYSLEKRKENLFCSETRVKLLSSKQSVKHSDSNFFEPKFGSKIKYKSQQSRNSTDLDAHTGRRVRYATPCGWTDACTVCSSRMEPDKSCSLTTSDTHARFPRHTPNHGRRRRGYARRLVHVVLLLRRRGGRGVRGGDGGGGDGDGGEVVRGGPGVRVRRAQVVRPRRGGVAGGGGGGAAVVRLRAQLPALSLIVNRNESIFLIINEEEKAMLFSRKTDVLEMLMVEKAPTALIAKMLAEDLGLQSLRSTVDIDAAHCSKSSHECSNGAEQTIHRPHIPNEGRIPCHQVSANERKHGVRTIGKGTIPKRSTLMKPTASQLARQNRQIEVKNSTQSKKSVGVRSDRSTMSSNDCTYQAAKRQRLERGHLNKNVMTSSSDHAIAVPKLKITIPREPELATKLRAERLKRLIIYTLSMPTKNLVLWQVVQPSGRNDHQHASVPHRGIGSNVPVCTANRPRHLDNICKTPDECRDDLFKFKARPVDKKEFKLSTGRKGKQAPLSELFNKLTLTTEARRALDHRTADLPNYITTKLNIIPYLLAAMAEIDLYRETNHDAGVHSPVQFLLEPVTDSTSFDENQSKTTEFRGSNAGRKHSNEPTKQDINTRHGDSEFQRQQQQQQQQQTDVH

SEQ ID NO: 117720 - protein, 72 aa, Oryza sativa
  Clone ID: PAT_MRT4530_2109C.1.pep
MAMAMAYVTATTATRQYGGGGSAAGKHSILGLISASRLCTRQFTIPQWRTLICIVYMVVSRWGVTWMKTNFI

SEQ ID NO: 117721 - protein, 43 aa, Oryza sativa
  Clone ID: PAT_MRT4530_210C.1.pep
FSNRNMPHTGTFWILITMALRCHHVVHWPLCQGLDVWDYIGMN

SEQ ID NO: 117722 - protein, 252 aa, Oryza sativa
  unsure (1)..(252): unsure at all Xaa locations
  Clone ID: PAT_MRT4530_21100C.1.pep
MSAPCDVTTATTDTTITHIMDEQDDNKIKCFTCWNPIRPPATLLTSNGRRICIQPPLSAREYLMESPRSPLSNGTXLIAKFYPSHPRMNDQGATSVRSPVCSLRNPKLIICTQFLFAIQIAFILFLLVSSXACRNKVDLHRQDQQPIERCIDRXGTTQQRLLSSTHRKIGPTTALSVXWNSGFIRWYQSFRCSRLVRLEFRVLVTSITIVVIAAVSLLSSGLTKTESAHCYGSIFVVFRSFCRLVFEFLSCI

SEQ ID NO: 117723 - protein, 606 aa, Oryza sativa
  Clone ID: PAT_MRT4530_21101C.1.pep
FSIVVAFVPPSSRVRSRSVVCGRRRRFGRLFSLSKAKLIDGHKARGPTARPKAQQIGPAQARHGPTGVVPVPARPNSRAVLGPLPRHGGPARPGTKEVGTAPTPQPSTPPSLFVGVSYECLAGSSTKDLWISIINGNSGAPDAQVAERQAAATVEEPECLRWMARVMGTQGDDEDDLEEERIEVFGNTASPLRDLSQPEPHDDGTGADGNGAPSGSSASNKRSRSEVWDDFEELFEERNGAQVRVSAKCNYCHKTLSARSTGGTGHLLRHIKSCKPRNVGALSQSMLRFNADGSVSQWEYKPDVARTELVRLIAREDLPLTFGQSAAFEEYIQNAHNPRFSVVSRQTISRDVFKVFDKRRAMLIDTLKSVSSVALTSDIWSGNAKEDYLSVVAHFVNSNWQLEKRILGLVLIDVSHNAENISERVLSVVQEYGLTNKIFSITLDNASANSKAMDSLKPALSGYIGDLYLHQRCACHIINLIVKAGLEIFKPMLQDFRTAISFINASNQRIALYKNFCIAKGIRPRKFGLDMDKKTAWGKIFGAAACGSSLGAGLGAGNAGASASPGSGLGDAGASAGSGLGAGAFSRRTSATALIQAVSSTANMNA

SEQ ID NO: 117724 - protein, 786 aa, Oryza sativa
  Clone ID: PAT_MRT4530_21102C.1.pep
MDGDPTSCNYEARVMGTQGDDEDDLEEERIEVFGNTASPLRDLSQPEPHDDGTGADGNGAPSGSSASNKRSRSEVWDDFEELFEERNGAQVRVSAKCNYCHKTLSARSTGGTGHLLRHIKSCKPRNVGALCQSMLRFNADGSVSQWEYKPDVARTELVRLIAREDLPLTFGQSAAFEEYIQNAHNPRFSVVSRQTISRDVFKVFDKRRAMLIDTLKSVSSVALTSDIWSGNAKEDYLSVVAHFVNSNWQLEKRILGLVLIDVSHNAENISERVLSVVQEYGLTNKIFSITLDNASANSKAMDSLKPALSGYIGDLYLHQRCACHIINLIVKAGLEIFKPMLQDFRTAISFINASNQRIALYKNFCIAKGIRPRKFGLDMDVRWNATYLMLKHLLPHRVIFSVFIASHHPMADGQPLLTDLHWTIAETVLLFLEQFYDSTVILSGVYYPTSPLIMHHILEIAGHLNTYENDWNLRNVVVPMKNKFLSYWSEIPFLYSFAFILDPRAKIRGFSNVLQIMGQLISGDYSAYLNEVRAALSDMYAKYESKFGAVRLQRETPSSSSGKKKTAWGKIFGAAACGSSLGAGLGAGNAGASASPGSGFGAGASPGSGFGAGASPGSGFGAGASPGSGLGDAGASAGSGLGAGAFSRRTSATALIQAVSSTANMNASELFAYLDSDTVNQYDDDFNILNWWHEHNHTYPILSILARDVLTVPVSTISSESAFSLTGRIIEERRRRLAPDMVQALALIKDWEQADAKMQHTMENLELINSFDNLFLDEVTTATGTG

SEQ ID NO: 117725 - protein, 154 aa, Oryza sativa
  Clone ID: PAT_MRT4530_21103C.1.pep
MAAARRALLSHLRVPVLARPAAAAGSVPAARLLSSATEEGSKGSFLDKGEVADRIVSVVKNFQKVEPSKVSTVADAHRTADSDLGVLGLCSVFFIRVAFLLLPGMERIFFFRKEILYMRKKLQSFGLGGSIGAEPETLGDRSRTRNKSCTLLED

SEQ ID NO: 117726 - protein, 33 aa, Oryza sativa
  Clone ID: PAT_MRT4530_21104C.1.pep
ITLSFKVWIHGFPLGWLGYEIYPPHSILFMKER

SEQ ID NO: 117727 - protein, 135 aa, Oryza sativa
  Clone ID: PAT_MRT4530_21105C.1.pep
MAGGYLLVRRGSVGTSGVVIVAAAPEKRETGGWIWRQRKRGYWRESERIEAAAVLPFSLVAVFPSCSYRLRAPATVASPATERHPPLSRLACWPPAALPRPEREKRRKRRAECTVMIEVAHCDDKVLGRHRVSLH

SEQ ID NO: 117728 - protein, 73 aa, Oryza sativa
  Clone ID: PAT_MRT4530_21106C.1.pep
YNDGIILLHQIYMYYSQRKTMWMYFIIDEWRRGHFAHRRSTFPYGGRRSYSMYDTLGSRSKSYSCYRGSQYRG

SEQ ID NO: 117729 - protein, 120 aa, Oryza sativa
  unsure (1)..(120): unsure at all Xaa locations
  Clone ID: PAT_MRT4530_21107C.1.pep
LFLKKERACIASGIAPYIMGGSSTTGAPFHGLKCTDDMPCGRRSRNYSFGNFSKRGRIMCMQVWPIAGIXKIETLSYLPPVTPYDLLNQIEYLLRCKGVPXLSSTRAXFVYLENHRTPGY

SEQ ID NO: 117730 - protein, 48 aa, Oryza sativa
  Clone ID: PAT_MRT4530_21108C.1.pep
MAIFADHFAHAGRPTACEDRVHPAFAPDSLKGAGSPRSKRKGTLAPWG

SEQ ID NO: 117731 - protein, 125 aa, Oryza sativa
  Clone ID: PAT_MRT4530_21109C.1.pep
KAGRIDRFRSLRLQRRGPWTARGGHHRDDKCDEEAAGRRRGRRRCHGADTRRRRADGLLGPPLEPRGRPARPLRRVTVDLLRLLSRAEPAELGQHRGRPAHGVHGDPVHLLNALKRRPRQPRSRG

SEQ ID NO: 117732 - protein, 55 aa, Oryza sativa
  Clone ID: PAT_MRT4530_2110C.1.pep
GLRAAWYPNVDAARFAGMDAWSSIENATSFHELKSEDSSKPDFKVSIIGQARVPS

SEQ ID NO: 117733 - protein, 325 aa, Oryza sativa
  unsure (1)..(325): unsure at all Xaa locations
  Clone ID: PAT_MRT4530_21110C.1.pep
MVGGCQDCQXFGAIQRAPASAMNHIIKLWPFRGWGIDMIGQINPPSSKGHKFILVATDYFTKWVVAVPLKKVDYGDAIQFVKEYIIYRFGIPQTITTDQGSIFVFDEFVQFADSMGIKLLNSSPYYAQANGRAEASNKSLIKLIKRKISDFPRQWLTRLAETLWSFRMACHASVQVPPYKLVYGHEAVLPWETTSGSRRVALQDDLTADKYYNLIEDETEDLVQSRLRALAKVTKDKERVARHYNKKVVPKSFSEGELVSKLILPIGTRDNKFGKWSPNWEGPFQIYKIVSKGAYMLQGLDGEVYERALNGKYLKKYYPTVWINS

SEQ ID NO: 117734 - protein, 283 aa, Oryza sativa
  unsure (1)..(283): unsure at all Xaa locations
  Clone ID: PAT_MRT4530_21111C.1.pep
PAGQNQLSASKQNSGASRGVYVFSDMNPYVGHPNPMQEGQELFRKGLLSEAVLALEAEVLKNPDNAEGWRLLGVTHAENDDDQQAIAAMMRAQEADPTNLEVLLALGVSHTNELEQGEALRYLHRWLQNHPKYGGIAPPQPTDSPYGPDVIRLFNEAAQMSPEDADVHIVLGVLYNLSREYDKAIAAFKTALQLKPQDYSLWNKLGATQANSIQSADAILAYQQALDLKPNYVRAWANMGISYANQGLYEDSIRYYVRAVAMNPKXDNAWQYLRILLERLRAE

SEQ ID NO: 117735 - protein, 194 aa, Oryza sativa
  Clone ID: PAT_MRT4530_21112C.1.pep
MCFFLHQHAFGTPGRTDFDKVFIMVDIKANDIDPDNIIPVTLDKLTEEQKANLEQMMNQLQNKYLLSFILTRQGTVIQRHKVTFPLDDEGTSSPKDAEPKGEKPEGDPEEFHTLQDRIDYAIHYALINQSGVLVNTLTNMIKFVVDGTITEHQAKGPVFLPKGVFPQYRTISTNNGGSNQLACPEPESKSLDLH

SEQ ID NO: 117736 - protein, 751 aa, Oryza sativa
  unsure (1)..(751): unsure at all Xaa locations
  Clone ID: PAT_MRT4530_21113C.1.pep
MAMRHLITGQGNCAPDGASSSNPFGNLANAIFGQSSKAQSIKELPASAVNVPTTSELGTAAPLSTIPGSETTFKLETXLSYGPSMVQGMGSRKINCNLYGALISSMWVFLMNRLNLFGLQQIFNSTGPTFGPPVMDGPPQRVLSGVLRSFLASGKAGVPFQPVPVPALGLSESDKQCIRDRSCIMARHILADQPEEYIQAQVNTLLHSLDIDSNYRMKGPMHGPYPEMEEYWNQSQSAMRSGPMHNAADKWITEFGKQNNNPEEWAHSFEQQYGSNGWASEFEQHQSQMAMTGGMNMANLAAMEQSRMLAQTLASNNDPKFQNSKFFQFVSKMSRGELIIEDNQVKQGSASQSSGWADEFQTQYNANANSWADQFVHEEMSQGADKWASEFSTEYNQGGLNENWIDEFSKMRVDDEWAEEFSGGTFGESSADPWVDEFQNQLSASKQNSGASRGVYVFSDMNPYVGHPNPMQEGQELFRKGLLSEAVLALEAEVLKNPDNAEGWRLLGVTHAENDDDQQAIAAMMRAQEADPTNLEVLLALGVSHTNELEQGEALRYLHRWLQNHPKYGGIAPPQPTDSPYGPDSFRFVTKQFTSDQVIRLFNEAAQMSPEDADVHIVLGVLYNLSREYDKAIAAFKTALQLKPQDYSLWNKLGATQANSIQSADAILAYQQALDLKPNYVRAWANMGISYANQGLYEDSIRYYVRAVAMNPKADNAWQYLRISLSNASRADMIAACDSRNLDVLQKEFPL

SEQ ID NO: 117737 - protein, 428 aa, Oryza sativa
  unsure (1)..(428): unsure at all Xaa locations
  Clone ID: PAT_MRT4530_21114C.1.pep
EQHCTDQRSLGKTAGQAARAPGTTRIRSPAERQTGLAAAATSRSYSVNSQFTCILDCPKYIHFFTRARRRGGXAVVRCMAAAAVAASDAAQLKSAREDIREILKTTYCHPIMVRLGWHDSGTYDKNIEEWPQRGGADGSLRFDAELSHGANAGLINALKLIQPIKDKYPGITYADLFQLASATAIEEAGGPKIPMKYGRVDVTAAEQCPPEGRLPDAGPRVPADHLREVFYRMGLDDKEIVALSGAHTLGRSRPDRSGWGKPETKYTKDGPGEPGGQSWTVEWLKFDNSYFKDIKEQRDQDLLVLPTDAALFEDPSFKVYAEKYAEDQEAFFKDYAEAHAKLSDLGAKFDPPEGFSLDDEPAAPQPEPFVAAKYSYGKKELSDSMKQKIRAEYEGFGGSPDKPLQSNYFLNIMLLIGGLAFLTSLLGS

SEQ ID NO: 117738 - protein, 319 aa, Oryza sativa
  Clone ID: PAT_MRT4530_21115C.1.pep
TTSFPCCSTSAGGLRLRSRPSRFPQKAATTRSGRAGAGARAVVRCMAAAAVAASDAAQLKSAREDIREILKTTYCHPIMVRLGWHDSGTYDKNIEEWPQRGGADGSLRFDAELSHGANAGLINALKLIQPIKDKYPGITYADLFQLASATAIEEAGGPKIPMKYGRVDVTAAEQCPPEGRLPDAGPCVPADHLREVFYRMGLDDKEIVALSGAHTLGRSRPDRSGWGKPETKYTKDGPGEPGGQSWTVEWLKFDNSYFKDIKEQRDQDLLVLPTDAALFEDPSFKVYAEKYAEDQEAFFKDYAEAHAKLSDLGAKFDPP

SEQ ID NO: 117739 - protein, 101 aa, Oryza sativa
  Clone ID: PAT_MRT4530_21116C.1.pep
TTPIRGVVGQHVASHPDQFPLDRHNHSGVQCGGTHHSRSHNRHISHTPFSAPFLSLPSVAPHTQFFSRVCVHTQQVGLSCVSPSLTSETSRVSVVTLRWSS

SEQ ID NO: 117740 - protein, 68 aa, Oryza sativa
  Clone ID: PAT_MRT4530_21117C.1.pep
ITGYIPQYLSAVVVHKLNWLYSSRVKTALLFLRANKYNGHMQPVESLEAKRLFRNFFIQEIILFRRSG

SEQ ID NO: 117741 - protein, 234 aa, Oryza sativa
  Clone ID: PAT_MRT4530_21118C.1.pep
MILATDADRGERKAARTAMSTAVAAASWMGFSSRPVDEPLLEDMAQVRENSMATTPSERRRRDSHASTRVSNELGAGRPHAACLAVRVSVFMAISEGLVIGLVLISVRNIWGHAYSNEEEVVKYVGKVLLVISVSNFFDGIQCVLSGVARGCGWQKIGACVNLGAYYIVGIPSAYLIAFILHLSGMGLWLGITCGILVQVVLLMAFTLCTNWDKEAANAKHRALNSSLPSDTAT

SEQ ID NO: 117742 - protein, 71 aa, Oryza sativa
  unsure (1)..(71): unsure at all Xaa locations
  Clone ID: PAT_MRT4530_21119C.1.pep
GVKRRFLAAVVVPALSSSRLVRRXWSEGVRRATACQGGRARAIDPETDARRLGARQSRTPGWRAQGEEKAN

SEQ ID NO: 117743 - protein, 60 aa, Oryza sativa
  Clone ID: PAT_MRT4530_2111C.1.pep
IPKTNFYFPQITFKPIFFLNSHPFLTLFLNIFTPPLHFFNFLIPPPTTYILFKSLFYIQT

SEQ ID NO: 117744 - protein, 113 aa, Oryza sativa
  unsure (1)..(113): unsure at all Xaa locations
  Clone ID: PAT_MRT4530_21120C.1.pep
GGGRGRQRRLGRATEAEDGGGRATRRRQKTAAAMRRAXGGSGGRVARXGGRWRRRRWRQLCDGRRGSGGRVASHMADAEDGGDRAANVRRATGAAVAGPCGGGRTRRRPCMRA

SEQ ID NO: 117745 - protein, 47 aa, Oryza sativa
  Clone ID: PAT_MRT4530_21121C.1.pep
TFPQMKEKKCKNCSSEMRPDLHPKVCRKLIIFPQYKFTARESETSKD

SEQ ID NO: 117746 - protein, 96 aa, Oryza sativa
  Clone ID: PAT_MRT4530_21122C.1.pep
KKMQLFQQFSCRASNLCSSKMLVAESLRESWLCTVFSITRNAVLGNVRIARIERQKNHPVVVMGISPCYCIAFFSASPAPKPKSRATYVGQSCCLP

SEQ ID NO: 117747 - protein, 426 aa, Oryza sativa
  Clone ID: PAT_MRT4530_21123C.1.pep
MSLGYAEKLSYREDVGNVGMPEIFDSPELLHKKIEELAVMVRESKHLVVFTGAGISTSSGIPDFRGPKGVWTLQVRSGKGVPGASLPFHRAVPTLTHMALVELEKTGRLKFVISQNVDSLHLRSGLPREKLAELHGNSFKEICPSCKKEYLRDFEIETIGLKDTPRRCSDKNCGARLKDTVLDWEDALPPEEMDAAKEQCQKADLVLCLGTSLQITPACNMPLLSLKNGGRVAIVNLQATPKDKKASLVIHGLVDKVSFPERPDMKPVVLKEQPFSLQRETSMNRPFVMLLTFNFSDGCGCSSSSIEWPVDFLKQKDSFVRDRSLVLQELQHAAEHRSRAGQHAILEREGVPRAETSIHALVTNIVRYDTEDSKAAVPMATWMNSNGSLSKRHMDAIGCNPASSKKQKLVATRHRRKGLNPATQKV

SEQ ID NO: 117748 - protein, 483 aa, Oryza sativa
  Clone ID: PAT_MRT4530_21124C.1.pep
MSLGYAEKLSYREDVGNVGMPEIFDSPELLHKKIEELAVMVRESKHLVVFTGASISTSSGIPDFRGPKGVWTLQRSGKGVPGATLPFQRAVPTLTHMALVELEKTGRLKFVISQNVDSLHLRSGLPREKLAELHGNSFKEICPSCKKEYLRDFEIETIGLKDTPRRCSDKNCGARLKDTVLDWEDALPPEEMDAAKEQCQTADLVLCLGTSLQITPACNMPLLSLKNGGRVAIVNLQATPKDKKASLVIHGLVDKVIAGVMYMMNLRIPPYIRTDFVQISLRNSVKKKCVRWTLRVTSIHGLRAPLPFLRSVEVSFPERPDMKPVVLKEQPFSLQRETSMNRPFVMLLTFNFSDGCGCSSSSIEWPVDFLKQKDSFVRDRSLVLQELQHAAEHRSRAGQHAILEREGVPRAETSIHALVTNIVRYDTEDSKAAVPMATWMNSNGSLSKRHMDAIGCNPASSKKQKLVANRHRRKGLNPATQKV

SEQ ID NO: 117749 - protein, 43 aa, Oryza sativa
  Clone ID: PAT_MRT4530_21125C.1.pep
SDFISSSCCVPVSQYNMYCSSALADCLSSLFLDFCTIKYINCI

SEQ ID NO: 117750 - protein, 83 aa, Oryza sativa
  Clone ID: PAT_MRT4530_21126C.1.pep
WFCTSCFPSPDSWVFCFPFFRVGGPSPPFFFLCFFFYFSLFFFSFCAPFGVFPPCSVVVFSRWVLLLLIFYFCIAQFFFFKKK

SEQ ID NO: 117751 - protein, 47 aa, Oryza sativa
  Clone ID: PAT_MRT4530_21127C.1.pep
PHSAILPITPNYQLPIAIYIYSLTYLARAFSNKLRRKREKKLTMTQV

SEQ ID NO: 117752 - protein, 104 aa, Oryza sativa
  Clone ID: PAT_MRT4530_21128C.1.pep
RSSLQKVTIVLKCGDARLSEVEEVAAALMNSAAVHPKHPTVQTKWQDEQAVLSPYQEVGTDHACTLIDQRWFILLIHSHVAFCSKGNYFPYIMPHKLGVESSHF

SEQ ID NO: 117753 - protein, 112 aa, Oryza sativa
  Clone ID: PAT_MRT4530_21129C.1.pep
PALPLAPAAQHQLWPDLVVWRLARKKFWWSRSGQFILPFELISHHRAFSPHPFSSFGLRWSDLPAAKLLDALTSCGCEIIGVRTARIAWTRGGRRSEQDEGCKWATTWGVER

SEQ ID NO: 117754 - protein, 91 aa, Oryza sativa
  Clone ID: PAT_MRT4530_2112C.1.pep
LVLVKKKKKKKKKKKKKKKKKKKKKKKKKKKKKKGGLSGVAEPSFGCLRCNGFFFVSRNLNSVPGASLCSGGNDHGVTLLNLVASHPIFVW

SEQ ID NO: 117755 - protein, 38 aa, Oryza sativa
  Clone ID: PAT_MRT4530_21130C.1.pep
NILYRNPKRRPPYFKTSTGKNPPKLAIKRKEKNLKIGP

SEQ ID NO: 117756 - protein, 408 aa, Oryza sativa
  Clone ID: PAT_MRT4530_21131C.1.pep
MVTPDKKRRKKLAEPEPTPTPAPEPVPRLLRVRPGNKKKNKGASPEKQPPVYMVLAHGVEEEPTTHSVIEVAACAAARRLLNTGSGRGRGRGMSFAAVGTRTVGVGVELTTVYDPEASTERGGPRLVFPKVNPVLISISDDGGGGGGGGTLYALSRTPAVVRPLDFEPWFFVLDDLSHTVWRQLPSPPLFPCRLNPLEFLDPPKVRVAAYALVGSHILLSVSVQPPQPQQQQDHKGTCAFDMDTEQWEMVHDTNLPFDGQALPLGSDDDHRFVAVASAAADVAVYRMVVGISAVTGKKELTIVALRVVVASNSKCRIVPGNLLCAMGKGSFASFEFRSIAAASMGKVGRARIVHRTYSLVDDGEDDWVVMVKKQDRQVYKLRDPSFLGGCSFFHVKISEPFFASSNIF

SEQ ID NO: 117757 - protein, 177 aa, Oryza sativa
  Clone ID: PAT_MRT4530_21132C.1.pep
WRRRRRLTGPCSPPTPSSASATASSPPTTSTATTTCASSAACGAPAPTTRGRPTSRTPASSPRSWPCSSSTSTPETTAPPPSPRSSTSTPAASSASASRASAAASSSPSRPPPSSCSSRSGASATAPSSSARPGASPSTPTSSPPWRPDASTSWSRARRRTSVSISPTGGWRRPYQW

SEQ ID NO: 117758 - protein, 37 aa, Oryza sativa
  Clone ID: PAT_MRT4530_21133C.1.pep
YSVLLQAQTNRSHGCLLTGIQLLALRRVLWPGTKSYV

SEQ ID NO: 117759 - protein, 81 aa, Oryza sativa
  Clone ID: PAT_MRT4530_21134C.1.pep
KLSLSFYSSYCTSIASLISTESMHCTPSSPYTSSSPCTSSSPCTESMSLAVPLGTIRKNCFDGMQQPLQVLDLHYEIFGMV

SEQ ID NO: 117760 - protein, 76 aa, Oryza sativa
  Clone ID: PAT_MRT4530_21135C.1.pep
MGLLYKLWDDTVAGPRPDTGLGRLSKHAVDRPVAVKINDLTGDAAMVAVPPTTPVGAEEVPVKVTRSIMIKPPAGY

SEQ ID NO: 117761 - protein, 591 aa, Oryza sativa
  Clone ID: PAT_MRT4530_21136C.1.pep
MEVPLVLEAMDCALIEILQVYGEICTGVARFLVGVPAPTTRPRQTKSTAAAGIKVLRKAAEKSAQLSSYFELCRSLGVVNVRELEACIGLWLCGVYVVRVPSPPRGEDLVDGPRVGEDLAGQPCHAQGRTSLVGWAAAGEDLAGRSWVALELSMLNVEASDMGAPVEGSSSTLLELGIPEELGIGENDDEEEKATCCPCNTSSRLADMRPSSSQPESFWLYSLAGYKTTVCRRRSAVAGAEGGSGQHGSPCSRPGKMMRIAIKSWSRFLPPYIPDDVIFDILLRLPSKSLIRFKSVCKAWHAIISNPCFISAHLECSKQKPSIFMVPGVYEKQNNGENTSFLMGLYQYQGGNIMEQIHVQDFPQGIGTWSRPIHCNGMLLISTMNHEMIVCNPSTREIVSLPKGSYNLHAGPRAGFGFDPHSNKYKVARFFYQRDDDTSELVCKFEVLTLGTNLWRQTEDPPYPISGLTPVHVKGAIYWMVSALKIWTCNYAQNPEWTQRCTVQIPPDIVVNNPVARPPIVFLHGKKLLLTWNQVYQYDIQTCRMEKIASGVEDFTCYDPRNNKYWAYLEKEVTDMHLFNYAESLVPIREF

SEQ ID NO: 117762 - protein, 48 aa, Oryza sativa
  Clone ID: PAT_MRT4530_21137C.1.pep
IYLTPSSLDRAGPSCRGRGPGTTQRSGRAGTTHAVLGPGCRASGLVRS

SEQ ID NO: 117763 - protein, 90 aa, Oryza sativa
  Clone ID: PAT_MRT4530_21138C.1.pep
SREKLLPFSLLGSALCPCRCRLAASSISHRLSHGPRHHQPLTPPPWCPTRPRCRQRQSPPLSPLVALRRTTKRGRLPVPVRQPLPAQTLV

SEQ ID NO: 117764 - protein, 172 aa, Oryza sativa
  Clone ID: PAT_MRT4530_21139C.1.pep
MAVKRCAEVPISARPGKMMRIAIKSWSRFLPPYIPDDVIFDILLRLPSKSLIRFKSVCKAWHAIISNPCFISAHLECSKQKPSIFMVPGVYEKQNNGENTSFLMGLYQYQGGNIMEQIHVQDFPQGIGTWSRPIHCNGMLLIFTMNHEMIVCNPSTREIVSLPKGSITFMRA

SEQ ID NO: 117765 - protein, 102 aa, Oryza sativa
  Clone ID: PAT_MRT4530_2113C.1.pep
MEASPPTSPSSLRHRLRTTVCCCFGSPGERRSGEKLRWRRRVAAGEFGYDPLSYALNFDDGDGDDDAADDAAAAFRYKNFSSRLPPSPVAAPARRSTAIAIS

SEQ ID NO: 117766 - protein, 210 aa, Oryza sativa
  Clone ID: PAT_MRT4530_21140C.1.pep
HEDESGRGTGDDHGRETKDAAAAASSSSGKKVPLFSLFRYADRLDVLLMVVGTVGALGNGISQPLMTVLFGNVINSFGANTSGSVLRSVTKVVLNFIYLGIGTSVASFLQVSCWTMAGERQSARIRSLYLLGSALCPCRCRLAASSISHRLSPGPRHHQPLTPPPWCPTRPRCRQRQSPPLSPLVALRRTTKRGRLPVPVRHPLPAQTLV

SEQ ID NO: 117767 - protein, 902 aa, Oryza sativa
  Clone ID: PAT_MRT4530_21141C.1.pep
MAATAAAEHPFKNILTTLPKPGGGEYGKFYSLPALNDPRIDKLPYSIRILLESAIRNCDNFQVNQNDVEKIIDWENTSPKLAEIPFKPARVLLQDFTGVPAVVDLAAMRDAMAKLGSDANKINPLVPVDLVIDHSVQVDVARSPNAVQSNMELEFKRNNERFGFLKWGSTAFHNMLVVPPGSGIVHQVNLEYLGRVVFNTDGIMYPDSVVGTDSHTTMIDGLGVAGWGVGGIEAEATMLGQPMSMVLPGVVGFKLTGKLQNGVTATDLVLTVTQMLRKHGVVGKFVEFYGEGMGKLSLADRATIANMSPEYGATMGFFPVDHVTLDYLKLTGRSDETVAMIEAYLRANKMFVDYNEPQTERVYSSYLELDLNEVEPCISGPKRPHDRVPLKEMKSDWHSCLDNRVGFKGFAVPKEQQDKVVKFDFHGQPAELKHGSVVIAAITSCTNTSNPSVMLGAALVAKKACELGLEVKPWVKTSLAPGSGVVTKYLLQSGLQEYLNKQGFHVVGYGCTTCIGNSGDLDESVSAAISENDVVAAAVLSGNRNFEGRVHPLTRANYLASPPLVVAYALAGTVDIDFEKEPIGVGKDGKEVFFRDIWPSTEEIAEVVQSSVLPDMFKSTYEAITKGNPMWNQLTVPEASLYSWDPNSTYIHEPPYFKDMTMSPPGPHGVKNAYCLLNFGDSITTDHISPAGSIHKDSPAAKYLLERGVDRKDFNSYGSRRGNDEVMARGTFANIRIVNKFLNGEVGPKTVHVPTGEKLYVFDAALKYKSEGHDTIVLAGAEYGSGSSRDWAAKGPMLLGVKAVIAKSFERIHRSNLVGMGIIPLCFKAGEDADSLGLTGHERYTIDLPTNVSEIRPGQDITVTTDNGKSFTCTLRFDTEVELAYFNHGGILPYVIRNLAQN

SEQ ID NO: 117768 - protein, 62 aa, Oryza sativa
  Clone ID: PAT_MRT4530_21142C.1.pep
PVCCPCPSRSVPVPPLRRVRPRGVFHFVISSRAKLRDILLLPPVTLNTHVKKKKNKKGVSPQ

SEQ ID NO: 117769 - protein, 92 aa, Oryza sativa
  Clone ID: PAT_MRT4530_21143C.1.pep
GKLNGGLKFFSNKRGGAPLFPQQTQPLGAVKLAPPPVNFFEMNPSPVHEISPLKISAPFMPDRGNPLPKAFFWGPLFFFWEITQSPAFGHFK

SEQ ID NO: 117770 - protein, 243 aa, Oryza sativa
  Clone ID: PAT_MRT4530_21144C.1.pep
MTASRSLLAVILLAATAADVDALVFDVPSGGSKCLTEELRRGALSHASYRVAEATSAASSAVSARVAGPRGEELHLTEGVEAGEFRFEAAEDGRYTACFWTPRYLRGAIVSIDVQWTTEVRDHAGGAGSPPAVAAAKEGHIDCVQVILMFHFIVIHTSIMGIRNVDAHASSMIGELKKLEVSTRLIHEEMISLRRSEGEMQKLNEDTTMKIHSFTLLSLAVCVGVAGLQLWHLKTFFQKRHIL

SEQ ID NO: 117771 - protein, 132 aa, Oryza sativa
  Clone ID: PAT_MRT4530_21145C.1.pep
MADEYNQGGGGGGGPRGGAAPHGLLLAVVVGLVVAGPLFLGDGGEAVTEAVAELLSPVGLLLLPVCLLLLIRLLSSDRGAAALADAFAFGGSPDAVHRVGGSPVGVALMLLLILALLYYRTALFGGDGGDDE

SEQ ID NO: 117772 - protein, 50 aa, Oryza sativa
  Clone ID: PAT_MRT4530_21146C.1.pep
KIIYKDLKLFLRRAIMEALKGISLFSYIFPDLFFFLLLKLSGCCIETYPQ

SEQ ID NO: 117773 - protein, 123 aa, Oryza sativa
  Clone ID: PAT_MRT4530_21147C.1.pep
TTKVASLRRVFFFNRACLAASDVPTAAARHPKPSREGGRSIWRCTDLTFLPWRRRWPPPPPRPYTPLPLSSPPLRPAPSPTAICPRAPSPSGRGAARPPQPPPPPLPSPPGGPFLRRAISSPA

SEQ ID NO: 117774 - protein, 45 aa, Oryza sativa
  Clone ID: PAT_MRT4530_21148C.1.pep
FEGTFTAYMYGCSKRKKKASHADGVSDSSSLLHDCVFLQAFSIHN

SEQ ID NO: 117775 - protein, 177 aa, Oryza sativa
  Clone ID: PAT_MRT4530_21149C.1.pep
PRVRPRVRDKLATKVTALEAIVGKGGRVVDADVVTLTEALMNELVKLDAIAAEGEVKVQRRMQEKRVQKYVESLDAIRAKNAASHNKASGNGHAKPRAPHLPPPVSQRRQFQAPPPAAPTTTKTAAAPAPPPTASWESFDLLSSMPSTSSSTVTTTMAAATTTTTTSPIPRFDWELF

SEQ ID NO: 117776 - protein, 290 aa, Oryza sativa
  unsure (1)..(290): unsure at all Xaa locations
  Clone ID: PAT_MRT4530_2114C.1.pep
VNNLSWPNTCPYFNKTRDADITPSDTHNNPPPVIQGPITSARTIEGERRHLGKDLESWRIIEDIQVKVEAQTKSASSAIQSLGSVCTKMGTQHYYLSLDCVPLXIYLAFLAPHITSGQHMFLIPTIADYAFQVSIAKIAQNDMTEAVTKAVQDAINKSGFLNHMERLDKRISTLANRVAALETQEPSSEEVSGSNAGGHPEDTMYDXSGNIDAEATRQARLRRRLCTYRTGMGGTSNDHHQQGNNNRVPDDPYAKVKFKIPSFSGYYDAEKYHDWEMTVEQKFSAHLVPE

SEQ ID NO: 117777 - protein, 207 aa, Oryza sativa
  Clone ID: PAT_MRT4530_21150C.1.pep
MARTGAAVAHARTDGLLATFNPMTGKKYELGYCTSSDEPEPRAHRCSWHGDMNMIRPLRESPTALILVIIETLSSAVVGLVGCQVVAESGRMAYRAAIALLWFSTAAAAGVGNGGGDGNTEEDAEKSKELSRSSACRCRGSSRSHRLDLLLLVRSPRRTPTPISTANQWRLYRYPHEQCRINITTGEMIFGGSSDFHNSPGSNKNRD

SEQ ID NO: 117778 - protein, 215 aa, Oryza sativa
  unsure (1)..(215): unsure at all Xaa locations
  Clone ID: PAT_MRT4530_21151C.1.pep
NTHPQLFILRHRQRAHDHPPPLLQRVNRHLEHEFWIGRSVSNIWQVSDNNQGNKEVKKDIQQDDLPVVLCMLQESLIELAPTISEDENIDNDNGTTFTQGVHSYDVLNMSCSYAILKQPIMETIDEIPLSQNNLFVVSSDNEEFSDISLIFIPQLVNEHVNSTIIPXCVKFKHVIHIDSNNGELRLLSSLNTWIYIXFNDPCPLNCIENKLFCQC

SEQ ID NO: 117779 - protein, 98 aa, Oryza sativa
  Clone ID: PAT_MRT4530_21152C.1.pep
RGYFPPKCCIISSKTTVLYMRRLMMVLINHGHDVYDIHRPYRQGIITFISLHCDTGCGSNKHWSCFSFTERVAVQQEIHTPVSDWSCIHAYNLILMEN

SEQ ID NO: 117780 - protein, 76 aa, Oryza sativa
  Clone ID: PAT_MRT4530_21153C.1.pep
FFFWVYNWAVTIFIQNWVSPRVFQLVTHDDAVTLFFSPGTTIRVQFNTRYHRAVGMLQGARVVSWGRSPAIWHGQV

SEQ ID NO: 117781 - protein, 163 aa, Oryza sativa
  Clone ID: PAT_MRT4530_21154C.1.pep
MARDEIQAGIPKLNSTTPPRRMDHPRRRRRRRRRRRHKHKHKPDEVKEEMVVDALPKEEEEEERGKRRKKKRKKLVTVKLSDELMGYLRTKEVMAYLARETPRPLPIDPSIAQHMFVGQELRQEIAAQVHENREFDAFVLYQYRTKGYAEIQQEVTDDDDDDG

SEQ ID NO: 117782 - protein, 43 aa, Oryza sativa
  Clone ID: PAT_MRT4530_21155C.1.pep
MPKPNHRVARINQLQMLCRCMQRRAAPGQQRNTVERAREKALP

SEQ ID NO: 117783 - protein, 422 aa, Oryza sativa
  Clone ID: PAT_MRT4530_21156C.1.pep
MDALVCTNAFATAIAAGRFPLPRGRSPPYAAAAVPALRSRRCLPTRGLLRLRCARGVDWTDPSFVAVAEKPDAGAEAWKALASAGGGGIEEEEDGPFEAINGDGGYSVEESVVLPPFEQSLVAAVADSVEDDALSQALSSKLDFKETSTFVMYGSGAFIAGWILSAVVSAIDSIPLFPKILQIVGLGYTIWFSTRYLLFKENRDELFVKVDDLKRKITGYATDQAWEFMDSPEEERGDRRWRKKKEEHGGLVAVLSSRRSASTAAFPLSSLAPSLYSLSTEEDGGAIRVVDAVIGPLIDRGSRACGDAVAVETDMEVRGLSLASSSSPSSFRQQVAPDPPLLSLPPSPPPTPTVGEHELMVQLPCYLQELHLLREIVSVKLELPFPKRLLVLDQAAATLHKMTPPHAGGSDEVHLSRSGRRR

SEQ ID NO: 117784 - protein, 206 aa, Oryza sativa
  Clone ID: PAT_MRT4530_21157C.1.pep
RARTDNYRTNWVQGTILNATSGFTQGTVGVSTEVAVYNALVLDRSKRDIKGGSNRTLADSDGDAVDQWSKLGLANVKFRVSNTTLTAGRQNFSSGIIDTIGNRALPSSFEGVSFNSEEFSNLSFQGGVFDRVSPRTEQSLSKFRTEYGNGRQETDKVNTLGVNYQPFKSLKTSLFAANVEDFWNQYYFGATHELGDSQTLSLTTGS

SEQ ID NO: 117785 - protein, 53 aa, Oryza sativa
  Clone ID: PAT_MRT4530_21158C.1.pep
FLVASGFRRGYMFSKKILLGYVPPDFPRKGGFKNFKIPLKIMAKETGVYFDFF

SEQ ID NO: 117786 - protein, 43 aa, Oryza sativa
  unsure (1)..(43): unsure at all Xaa locations
  Clone ID: PAT_MRT4530_21159C.1.pep
GKRGPLXXHXGCMXYIMKTLRKVDVFYSLIXIYQFLYFSYFKI

SEQ ID NO: 117787 - protein, 63 aa, Oryza sativa
  Clone ID: PAT_MRT4530_2115C.1.pep
EKVCIHHILVKTFDNSKRRTLIPTKLNGLHFPLNNVRVRITNQKYATIALTHKIHQTYHRFYD

SEQ ID NO: 117788 - protein, 279 aa, Oryza sativa
  unsure (1)..(279): unsure at all Xaa locations
  Clone ID: PAT_MRT4530_21160C.1.pep
MGDGYGGSRRRGGGDRGSSHPCEADGAARGGRKRRQEVARGDSHDPRLGLVVAAGFRQGIGEMERWPSSPARRLSWWWWRRSAAAAGAVVLRDWRTPAGGGAQACGEGAARGHGSLGELGKKREGGAGSVFIALGGEIVAWMGGNGRRGGVVTWAXWRGQTGADSCVGSWGGXGGSRAASGPHXEGARESEEVATWGGREAXGGWLEVRDGPNRWGRGSHLSAKGERGGRWRGYVNFRGRGEQAGRAAQRGEGREAAWPEGKRGRRGLGRKRPKGRRGI

SEQ ID NO: 117789 - protein, 110 aa, Oryza sativa
  Clone ID: PAT_MRT4530_21161C.1.pep
DGAPATPNRGGAAAEDRQDLGSKKEGLWEGEASRHGRERWPSTAFATGLTGERWETVTAVPGGEEVVTEDLRTLAKPTAQHEEVGNGGKRWPEATVTHDWARPVSPAGSD

SEQ ID NO: 117790 - protein, 337 aa, Oryza sativa
  Clone ID: PAT_MRT4530_21162C.1.pep
MSGFLAVVGKVGTFLLWLLFLVLQTATKIVGSLLAAGPPPADAQEAAAAAACAAQPPLTAVETRSPAPSRAAAAVGGPPPKLERKYFSFVVQERASNVVIEALAQAGLESSNLIIGIDFTKSNEWTGKRSFNGMSLHHIGDSPNPYEQAITIIGQTLSAFDEDNLIPCYGFGDVLFPLSNRAASTHDQDVFAFYPDERPCNGFQEALARYREIVPHLRLSGPTSFSPIIEMATTIVEQSGGQYHVLVIIADGQVTRSVDTEFGQLSTQEQMTVDAIVQARGLFQSSREARDWFIISFFLTIEAGDLPITSRTQLRLCHVCLETFDRDIVSRILSTSE

SEQ ID NO: 117791 - protein, 197 aa, Oryza sativa
  Clone ID: PAT_MRT4530_21163C.1.pep
MSTARFIKCVTVGDGAVGKTCMLISYTSNTFPTDYVPTVFDNFSANVVVDGNTVNLGLWDTAGQEDYNRLRPLSYRGADVFLLAFSLISKASYENIHKKWIPELRHYAPNVPIVLVGTKLDLREDKQFFLDHPGLAPISTAQGEELKRMIGAAAYIECSSKTQQNVKSVFDSAIKVVLCPPKPKKKNTRKQRSCWIL

SEQ ID NO: 117792 - protein, 233 aa, Oryza sativa
  Clone ID: PAT_MRT4530_21164C.1.pep
MSTARFIKCVTVGDGAVGKTCMLISYTSNTFPTDYVPTVFDNFSANVVVDGNTVNLGLWDTAGQEDYNRLRPLSYRGADVFLLAFSLISKASYENIHKKWIPELRHYAPNVPIVLVGTKLEEKTLATKSDKNRILADLREDKQFFLDHPGLAPISTAQGEELKRMIGAAAYIECSSKTQQFVSSEILLPDIVHPHSIIYSMDQAGATFRLDAVWVTKFAGSEIFSSVLLEYYL

SEQ ID NO: 117793 - protein, 78 aa, Oryza sativa
  unsure (1)..(78): unsure at all Xaa locations
  Clone ID: PAT_MRT4530_21165C.1.pep
ACLLVVLAIEAVGSHQALGCCCVTXSRATVPTPVVHXTGCWHAERRPPQHGLPTGGVLAAASTSSCICVAPSGHSVAH

SEQ ID NO: 117794 - protein, 78 aa, Oryza sativa
  unsure (1)..(78): unsure at all Xaa locations
  Clone ID: PAT_MRT4530_21166C.1.pep
AXXXXXXXGXXPQXXXXPXNNXGTLXKXXQIXXPGXXNXXEATHXXXLPXGLFKGXPXXXXLKKXKXEXCWXGASXLP

SEQ ID NO: 117795 - protein, 663 aa, Oryza sativa
  Clone ID: PAT_MRT4530_21167C.1.pep
MRREGGNPIEEEEEMVRRRRRSVLLLLLALTVLSPLVLYTRRLSAALNPNQRRDLPGEIVNQGRGVKASKLNALPLETVGSLKEPVGIVFSEESRESASKSTEPDSQEFLLRKAGEHKNRVLSEATAADSARSEDDDLIEQVTSKDGEDDGLATVSVDQQQITTASQQRSASEPFLNFPASSLENVPEQTSMENSLEGNKDGALLDTRIRNIRDLLIKAKVYLGLGAIRANPQYLKDLRQRIREVQKVLGDASKDSDLPKNANEKVKTLEQTLIKGKLMQDDCSVVVKKLRAMLHSAEEQLHAHKKQTVFLTQLAAKTLPKGLHCLPLRLANEYFLLDPSHQQFPNKEKLDDPKLYHYALFSDNILAAAVVVNSTVLNAKHPSHHVFHIVTDRLNYAPMRMWFLSNPPGKATIEVRNIEEFTWLNASYSPVLKQLESQSMIDYYFRTHRANSDSNLKYRNPKYLSILNHLRFYLPEIYPNLHKIVFLDDDVVIKKDLTSLWSIDMKGKVIGVVETCGESFHRFDRYLNFSNPVIVKNFDPHACGWAFGMNVFDLAEWRRQNITEIYHSWQKLNQDRLLWKLGTLPPGLITFWNKTLPLNRSWHVLGLGYNPHVSSRDIERAAVIHYNGNMKPWLEIGLPKFRNYWSAYLDYDQPFLRECNINP

SEQ ID NO: 117796 - protein, 364 aa, Oryza sativa
  unsure (1)..(364): unsure at all Xaa locations
  Clone ID: PAT_MRT4530_21168C.1.pep
STCCNVTPGNSLVIXNLFVHKILVQESAEAQPXLNNHTRLYRSNSKPGAKQIITSYNIYSYVFLNTSGALANLRNDGNDKLSRKMRKKTNKNQINNTXKDHPNDQPKPANGTGGSELKDDSTRTNERSXGTPHSNERANDSTTAAAKPAATRRXRQLDSARRRLSGQQRVRCTAMTGSTLGPNNIRLXIKTLGIKYTGERQRSGGCRRTTIRPRXGDRAAGCGFGGHAHVEDDEANPTVLTTTTXRRPTTAGNDGERAAARLTGGGEEGRAAGLPHSSAHLLAAAVSGGDGRGGAAARLQPGRRRRRTKRARRRGYGALESSGEGANERGGLXGVLYIAIGGRDRAHIDGKNSGKFIFAGKRKG

SEQ ID NO: 117797 - protein, 147 aa, Oryza sativa
  unsure (1)..(147): unsure at all Xaa locations
  Clone ID: PAT_MRT4530_21169C.1.pep
CVPWRSCRRRRRSWGRSPAAPRGARCPAATSATRPPAHPPAAAPAAEPVPEFPPHPRPPPPPSPPPPPPPPPPSPYPLSPPPRGRSAIVGPPLPPHPGDLPSPHPLPGCRNGPPSPPPPPPPPPLXPSPSPPPPRPRRPPPCSLIHG

SEQ ID NO: 117798 - protein, 469 aa, Oryza sativa
  Clone ID: PAT_MRT4530_2116C.1.pep
SLTPRRPSPPSRWRRRRSRSRSRSPPRAGAGLEALEGLALDTVIAKAGARQAAALACASTRLRDAAGDDALWRRFCADDLALHAPLAPDGRALPSFKDAYKVWLESFGMYPLPLVRRVKIFWSSLKSWLSENFPEAHKTLNKGVSEAQIQSAEDDLGFKLPLPTKLLYRFCNGQLPLSEHHHENMRMAHLGIIGGYVFYDHLINVHLSPLEQIVEETKEFYREFYDQGVFNMTNLIIVATSWYRPKTFFLNCSDDQLYVGTINLQDGEMLPCVPKSLIRPTNTDMPQDGLLLWLEEHLRRLQNGMIKIRMLKTSRYISLFPEASPSCTSAMTNGVKVRASAVFAPEHPESRRPGAKCLYAYSIRLSVPEACMLGGVYYSSCQLYSRHWIIRWRDRVVSDVNGEGVIGKYPLLTTGQEEFVYESCTPLPDSPGSVEGSFTFVPGKLSRPEGKPFEVTVAAFPLEIPEYIF

SEQ ID NO: 117799 - protein, 164 aa, Oryza sativa
  unsure (1)..(164): unsure at all Xaa locations
  Clone ID: PAT_MRT4530_21170C.1.pep
MIDFLLNFLNVTPINSLVISELXFVHKTLVQESAEAQPXLNNHTRLYRSISXPGMYHSKPGANQIITSYSIIYYVFLNTSGALANLRNDRNYMLTRKTRKKTKKLQINSTYKDHSNDQPKPANGTGGSERLXLKDDLTWTNERSTGNTSXNERANDSTTAVTKP

SEQ ID NO: 117800 - protein, 57 aa, Oryza sativa
  Clone ID: PAT_MRT4530_21171C.1.pep
QALVPPKLYLMKGQQISHALLEDMTTQLNDTDWNHHYTTPSDYGEMCTRMAYNHIGQ

SEQ ID NO: 117801 - protein, 376 aa, Oryza sativa
  unsure (1)..(376): unsure at all Xaa locations
  Clone ID: PAT_MRT4530_21172C.1.pep
VGIQPYRSSTNIVCHVCVTPENSLVIXNLFVHKILVQESAEAQPXLNNHTRLYRSNSKPGAKQIITNXSIFYNVFLNTSGALANLRNDGNDKLTRKTRKKTNKNQINNTXKDHPNDQPKPANGTGGSELKDDSTRTNERSXGTPHSNERANDSTTAAAKPESERRPHRETVVNGEEEAMATVRRQHTETMMTLGPNKIRLDGIKTLRINYTGERQRSGGCRRTTIRPRRRXAAGCGFGXACTRRGRRGEPNGTHHNDNRRPTTAGNDGERAAARLTGGGEEERAAGLPHSSAHLLAAAASGGDGRGGAAARLQPGRRRRRTKRRRRRATVHGRPRERGQTKEEDXGVLFIAMGARVRAQNDGKNSGKFIFAGKRKG

SEQ ID NO: 117802 - protein, 66 aa, Oryza sativa
  unsure (1)..(66): unsure at all Xaa locations
  Clone ID: PAT_MRT4530_21173C.1.pep
WEWVGEPPQPQPGRKNDKTSTTTMASTPPQPPAGXTEAAASSLLLQELEELIGASAFPTLEXWGMI

SEQ ID NO: 117803 - protein, 344 aa, Oryza sativa
  Clone ID: PAT_MRT4530_21174C.1.pep
MGPTTRGRGWDGRWHQEEEEEAWGVEKMMMIGFGIGGVAGALPLVLRRCNRSRTPPPPMVMTPLHRSCFFFRPQPSSLSHYPSPSPCAADDLFTVDYDPEEEEEEEDEEGSPWEGAVVYRRDASVHHLEYATTLERLGLGDLSSPHSRARAATMGILILSSPNLTGTKDETPVLVSLDVARRRGRLRLDGIVRTVITLGCYGCAEPAPQGIFANFSLLLTEGRVEEPDVVDLGTIFEEEQTKAPVLTGSQEDGDDEDIDWDDRLHFPAGEKEVDISKHIRDIIHLEITLDALCSPTCKGLCVGCGENLNTSSCSCNTEKQQAKAKNVQRRGPLKRPVETTAKVM

SEQ ID NO: 117804 - protein, 392 aa, Oryza sativa
  unsure (1)..(392): unsure at all Xaa locations
  Clone ID: PAT_MRT4530_21175C.1.pep
YSKLASKHVTPGNSLVIXNLFVHEILVQESAEAQPXLNNHTRLNRSNSKPGAKQIITSYNIHNYVFLNTSGALANLRNDGNDKLTRKTRKKTNKNQINNTXKDHPNDQPKPANGTGGSELKDDSTRTNERSXGTPHSNERANDSTTAAAKPTAARRLQNXTRATATRXASSGQQRVRCTAMTGSTLGPNKIRLXIKTLGIKYTGERQRRRRTATEDGRRRASKGGEVLSTAATTFRRCAATTEGWPGFTSQLRIQWSRRRPNAATDDDEXAAGDTATTAALWFTTTGNLRWDLAQNNRWPRXALTLAKPREATAQGGTDQRGGAAPLEMVAAVEREDKRGESDSGDRGGRDLRGXVEDDEGVLYIGTGAREKAHNDGKNSGKSRVLAGKRKD

SEQ ID NO: 117805 - protein, 97 aa, Oryza sativa
  Clone ID: PAT_MRT4530_21176C.1.pep
DFREVACEINNVLPSYSLHSSTDDIQSQSASFSNPCFMELMLLAAWNIWKERNNLIFNGIQPEVLSWKRNLKLDLSLHLPRLKEIHRPLVQSWIDLL

SEQ ID NO: 117806 - protein, 43 aa, Oryza sativa
  Clone ID: PAT_MRT4530_21177C.1.pep
MASTPFLHDGSSHVANLHEHYWGYPLSLFAQQPNLRQASTVRM

SEQ ID NO: 117807 - protein, 114 aa, Oryza sativa
  Clone ID: PAT_MRT4530_21178C.1.pep
MKFISAYLMAYLAGNSSPTAEDLTTILESVGCEIDNAKMELLLSQVSGKDITELIACGREKFASVPSGGGGVAVAAAAPAAGGAGGAPAAEAKKEDKVEEKEESDDDMGFSLFD

SEQ ID NO: 117808 - protein, 55 aa, Oryza sativa
  Clone ID: PAT_MRT4530_21179C.1.pep
SQFHIQLILESSQLMPSCTADASFQLLLTKYFIPTLFPGEESVHLLCLLHPLVVA

SEQ ID NO: 117809 - protein, 163 aa, Oryza sativa
  Clone ID: PAT_MRT4530_2117C.1.pep
TAAAEAAARRGEARRRRWRRGEAAAEEARGWRGERVGKARRRRRRQGGGEARRLRVARDTTAAASSAAPRRRARLLRRNPPPLVSSATSHRRSSHPPHPAAARLLRRMPPPLASSAAPAAARRLIPRRSPPPPPPLPVARLPPRGLPRVRHVEQIHHGLGRGG

SEQ ID NO: 117810 - protein, 49 aa, Oryza sativa
  unsure (1)..(49): unsure at all Xaa locations
  Clone ID: PAT_MRT4530_21180C.1.pep
LHTKWIIIXQQILXDTFPVSVINQLFLEAFPSLLRRLNIPVVLANPENA

SEQ ID NO: 117811 - protein, 57 aa, Oryza sativa
  Clone ID: PAT_MRT4530_21181C.1.pep
VLHLKRGTFRGLAKQLNFARLPMASIVAPIAGATPAIVKAKAIYYLIANAPACLHYE

SEQ ID NO: 117812 - protein, 69 aa, Oryza sativa
  Clone ID: PAT_MRT4530_21182C.1.pep
MAVVICTLALILAQQQLMAVDASPAEQHGRRLLGDCWVWDCPSAEADGCCTMSGCTSTCVDGVTACVCG

SEQ ID NO: 117813 - protein, 212 aa, Oryza sativa
  Clone ID: PAT_MRT4530_21183C.1.pep
MGFPVGYSELLLPRLLLQVLLLLGHLHRFLLWAFHAVGLGDLIDNPPGLAATEQDMMLQGRGGGMAEGWASSSALQHRRPEFRAIPPMAIEEALPVVRFDELVASAPAAVCGGGDCAVCLSGICGRDEVRRLSNCRHVFHRGCLDRWMAHEQRTCPLCRAPLIPDELLPAASGLPDPSDYDLSYYPSPLPLAPTPTLLRPHELLLNGLGGFQ

SEQ ID NO: 117814 - protein, 95 aa, Oryza sativa
  unsure (1)..(95): unsure at all Xaa locations
  Clone ID: PAT_MRT4530_21184C.1.pep
YFFSNSDELLSFSGAGDNPNSGVGRRIRVLGWVRWEGXEGDRGGKKGEFAGLRGMVIGDGGPAVGGGTGGRXGAGGGAEAAGMEAGGGPVLVAGA

SEQ ID NO: 117815 - protein, 95 aa, Oryza sativa
  Clone ID: PAT_MRT4530_21185C.1.pep
KGAHGGCLLTNASYASPKGILYCQNPFWQLFKKSGSYATLLKPPPPPPENPVESEVPVPEPPKENPEPEGAPKEKKKKASPDQVPEAVVKAPEPS

SEQ ID NO: 117816 - protein, 33 aa, Oryza sativa
  Clone ID: PAT_MRT4530_21186C.1.pep
MAVELGVVAVADASLKGNVEKPKLPVKSLELLK

SEQ ID NO: 117817 - protein, 417 aa, Oryza sativa
  Clone ID: PAT_MRT4530_21187C.1.pep
MAAADPPPPPTGMGFLGLLSFRRSATAVASFDPAQDDELQVLHALQAHVADRLAALSHHPPLLSLAFLSKLLDAVLSSDDAFREVLGIGPVAAALSRPPADRLAADLLDRTVKTLDILNAVSLTLASLRGSHRAALTAASCLLAPPLHRAHFGRARRAISRLFPDAAKLAAAPSPSCRAGPARALSFSVSRNWSSGRHVHAMAAHLAPPPQSPTSASPGAGCGLGLALYTMSSVLVFSMWALVAAVPCQDRSSAATNPPVAPPKQVQWAAPMCALQERIADEWRKKDKKGSSSGSAAATGLLAEMQAVERAARELSSLLEEVAEEEEEEQLVMGATDERARDVVERAEALAAACRALEEGLAPLERQVRAVFHRVVASRGEVVRIMEHSTRSNSSATASAAAAAASGSGAPPHHHSF

SEQ ID NO: 117818 - protein, 63 aa, Oryza sativa
  unsure (1)..(63): unsure at all Xaa locations
  Clone ID: PAT_MRT4530_21188C.1.pep
KSNGGQVLKGVGKTAVPPATWRSGVGHGARXPEGPRGVMWHPEAPRAPLRRPRCGGRARLYGR

SEQ ID NO: 117819 - protein, 916 aa, Oryza sativa
  unsure (1)..(916): unsure at all Xaa locations
  Clone ID: PAT_MRT4530_21189C.1.pep
MEACCCSSSSVPSASILATGAGLRRRFSPAGAGGGGRAVAVAAGRPIRASAALLAAPAPRRRGGVVVRAVFERFTERAVKAVVFSQREARGMGDETVAPHHLLLGLVAEDRSPLGFLASGVRVERAREACRAAVGKEGLAQAPVGLATDVPFSGASKRVFEAAVEFSRNMGCNFISPEHIALGLFNLNDPTTNNVLKSLGVDSSQLAKQALTRVQGELAKDGREPVGLSSFKVREKFTPGGGKSAIVKYSNKNKEKSALALFCLDLTMRASGGLIDPVIGRKDEIERVVQIICRRTKNNPILLGEAGVGKTAIAEGLAHKIANGDVPIFLVGKRILSLDVALLMAGAKERGELEARVTSLIREVRKADPKLPFLVFNLQRAPKFHAGDVILFIDEVHTLIGSGIAGRGSKGAGLDIANLLKPALARGELQCIASTTLDEHRLHFDKDKALARRFQPVLVNEPSQEDAVKILLGLREKYETYHKCKYTLESINAAVYLSARYIADRHLPDKAIDLIDEAGSRARMESFKRKKEEQCSILSKSPDEYWQEIRAVQNMHEVALTNKVKYSLNQNDQEDAVDIELXPSLVGSEEIARVTSXWSGIPVQQLTADERKLLVGLDDELRKRVIGQDDAVLANAACRKSATVRLDMSEYMERHAVSKLIGSPPGYMGFGEGGTLTEAVRRKPFTVVLLDEIEKAHPDIFNILLQIFEDGHLTDSQGRRVSFKNTLIVMTSNVGSTSISNGKRSIGFQTQTDTEEKSYAAMKSLVMEELKAFFRPELLNRIDEVVVFHPLEKTQAYTALAYCLVLLLILIEIMLAILNIMLQEVKGRILALGIGLEVSDSMKDLISQHGYDKSYGARPLRRAVTQLVEDVISEAILSGQFKPGDTIMVDTDATGKPCLSRLNDQTVQLSDPTPTL

SEQ ID NO: 117820 - protein, 707 aa, Oryza sativa
  Clone ID: PAT_MRT4530_2118C.1.pep
MLRALNTPTPPLRLRPACRVASQCGGRPSTRRRGAGGGPRRAVPQPPVRRPSGDRACTPWRGGVGAAAPAPVTPVAAAGARDELEAFLEVVPARMRRGLARHPEVRELVEVVMDLGRRPLARFPSGDWVISEQAVTADDLHQAVSKVGDFSEDNRSGINHSLHRISAIRNRKAHIIGLTCRVGRAISGSAEMIRDLVVGGGSILVIGPPGVGKTTLISLRCFQQYREIARILADEGKKRVIIVDTSNEIGGDGDVPHSGIGRSRRMQVPKVSMQHNVMIEAVENHMPEVIVIDEIGTELEAMAASTIAQRGVQLVGTAHGVTIESIIKNPCLQVLVGGIESVTLGDEEAKKRKVQKTILERKGPPTFSCAVEMISKTECRVHHKLEATVDAILAGKPPKFEARKMDYKATESGRSLVIPEREYETEPLPSYQEHHFAKAMPSEDNFDDDFSTRRTESKSVPSNDNFNDDFGSTRKTKGKTSVPGKSPVHVYTYQISEADILQVATVMGFDDELDVTDDIGAANVILASSSEMKQNHWIRNVAKYHKLPIFVVKTNTMAQIVKAVRMIVGRDKLNAPTRKQPKVVVGEIEIEDDAPKRKPSLEEIDALEEARLAIEYIVIPGGEPVELLPRCSEIVARQLELVESYQLLAETFGTDSNSRLQILPVKITKKSSSKGSAGSMPKQGSSDLIVSDNGGGSSFSRLPFLPK

SEQ ID NO: 117821 - protein, 130 aa, Oryza sativa
  Clone ID: PAT_MRT4530_21190C.1.pep
HLPDNLQMLAILNIMLQEVKGRILALGIGLEVSDSMKDLISQHGYDKSYGARPLRRAVTQLVEDVISEAILSGQFKPGDTIMVDTDATGKPCLSRLNDQTVQLSDPTPTLLKVQTPLCIFVIYSFILPHR

SEQ ID NO: 117822 - protein, 180 aa, Oryza sativa
  Clone ID: PAT_MRT4530_21191C.1.pep
MAQLSTGQVAGWNKSRRVRPSSAGGGGRSAPMRRGWGASPNVALLFMFGGPPAKKGGSPWWVKPVLSPPLQGAFRGAGWCFSSPQARGGVGGFCFCFFFFFFFFFFRHFFFFFFFSPSFSGGAGPPPLKKNKLYIFKIKKKKKKKKKKKKKKKKKKKKKKKKKEKKKQNKNKKEKRKIKR

SEQ ID NO: 117823 - protein, 172 aa, Oryza sativa
  Clone ID: PAT_MRT4530_21192C.1.pep
MVRLDCDAWCSASGGGGGGSVGSGSNEGGGAGRFCKLQWLYCGVVSGVPLATIQKGVGVAIASSFVLLFCPVSCSTSYKCLGDGDWMVRRGDNYNKERHWQDEGKLVGNASDGWGATLDLGPKCCCIVSELSIGIWWGKERIKYGCNVDEEYRSLDSISRSTWCGSWYGRAR

SEQ ID NO: 117824 - protein, 130 aa, Oryza sativa
  unsure (1)..(130): unsure at all Xaa locations
  Clone ID: PAT_MRT4530_21193C.1.pep
IWSIAHNCGHGYSNSFTLASGAQLYPEDTIHRHVTASSCTHDEHVTMSSDCDKTLHITPXDQSHHTSGFTPTXSQAAGNPPSCLGESGSDKGRRRTHPXSITPTLAWMRQPEKNYTSSQAVTHSLLWQAL

SEQ ID NO: 117825 - protein, 90 aa, Oryza sativa
  Clone ID: PAT_MRT4530_21194C.1.pep
MASQQVLMVAVVSGVPLATIQKGVGVAIASSFVLLFCPVSCSTSYKCLGDGDWMVRRGGEMEVAVVADNYNKERHWQDEGKLVGNASDGW

SEQ ID NO: 117826 - protein, 96 aa, Oryza sativa
  unsure (1)..(96): unsure at all Xaa locations
  Clone ID: PAT_MRT4530_21195C.1.pep
RFPKRCRQRLPPAAASHXARARPSRPPAAWEGXGGGEGRGWEGKERRRRGRRREIDLRGRKGGGXEIDLSGWEGRMGRRGPGMGGGGGGGGEGDRS

SEQ ID NO: 117827 - protein, 100 aa, Oryza sativa
  Clone ID: PAT_MRT4530_21196C.1.pep
MPLPLPLPGRFSGVFLSSPHATSCSWSYTLTAAAHAGISSVPITTKNSSMLVFVSSSGGTHGQGKEAASAQEGRAGEVAGSGESETEACRADQGPLGGCK

SEQ ID NO: 117828 - protein, 98 aa, Oryza sativa
  Clone ID: PAT_MRT4530_21197C.1.pep
MRSPTRKRTLCEGGGGGGGGGLRWRSERSPKSGGGSVAAEARNSPAARPQPPLFTTTAIEAAVAGLITRLLRGAGAAGRRRRAWRWRVSSLDGKWMRW

SEQ ID NO: 117829 - protein, 58 aa, Oryza sativa
  Clone ID: PAT_MRT4530_21198C.1.pep
TLMVFPRKCFLRKNSCLRCAYIFITSLLCHFWLMCRQQAPEAPWGKEGAELQPPSLIA

SEQ ID NO: 117830 - protein, 402 aa, Oryza sativa
  Clone ID: PAT_MRT4530_21199C.1.pep
MAGERRWSTAAAAAGWLRVAAVVVAAASAASSAAGEGVGRQTVPAMYVFGDSLVDVGNNDFLPPPAPRPPEPPCGIDLPPEAAAADGGGGGRFTNGFNLADVIAQHVGFKKSPPAYLSLTTPGRDGELRRGLVGANYASSGSGILDFIGNGTISLGEQVKLFTKTKEAMITAGEVDGENIDNLLSQSLFITCTGGNDYNAFTDGIVPVSDAPAFIAHMVATYIKHIKTLYNLGARRLGILDVLPLGCLPISRVPIENGSCSGTDNWQARLFNRLLRREMTAAATASMPDLVYSIGSIYYTFYDMIKNPSSAGVREVARACCGDGKLNAEADCSATTHLCPDRDNYIFWDKVHGTQAAYHNCVHAFFHGSPRYAEPISFTQLVASPAVDLGRPSPGTNRTARI

SEQ ID NO: 117831 - protein, 34 aa, Oryza sativa
  Clone ID: PAT_MRT4530_2119C.1.pep
SSHTALAAHSCSWQNQHTAFLPAPFIAMLSSSCT

SEQ ID NO: 117832 - protein, 137 aa, Oryza sativa
  Clone ID: PAT_MRT4530_211C.1.pep
ECWRYSWPNGPPGTARPRPRRAWAEASRASTARPTRWAVPCQPMCCTHGPGTTQYDSGRAGLARRYNSPLCFILFFFNRAVPGQPTVPKVQPRHGPTVGPGRHGHDPSRAVLGPGQNGVSWPGPRASGHMAIYSWRA

SEQ ID NO: 117833 - protein, 57 aa, Oryza sativa
  Clone ID: PAT_MRT4530_21200C.1.pep
RRAHCVFLDNTIQRRDNGVRRDRGYHWWDKFRSFKTDTRSEKFYFLPFNLNKFFPSV

SEQ ID NO: 117834 - protein, 499 aa, Oryza sativa
  unsure (1)..(499): unsure at all Xaa locations
  Clone ID: PAT_MRT4530_21201C.1.pep
RTRGRTRGFGIKRHMKRQGDLQHEYSGNDCLQLKGHDAHTEVAYLLEHLKICMFYSKKTFSAFLQFGGYNQEDILIHKARARLMQPSFALVCDKKSKCFLLFIRGAISTKERLTAATAAEVPFHHIVLSEGQISNVVLGYAHCGMLAAARWIANLAKPHLHKAVQEFPDXHEEVIGHSRGAGIGAILTYILHEHHEFSSCTCLAFAPPACMSWELAESGKEFXRHATRRNDVVPAFSKVSAENLRAEVMVSSKLDDEQDQAHFSLFTAISKRVAFIKSHMLSVSHPTEKNTDPDSSISEPLLKHVPEITQPVTNGLSTDCNQHQTDLVANTEQDFSAVSVVTSEEKIVLSSNDNVISTKSVAGSGFAAQGDVNINGSLDTEQEQSSLTGQEEPESLKQNCDIKDKLKEPLPTCSSRQFFPPGRIIHMVAMASPDPNPGEGSSSNEIISIYETPRDLYGKIRLAPNMIKEHYMPSYISTMESLLEQLLKDDNVDTITNDL

SEQ ID NO: 117835 - protein, 902 aa, Oryza sativa
  Clone ID: PAT_MRT4530_21202C.1.pep
MDFSKIVGAINGINEISTLCKMVKDIIKSCWSGIREQELQDKVMKLENDLERFRDILPAMYNLIDRAEWTIHKDHVPELLLKLKDAVYDAEDLLDELKWHELKVAMEGSANKSPLIDFLDSVIQGSFNKVSGTYEKLNNVSSLLEKMGLHEVTQHFDKSFRPETTSFPTETEMFGRDNELEQVMQSLGVPAKGSRVLSKRKKPSSAINASPSTSKTKQHNGTQMSDESGITCIPVLPIYGIGGVGKTTLAQHICHDSRVMSHFDPIIWICVSDDFDVKRLTKEAIQSCSTKEADNLDYLQRALSEEVMNKRLLIILDDMWGDVLRESGHCWKRFCAPLTNALQGSMMLVTTRSPDVAREVQTMEPIRLEGLQDDVFWDFFKLCAFGSKNSENYPELVHIGKSIVQKLKGVPLAAKTLGRLLRMSLDTEYWNRILKSELWELKQNNTEILPALRLSYLYLPTHLKRCFSFCAVYPKDHKFEEDNLAEIWIAEGFVQPEGNTLILDTGKQYFEDLVNRSFFQSVGVSKDDCFILKDKDDFEKGVGLTLMKNVNQICGGVTINNLGATSKDIAAESAIKNKKNLDRLNLKWSSVRSQDHNDIEVLQVLIPPTSLKCLTLYGYLGQSLPNWFYPHNLPSLKSLEFHDCHRLCSLPFYGISPPCINLNEVPEVPIENGMGSIGVFSSLVDLKIVKCDYLSNLDKFIQPACIPAIKRITLQRLTYTKTKVLPLPIGKFDCLEELDVAGYQIFNASESLSMRTLKELKLCNSGDLPCFFEFPSLTNMFLVVLPVTSIPLRVWCSNLPALLRLKIYSCANLEFIGESVFTGNRPQRDSCSTTTFASLISLEICGCEKLTSIDDLVTPEYLPAIEKIDVSSCVKLSSLPGWSNWRDGANRCMTVGELPALL

SEQ ID NO: 117836 - protein, 105 aa, Oryza sativa
  Clone ID: PAT_MRT4530_21203C.1.pep
MTATSLLLLLVAAPTRPPPAADLLLLSSRQFISPRRDAPIMHAPDLTRSREEISRESYSRPDPPAARRVATPTATERDGPPAGPPNVAHIQRPRPGTWRRPGDGR

SEQ ID NO: 117837 - protein, 1569 aa, Oryza sativa
  unsure (1)..(1569): unsure at all Xaa locations
  Clone ID: PAT_MRT4530_21204C.1.pep
MKLSDLTAVRQRHDETVQDYIQRFREMRNTCYSLALTDSQLADLAFQGLIARIKEKFSSQDFESLFHLAQKVTMHEQRFAEAKKNFKKINHVYPYIYDSDVEDDSEVAAAGWVRSKKVVTCPLVRSSGKEERFDFDITKADKIFDLLLREKQIQLPASHIIPSAEELGKRRYCKWHNSGFYYTNDCKVFRQQIQVAIEGXKIKFDDSKKPMKVDGNPFPINMVHTSGRTADGGRSQNSQLNSVRIINKYQKKFYWNQGMRLPSIEDCPGCSDIAXSSSRSYNRSYRPSQKRLPVHQRLGLINQDRHQDEDEDGKTQWCPPAEFEAKEADVDDVEEASARLVLSPKQTIFEKPEGTENRHLKPLYVNGFVNGKPMSKMMVDGGATVNLMPCATFRKLGRNSNDLIKTNMVLKDFGGNPSETKGVLNVELTVGSKTVPTTFXVIDGKGSYSLLLGXRDWIYANCCIPSTMHQCLIRWQGDKIEIVPADSXLKMESPSYYFEGIVEGSNVYSKDRVDDLDDKQGQGFMSVDDLDEIDIGPXIDQGRHSLIELLKEFRDYFAWEYYEMPGLSRSIVEHRLPIKPGVRPHQQPPRRCKADMLDAVKAEVARLYDASFIRPCRYAEWISNIVSVIKKNGKVRVCIYFRDLNKATPKDEYPMPIADQLVDAASGHKILSFMDGNAGYNQIFMAEEDIHKTAFRCPGAIGLFEWVVMTFSLKSAGGTYQRAMNYIFHDLIGWLVEVYIDDVVVKSKEIADHIADLRKVFERTRKYGLKMNPMKCAFGVSAGQFLGFFLXHERGMEVPQRSIYAIKKIQPPEDKKKLQKLIGKINFIRRFIXLRLKADQELTWGAEERKALDNIKEYLSSPSVLIPPQKGVPFRLYLLAGEKSISSILIQELEGKGRVIFYLSRRLLDVETRYSSVEKLCLCLYFSCTKLRHYLLSNECTVICKADVVKYMLSAPIFKGRVGKWIFALTEFDLRYESLKAVKGQAVADFIVDHRDDSIGSVEIMPWTLFFDGSVCTHGCRFGLVIISPRRASFEFAYMIKPYATNNQAEYEAALKGLQLLKEVETDAVEIMGDSLLVISQLAEEYECKNDTLIIYNEKCRELMDSFRLVTLRHVSREQNVEANDLAQGASGXKPMIRDIEVEVAMITADDWRYDVFNYLQNPCQSASRKLRYKALKYTLLDDELNYRTIDGVLLKCLSADQAKVIMGEVHEGICGTHQSAHKMKXLLRRAGYFWPMMLEDCFRYYKGCQDCQKFGAVQRAPASAMNPIIKPWPFRGWGIDMIGMVNPPSSKGHKFILVATDYFTKWVEAIPLKKLDSRDAIQFVQEHIIYRFRIPQTITTDQGSIFVSDEFVQFADSMGIKLLNSSPYYAQANGQVEASNKSLIKLIKRKISDYPWQWHTRLVEALWSIXMAYHGSIQVPPCKLVYGHEAVLPWEIRIGSRRIDLQDELTADEYYNLMADEKEDFVQSRLRALARVTKDKERVARHYNKKVVPKYFSEGELVWKLILSIGTRDNKFGKWSPNWEGTFQIHKVVSKGAYMLQGLDGKVYGRALNGKYLKKYYPSVWINS

SEQ ID NO: 117838 - protein, 1770 aa, Oryza sativa
  unsure (1)..(1770): unsure at all Xaa locations
  Clone ID: PAT_MRT4530_21205C.1.pep
MKLGQVHLKVLRVLQXCSGDKGDGLQDGLVEDLGEDGTEEQQPLKFNSFQDQVDYAVKHALMNQLGVIVNTLSNMIKSMVDGTIAEHQNTGPVYLPGGVFPNYRELVTGNQQPAISAPPAXPMAPASAPAPVAPSSAQRQMTNPRLLTRERPXHAAQNINRLTQEQMVRQVPTGLRTPDNRQRQQNVAQVIPKHLVHNVQPNQSAVAQVVPKHLVHNIRPNFQNYQGGNLNYQYQPPSPHVQHQQGGSPQLQTLPQFSQFDPMQQQMQGVPQQKPWADVMREQFGLKPKDSGNLYRHLYPEWFEKVSLPNRYKVPDFSKFSCGVHEMKLSDLTAVRQRHDETVQDYIQRFREMRNTCYSLALTDSQLADLAFQGLIARIKEKFSSQDFESLFHLAQKVTMHEQRFAEAKKNFKKINHVYPYIYDSDVEDDSEVAAAGWVRSKKVVTCPLVRSSGKEERFDFDITKXLTRFLICCFGRNRFNFLLVAIEGXKIKFDDSKKPMKKKHDKQQERFDEEVDDGFDSHWDCEFFRFYWNQGMRLPSIEDCPGCSDIAXSSSRSYNRSYRPSQKRLPVHQRLGLINQDRHQDEDEDGKTQWCPSGIFTKNQKRRVQRMRNRERFXEVQQEINHRLKKTKTKQEWRVKSTVTTADEVEADKTKRLLKGKATASASVNMVFMLPAEFEAKEADVDDVEEASARLVLSPKQTIFEKPEGTENRHLKPLYVNGFVNGKPMSKMMVDGGATVNLMPCATFRKLGRNSNDLIKTNMVLKDFGGNPSETKGVLNVELTVGSKTVPTTFXVIDGKGSYSLLLGXRDWIYANCCIPSTMHQCLIRWQGDKIEIVPADRSVNVASADLALWEMDGIDCLSGKGIVEGSNVYSKDRVDDLDDKQGQGFMSVDDLDEIDIGPGDRPRPTFISKNLSSEFRTKLIELLKEFRDYFAWEYYEMPGLSRSIVEHRLPIKPGVRPHQQPPRRCKADMLDAVKAEVARLYDASFIRPCRYAEWISNIVSVIKKNGKVRVCIYFRDLNKATPKDEYPMPIADQLVDAASGHKILSFMDGNAGYNQIFMAEEDIHKTAFRCPGAIGLFEWVVMTFSLKSAGGTYQRAMNYIFHDLIGWLVEVYIDDVVVKSKEIADHIADLRKVFERTRKYGLKMNPMKCAFGVSAGQFLGFFLXHERGMEVPQRSIYAIKKIQPPEDKKKLQKLIGKINFIRRFIXLRLKADQELTWGAEERKALDNIKEYLSSPSVLIPPQKGVPFRLYLLAETRYSXVEKWGLGLYFSCTKLRHYLLSNECTVICKADVVKYMLSAPIFKGRVGKWIFALTEFDLRYESLKAVKGQAVADFIVDHRDDSIGSVEIMPWTLFFDGSVCTHGCRFGLVIISPRRASFEFAYMIKPYATNNQAEYEAALKGLQLLKEVETDAVEIMGDSLLVISQLAEEYECKNDTLIIYNEKCRELMDSFRLVTLRHVSREQNVEANDLAQGASGXKPMIRDIEVEVAMITADDWRYDVFNYLQNPCQSASRKLRYKALKYTLLDDELNYRTIDGVLLKCLSADQAKVIMGEVHEGICGTHQSAHKMKXLLRRAGYFWPMMLEDCFRYYKGCQDCQKFGAVQRAPASAMNPIIKPWPFREPLQPIKVQSLCXDEFVQFADSMGIKLLNSSPYYAQANGQVEASNKSLIKLIKRKISDYPWQWHTRLVEALWSIXMAYHGSIQVPPCKLVYGHEAVLPWEIRIGSRRIDLQDELTADEYYNLMADEKEDFVQSRLRALARVTKDK

SEQ ID NO: 117839 - protein, 71 aa, Oryza sativa
  unsure (1)..(71): unsure at all Xaa locations
  Clone ID: PAT_MRT4530_21206C.1.pep
LLRRYYQRVRKVLARGFLNDVRVGTLLSGLVKKHGSAHHPTIRTMGPEFXHMIKQASSTTCSREAHLLCMG

SEQ ID NO: 117840 - protein, 214 aa, Oryza sativa
  unsure (1)..(214): unsure at all Xaa locations
  Clone ID: PAT_MRT4530_21207C.1.pep
MAACFRCAQSAAAASGPAGPNRLPPXGTALSIAVVHDAMAASTARISSSAMLLGTWPTNSHILSPSSSSASPVITPQQLCGWNSGGGPFSSSFSPGRGRTAMMVCHDVEMPFLRGINVNRPAPAAETTTVRGATVARRKRSPARPPPTXHALQPAATTRTAAAAVDLVYRGWGRDGSSSSREKRREEKREERKEKKIRYAADMWTPHALLTRMS

SEQ ID NO: 117841 - protein, 905 aa, Oryza sativa
  unsure (1)..(905): unsure at all Xaa locations
  Clone ID: PAT_MRT4530_21208C.1.pep
MSRGSREEEDEEEVYDSEEEEEEEGEVEERGGKRSRGGGGGGKWSGVESFIDDAASEDEDEEEEEDDDEDYVGGGGGRARKRKRASILIDDMAQVDDEEEEEEDGEFEDGFIDDTRADDPDQDVGRSSRRHPSSMLDEEEDVDALVKLIHDRYIIPSSHFVDDDDGVTEVEQQALLPSVKDPKLWMVKCAIGHERETAICLMQKSIDTPDLQIKSVLALDHLKNYIYVEAYKEAHVKEACKGVRNIFASRKVTLVPIREVADVLSVQSKSTDISINTWVRMKLGAYKGDLAKVVDVDDVHQKVTVKLIPRIDLQALANKFDGLKVVKEKKSFVPPPKLFSANEAREPDNDINEDAASLSTLFTNRKKGHFMKGDSVIVIKGDLKNLEGYVEKAEDATVHIRSKLPGLLNTLVFNEGDLCKCFNPGDHVKVVSGVQEGATGLVVKVEGHVLIILSDTTKEHIRVFADHVVESSEVTTGLTRIGDYELHDLVLLXGKQGSVEHIHRGVLFIYDRHHLEHSGFICASAQSCLLVGGSTGSRRGNGYGYSXPRFGAFRSSARILQSPGRLPPKAPHTNYGRRFGGRDHGGKGHDTLVNRCIKIKSGPYKGYRGRVKEMTGALVRVELDSLMKVVAVKREDIADTATVATPFGESHNSWGNETPVHPSRTPLRPFQTPLRDPGATPVPNGMRTPMPSRAWAPMSPPRLALGWQSMPGTPVPQPHEAPTPGSGWAVTPGVSFGDASGKNPSSYATPTPSGQPMTPNPASYLPSTPGGQPMTLGYIEMDIMSPAIGEEGGRNWLLPDVLVNVLREGYDTTCGVVKEVLPDGSCRVALGSSGSGDEITAFPNEFEVVKPKKNDKLKIMSGSWRGLTGKLLGVDGSDGIVKVDGLETTDQTKILDTAILGKLAA

SEQ ID NO: 117842 - protein, 331 aa, Oryza sativa
  unsure (1)..(331): unsure at all Xaa locations
  Clone ID: PAT_MRT4530_21209C.1.pep
LEAPSSPLLSSHSPLHAMHERRSRLSXARLSCFRSQSRAKMADDDYPVKLHIYDLSQGMARQLSTTILGKAIEAIWHTGVVVYGKEYFFGGGIQKDHPGRTPYGTPVRVEDLGVTHVPREIFEDFLQDINPRYTPANYNLLSNNCNNFTNEAAQFLVGSAIPSYILELPNEVMNSPIGALILPMIQGLETSLRAGVAPQPPQFKPSPVAAVTATQSPPSGSIHVEPKSTASDKTEVDNNGGGIPPAVQPAPVAAATSPAAVAEASMAPPPPVDPLREAKSRVQEEIKREFAAIMATGAVQAGEAAALATRRVMERHGLRRAAVAGGGMQRG

SEQ ID NO: 117843 - protein, 54 aa, Oryza sativa
  unsure (1)..(54): unsure at all Xaa locations
  Clone ID: PAT_MRT4530_2120C.1.pep
PPPPPPSNIDVLGCNFIISIYDNITLQFHRSIYDSETYVKKYFHFFXMTVHTGF

SEQ ID NO: 117844 - protein, 71 aa, Oryza sativa
  Clone ID: PAT_MRT4530_21210C.1.pep
RDKLALHCEKRDDKRCGSNWELIPSKSSISTDGSRQSILAPTTSLYHGEDFGFVLHDTKDCCSSLQQLGVR

SEQ ID NO: 117845 - protein, 243 aa, Oryza sativa
  Clone ID: PAT_MRT4530_21211C.1.pep
MTEYWVSQGNKWCDFCKIYIANNPLSIRTHEIGKRHKDNVTKRLATMQKEGAAKEKEQQQAARALKQIEAKAKKSYQKDLENSQRNVDGDTSAAPGDGWEFDSTSGYYYDKSTGLYFDSNSGFYYSDGLGKWVTQEEAYAWAKTSQANAGQSSSSQTKPTASVATVPTIKGGQAPGLVVKKPLNPMRTVKGAPSAIAVNKRKREDGKPKVISKEEEAALKAREAARKRMEDREKPLMGLYRSY

SEQ ID NO: 117846 - protein, 117 aa, Oryza sativa
  unsure (1)..(117): unsure at all Xaa locations
  Clone ID: PAT_MRT4530_21212C.1.pep
MTEYWVSQGNKWCDFCKIYIANNPLSIRTHEIGKRHKDNVTKRLATMQKEGAAKEKEQQQAARALKQIEAKAKKSYQKDLXTVKEMVDGDTSAALGDGWEFDSTSGYYYDKSTGTLF

SEQ ID NO: 117847 - protein, 57 aa, Oryza sativa
  Clone ID: PAT_MRT4530_21213C.1.pep
GTEKLSPALSGMEPSVTMPGLCSLKVGQNAIAAALRREAQSAFNKPPRRRLPFPAQE

SEQ ID NO: 117848 - protein, 612 aa, Oryza sativa
  unsure (1)..(612): unsure at all Xaa locations
  Clone ID: PAT_MRT4530_21214C.1.pep
MVRSGSVRRTAASSSPAAAAVPTAFTASPGDYRLLEEVGYGANAVVYRAVFLPSNRTVAVKCLDLDRVNSNLDDIRKEAQTMSLIDHPNVIRAYCSFVVDHNLWVIMPFMSEGSCLHLMKVAYPDGFEEPVIASILKETLKALEYLHRQGHIHRDVKRNIIQAGNILMDSPGIVKLGDFGVSACMFDRGXAPEVLQPGAGYNFKYVGXNSNYHKNTGNKVLLMTLQNAPPGLDYDRDKRFSKSFKEMVAMCLVKDQTKRPTAEKLLKHSFFKNAKPPELTVKSILTDLPPLWDRVKALQLKDAAQLALKKMPSSEQEALSMIHDDDPPEIKEDVDNDRINEADKEPFSGNHFGQPKILSGKHFRLNHEQTCVTAVSPGGNMHETSRGLVSEPGDADSERKVDGYRKQGEAAVKLASDKQKSCTKRTTNLSGPLALPTRASANSLSAPIRSSGGYVGSLGDKSKRSVVEIKGRFSVTSENVDLAKVQEVPTSGISRKLQEGSSLRKSASVGHWPVDAKPMDLITNLLSSLQQNEKADATQYRLGNMDGDTEVETSISEGERSLLVKIFELQSRMISLTDELITTKLQHVQLQEELKILYCHEEIIDTREVDNA

SEQ ID NO: 117849 - protein, 61 aa, Oryza sativa
  Clone ID: PAT_MRT4530_21215C.1.pep
SSSSGGDDDGDALDAEVLGDGDIDVLRGRRHGGDILLQPTPRHLASTALLSLSATILDGVG

SEQ ID NO: 117850 - protein, 54 aa, Oryza sativa
  Clone ID: PAT_MRT4530_21216C.1.pep
NAAAPATTTTLPAEMAVDALTISGILASTDRKAMMREKRRIICIYVLHTKKIDM

SEQ ID NO: 117851 - protein, 106 aa, Oryza sativa
  Clone ID: PAT_MRT4530_21217C.1.pep
SLFFFSLSFFSISPPSFLTSPHLPPCRLILISPIEASVEHLHTRTRSLLRLDSRPRSATPFPNSPSPAAECCLLELAGGSCLAGRGSGSLRALAAGAVGFGFGLVN

SEQ ID NO: 117852 - protein, 185 aa, Oryza sativa
  Clone ID: PAT_MRT4530_21218C.1.pep
MEKVSHLMNGGCGGVGKRRGLPAAGVGLGLQKQNSWSPDMERDEAWERRRGMNKGSSSSSALRRVRSVTDDDLDELRGCMDLGFGFEAAGCPLCGAGRSRLVETLPALDLYYAVHGNAGGGGGGAGEVCAAASPCSCGASSSDVSEESPLGSPMSILSPGDTPETVKMRLKQWAQVVALSVRNRC

SEQ ID NO: 117853 - protein, 53 aa, Oryza sativa
  Clone ID: PAT_MRT4530_21219C.1.pep
EMNHPTRLLAIMDNATSKQATPKRSSSQPRRPIISADGADKRRPASQPTGHRC

SEQ ID NO: 117854 - protein, 61 aa, Oryza sativa
  Clone ID: PAT_MRT4530_2121C.1.pep
MARKPTAAHQCDGNGKGCNSGSSFSTGVGRQSTTGEDAERAVTAGDLVAAAARERGEEKSS

SEQ ID NO: 117855 - protein, 57 aa, Oryza sativa
  Clone ID: PAT_MRT4530_21220C.1.pep
SSSRERQYAFFINIIFYIFFFFFFFFFFYFLCSNAIACNLFIYLFSYSLSALPRTRG

SEQ ID NO: 117856 - protein, 99 aa, Oryza sativa
  Clone ID: PAT_MRT4530_21221C.1.pep
PAAAAATSCQRNSSSSRRRHRSPQLPSSPPTTLPPLSSPPLPAAATIVPAATAAVSVWIRVGMATAARSGRGMAAAAGLSGGQLPSPLAATPESLTAAV

SEQ ID NO: 117857 - protein, 79 aa, Oryza sativa
  Clone ID: PAT_MRT4530_21222C.1.pep
MPKEETVTTSEDDNGGATAHSGWRSKHIGNPLVHGEDGFRRSSANETWRPVFLSLLRSCGGGTVHGHGSSGPGWRLKMN

SEQ ID NO: 117858 - protein, 239 aa, Oryza sativa
  unsure (1)..(239): unsure at all Xaa locations
  Clone ID: PAT_MRT4530_21223C.1.pep
QTDPKHQAQPEPLYKEPKPHHPTPNQKHKEPHTKHTQHNLTKNAPKTHNQTTAQQTKSSQTRTPTPFTKPLPLTPPPHPHPPPPPYNTPTHQPTNTKPNPNPRIARRRSRRRRRRRRRAATSPGHTRPPPPQPAASATRRHHDAATAPRSCRRARPPLPPSCRTPPPPDPHGSGRGXPPPPDPGEGQPPPPDPGVDRLPSHPSRSPXTTNRCRRSQAHHSRPPPPLCRQPPPPYPYGSG

SEQ ID NO: 117859 - protein, 148 aa, Oryza sativa
  unsure (1)..(148): unsure at all Xaa locations
  Clone ID: PAT_MRT4530_21224C.1.pep
ATNTEAXSKPSSRXSQVSKTPXLRPSGEMSTFCRTXXEGLRRRARXRLSPFPGQPTGTPRPNGGAPDVGRRRFXPCRLIPQHXWLRRIGHIXTTPPPPPPREASRQQRPKQXPASSHRAGGRRHWRLTRTGPGIAGRRSTSGKPHYLA

SEQ ID NO: 117860 - protein, 813 aa, Oryza sativa
  Clone ID: PAT_MRT4530_21225C.1.pep
MAAAVLLLLLLPALAAAQAQAQQMRTFSANDTNWSPAESNRTLVSNNGDFAAGFRPSPSSPAKFWFAVWVSANANESRPVVIWYAHNDDHSAVEGDANSVLSIDAAGKLSWSDNGNSTTLWSRNFNSPRVRLSLNDSGSLDHGAWSSFGEPTDTLMASQAIPSISNGTTTTTSITLQSQNGRFQLFNALTLQHGSSAYANITGNTALRNLTADGTLQLAGGNPSQLIASDQGSTRRLRRLTLDDDGNLRLYSLQSKKGQWRVVWQLVQELCTIRGACQGEANICVPQGADNTTCVCPPGYRPQGLGCAPKLNYSGKGNDDKFVRMDFVSFSGGADTGVSVPGKYMTSLTPQNLADCQSKCRANASCVAFGYKLGGDRTCLHYTRLVDGYWSPATEMSTYLRVVESNNDPNNFTGMTTMIDTVCPVRLALPVPPKQGRTTIRNIAIITALFAVELLAGVLSFWAFLRKYSQYREMARTLGLEYLPAGGPRRFSYAELKAATKEFSDLVGRGAYGKVYRGELPDRRAVAVKQLDGVGGGEAEFWAEVTIIARMHHLNLVRMWGFCADKEQRMLVYEYVPNGSLDKYLFAPGTGTQGDEEESNKRPLLDLHTRYRIALGVARAIAYLHEECLEWVLHCDIKPENILLEDDFCPKVSDFGLSKLTSKKEKVTMSRIRGTRGYMAPEWVIHREPITAKADVYSFGMVLLEIVSGRRNYGFRQDSVGSEDWYFPKWAFEKVYVERRIDDIIDPRIVQAEAYDDDPASLATVERMVKTAMWCLQDRADMRPSMGKVAKMLEGTVEITEPVKPTIFCVQDD

SEQ ID NO: 117861 - protein, 1202 aa, Oryza sativa
  unsure (1)..(1202): unsure at all Xaa locations
  Clone ID: PAT_MRT4530_21226C.1.pep
MEGVHGIESLATGDGWHHLSRTLGPVLLISMGYIDLGKWVETIDAGSRFGYDRVILMFLIILAANLRQFLSEGTGMCTGKNLAEIXRXENSPTIXVILGFQTGFSVLTAYITMGSGVSIGFILVVEYDDFIAGVXYASVGVNLLPYTMSYLKSFVQGQRQSTTLSLGALFHDHLFSILFIFTGVFLVNYVLMGSAAVESNNTLVTFQDSVDLMNQMFMNPMAPIVFLVILIFSSHVISLTSIIGSHAILKNFFGVNLPHSAHHLLLKAVAMVPTMYYAKVAGSEGIYQLLIICPVIQAMFLPSSVIPVFRVSSSRVIMSRYKISLYVEILAILAFLLLLFTNIIFAAEILFGDSTWTNNLKGNTGSPVVLPHAIVVLISCASITFTLFLAVTPLKSASNEPETQELSEHSQREDPDTTYQREASNEPETQELSEHSQREDPDTTYQIEVSNERETQQLSEHSQIEDPDTFYHREELSLVEQKEDHTTSTINAIPRISSESYQTSALEHNDFPDITVESGHGTQQLTAFVPIIPEVSSSIKHKEPKSVVIDQTEPVPKVCTATVVEHNTAENIKMKSTTSKHVQEEAGASMDYDTEASYNAEVSKSSGNKAPPISDDPTSLTLSKGRDSDAGYRGSNLSRLPGLGRAARRQLAAILDEFWGHLFDYHGKLTQEANAGRFNFLLGPYPKAVRSDNQAIEASRSPLMRDAIRGSATIQKSWDSRAKEVSSPGFNFVLQMGRIGSSNWSESMRLSNADIPRPTSTLFEQNTQFYSNYNVPSYPDNQFYQPATIHGYHLATSLKNSARYARNQDVIGSQGTASQNTTMSCLDTMTVERAFYNPASVNEIEGVGSSAYSKKYHSSPDISALIAASRNYLPNEVNLGGAAGSSSYFSNLACERSQYVNLGSSSTAQFALSKHSQPNFHRDTSSMQSSVNPSTESIWAQQPFEQLLGVSRAELNKGEGNTDQRSSGVTKHDFSNKEYEVKLLQSLRFCIMKLLKLEGSGWLFEQNGGCDEKLIDQVAVAERVSQHTTENQLSADLQLHSSDEDLQPLQRNDNRDANCMSLLPKCGDDCVWQAPLIVSFGVWCIRQILNLCLVESRPELWGKYTYVLNRLQGILDPAFSKPQKPMKGCVCLQKVAKPISGTFTTAGMILEMIKDVEQAISSRKGRSGTAAGDVAFPKGKENLASVLKRYKRRLSNKTSAGQ

SEQ ID NO: 117862 - protein, 261 aa, Oryza sativa
  Clone ID: PAT_MRT4530_21227C.1.pep
DAIRGSATIQKSWDSRAKEVSSPGFNFVLQMGRIGSSNWSESMRLSNADIPRPTSTLFEQNTQFYSNYNVPSYPDNQFYQPATIHGYHLATSLKSMNASHSTHSSISLDPRRLPRSSESAGSNYADSARYARNQDVIGSQGTASQNTTMSCLDTMTVERAFYNPASVNEIEGVGSSAYSKKYHSSPDISALIAASRNYLPNEVNLGGAAGSSSYFSNLACERSQYVNLGSSSTAQFALSKHSQPNFHRDTSSMQSSVTPVL

SEQ ID NO: 117863 - protein, 119 aa, Oryza sativa
  Clone ID: PAT_MRT4530_21228C.1.pep
MVGPPRPLIFGGGGLPLGGVRRQGFPLFGAVQGLPKKAPVFFLGPFFFFFRAPGFSKKAPPLFFWFGPPPCYLSRPGAQSPFLFFSCGFSWEKKKKKKKKKKKKKKKKKKKKQQKKKKK

SEQ ID NO: 117864 - protein, 146 aa, Oryza sativa
  Clone ID: PAT_MRT4530_21229C.1.pep
MRRRPRDGGLDAAASLRRQPHRGRCDGAVVGEQARYGGAGEASMQPRCGRMEEKWAAQTNSLLAEWAVISTGTSFSLDNPTPVKPTVRLDWYLMVIFKATQLGRLWSLLLKEDEGIEVIAKCNLLEKRMMELFSIFGWNSRRRIEA

SEQ ID NO: 117865 - protein, 145 aa, Oryza sativa
  unsure (1)..(145): unsure at all Xaa locations
  Clone ID: PAT_MRT4530_2122C.1.pep
KNYVNPRLAGRLRFMDYLDEEQRRAITIKVRHLVLHHGGHRVNLIDSLGHIDFCSEVSSTGAARLSDXSALILVDAVEGVHIQTHAALRQAFLERLRPCLVLNKLDRLISELHLTPAEAFTIFIRIQHSCNPLYTSFDAQKYLEV

SEQ ID NO: 117866 - protein, 61 aa, Oryza sativa
  unsure (1)..(61): unsure at all Xaa locations
  Clone ID: PAT_MRT4530_21230C.1.pep
MYHDLVTGDELLSDSFTYREIDTGIVCTAEATXVAQGAIDVDIGANPYADGDGDYEVVTNQ

SEQ ID NO: 117867 - protein, 102 aa, Oryza sativa
  Clone ID: PAT_MRT4530_21232C.1.pep
APVCVCFGSPGERRNGEKLRWSPRVAPGEIGLDPLSYALKFDDGGGDDDPAKGSPPAFRDKNFFFRVPPSPVAGPARRLTAIAISLTVPPLFPPPRPKFFSL

SEQ ID NO: 117868 - protein, 69 aa, Oryza sativa
  unsure (1)..(69): unsure at all Xaa locations
  Clone ID: PAT_MRT4530_21233C.1.pep
LVLLVDGPTKXHMHELFCLQSIIRFYEDSFEQAGSPKKVKLCNKFCGPFFVTEVFDYHNWMRKFWCHTL

SEQ ID NO: 117869 - protein, 107 aa, Oryza sativa
  Clone ID: PAT_MRT4530_21234C.1.pep
MERVPDALTAEALAAKEALELAMEVGCDRVILEVNCAELKVILEDSEGTKSIANELVRIDKIRSNASELFHADEFLRSARLSILEPLWPPDSSLSSSYGSRGAHDQI

SEQ ID NO: 117870 - protein, 208 aa, Oryza sativa
  Clone ID: PAT_MRT4530_21235C.1.pep
MQFPSVPAKQRRRPRNLQQVKDKATASALETAAFHGTALPRSPAQEAAATLQAAAAAGGGVRQAEQRPPREEANIGLGRADNGDDANADAPEGVIRRAWQGRRTMFVAIEWRRRGEWLRAGMTRRAASPRNWRRRWRRRRGDGLGRIGGCGGEGKRLGEAAAASRRERRRWRKRGLEEDEDGWDLPDWGLEFQVTSKPAMMDPTVTKQ

SEQ ID NO: 117871 - protein, 299 aa, Oryza sativa
  Clone ID: PAT_MRT4530_21236C.1.pep
MKPSSYRLVTDSPCAYSFSCRLAPLGIVDALHRLAGAEQQQQQESCIINSSHRSKATTGGTASAVAHAEEKTWLKEMVREEAIPSHSLETVSRGITYNPLLSHLRRPVRRHDATDVPAFLRPRHLIIGPRSGNSSDATNGAAGEIAAKKHLYLAIDDRKNAYNRTSLRRRRRRRPMFRSGGVDVEVTFFYSKDSDVCWTRRGDWLLPFRGHGHYDGELGSWVGLHTTPTPTGYAPTGASAPATSCWVHEEAELVAYDGDGELTATDRRLAGCYKFSKYEMNSHTSVLDITDSYEPTTVH

SEQ ID NO: 117872 - protein, 474 aa, Oryza sativa
  unsure (1)..(474): unsure at all Xaa locations
  Clone ID: PAT_MRT4530_21237C.1.pep
MVAGLDFGLLNSSRAGLLYRSAAVKTGTHRXCVGQSVXHASTXDLFRADGPTAPXRXPASGPGTAGRHLPVCPSIASRPTRTTGLGGPSVSSRPAHSLGPVSPTHAITSPAAHSRGSAAQLSDASPARSPGPSHASTLTLPPHVAIPTRPRSARLPGVPTPPSLLGASPVVNDHGMVTRGKHGIRKARWVLRGFTQRPGIDFDETFSPVVKPATVRTVLSFAVSCDWPIHQLDVKNAFLHSTLQETVYCIQPPGFVDTAHPDMVCRLNKSLYGLKQAPRAWYSRFATFLLTLGFAEAKSDTSFFVLRSGTDTVYLLLYVDDIVLTASSTRLLQWTISALQSEFSMKDLGTLHHFLGVSVTRQPSGLLLSQRQYCLDILDRAGMTDCKPCTTPVDTASKLPTQVCLHMHDPREPHLAALKRILRYIRGSLDMGLHIQRCPTGDLVVYSDADWAGCPDTWRSTSGYAVFLGDNLVS

SEQ ID NO: 117873 - protein, 389 aa, Oryza sativa
  Clone ID: PAT_MRT4530_21238C.1.pep
MPRRAHAHAAVAAHLLVSAFVAAAAAAAATYNVIDYGAVGDDGGVTDSARAFEAAWAAACAGDAAAAAATVVVPAGGVYLVSRARFAGPCRSGAVAVNMTGATVVAPVPYAGVQLWIVFQDVDGVSVAGGTLDGRGRALWACRRARRPDCPPATRSLTIYRSRNVAVRGLTSRDSAGIHITVQASAGVAIVDTVVSAPGRSPNTDGIHIKQSTGVTVRNAVIGTGDDCVSMVEGSSDVLIEAVTCGPGHGISIGSLGDTPEQVAVRNITVKGAALAGTTNGLRIKTWAKANAGAVAGVSFSGVVMRNGSGIEISGVSYTDIEGTSATATAVRFDCSPSRPCAGIAMRDVRLRYQPPAAAAEEEQPAASFCRNAHGVAFGDVDPPSCLTE

SEQ ID NO: 117874 - protein, 139 aa, Oryza sativa
  unsure (1)..(139): unsure at all Xaa locations
  Clone ID: PAT_MRT4530_21239C.1.pep
YRSAAVKTGTHVFADSRTSTPPPSSRRLPRRTRPSARSLFRADGPTAPXRXPASGPGTAGRHLPVCPSIASRPTRTTGLGGPSVSSRPAHSLGPVSPTHAITSPAAHSRGSAAQLSDASPARSPGPSHASTLTLPPHVA

SEQ ID NO: 117875 - protein, 105 aa, Oryza sativa
  Clone ID: PAT_MRT4530_2123C.1.pep
VHVLSPKIALSKWGGIHHYQKKLALLYPSQSEWFEYSNSMTQVYQDSRTKEKQMHHSLVTVSVSNQQSHVVRFNIDIKRAIIQSNGSTQVGKNELIKLPTPAIPY

SEQ ID NO: 117876 - protein, 113 aa, Oryza sativa
  unsure (1)..(113): unsure at all Xaa locations
  Clone ID: PAT_MRT4530_21240C.1.pep
TSAGQTGPMWPVRPPYLVGQTAHIARVRPPFWXRICVREGRRSPPLRSARGPPRRLPRAGLERGESAAAFQLEEGGVVWTRLEAAGSAREARAGASESNGQFNGQGERGYASL

SEQ ID NO: 117877 - protein, 57 aa, Oryza sativa
  Clone ID: PAT_MRT4530_21241C.1.pep
TSVVMMLVSVINVSLEEEGEKPLTGSSQVGRGSGINYVIYFGMLMFLAVHFHLCTVL

SEQ ID NO: 117878 - protein, 114 aa, Oryza sativa
  unsure (1)..(114): unsure at all Xaa locations
  Clone ID: PAT_MRT4530_21242C.1.pep
LSHPIQPNPLLIHSALGHGRVLLLPRHRVSSSSGKPLXGIPPXAXHSLSLPRXPXAGPPXLRSSSDPPGSSSSPSAVXRGVVXTRRRLRWRSFXEYNVSVATWERRIFFXVTYF

SEQ ID NO: 117879 - protein, 189 aa, Oryza sativa
  Clone ID: PAT_MRT4530_21243C.1.pep
MKSAYRSVMFYIGQKELEMQYKMNRIVGQCRQKCELMQAKFTEKLEEVHTAYQKMAKKCQLMEQEVENLSRDKQELQEKFAEKSRQKRKLDEMYDQLRSEYESAKRSAIQPANNYFPRAQPDLFSGVPNIMDSSDPLRQGCRIGRADVASCFGICHGLVMDLLTVNALPKMHLTSSSLSYSTAHRGPEL

SEQ ID NO: 117880 - protein, 165 aa, Oryza sativa
  Clone ID: PAT_MRT4530_21244C.1.pep
MSSTFNGDEFAPFLGFIGAALALVFSCMGAAYGTARSGVGVAHMGVMRPELVMKSIVPVVMAGVLGIYGLIIAVIITTGINPTAMPYYHFDGSVHLAAGLATGLCALAAGLAIGVVGDAGVRANAQQPKLFVGMILILIFAEALGLYGLIVGIILSSRAGQSRAH

SEQ ID NO: 117881 - protein, 86 aa, Oryza sativa
  Clone ID: PAT_MRT4530_21245C.1.pep
IESPLCQPTRRRCTQPRAILAEMRTHTNGGRWTGARRAVLALVNGGRLAPGGGRAVKLERCSGWRSGSASDRGGAGSQRPLRSLES

SEQ ID NO: 117882 - protein, 1048 aa, Oryza sativa
  Clone ID: PAT_MRT4530_21246C.1.pep
MREVEEVSKWRRRCCYFWILFPLAVIATCMTITVVTFCSSTMYMTEVMGEATKGAMDSALMHIAGNMRPLLEANRSVFTIANTLHVQGNMASFSHVGPKLFLAFSMQPLQAQISYAAVDGAAFAYYRAGGGDGEARAMFARPNGTWFTQAVDPATGRPVGNATAAAPHQQLPPNVTRLLLDGGGGGASLADGWARPGVRMLFLSAPVGGGGGAVSAAVAVDDVVLRGAAGLRQLRDLGMYYAVAGNGGATAAPPAPEPAAYRSLLGDGAAAEEMALFSSVKCTASAIDAPPKLDVHGVKSDKYRFACTNFDISGVQMGFRVVLRKSAMVGVFRRGGVTMVAVACAAAAAATVACVLMARALRRAVAREAALGADLARHRDALRQAERKSMNKSNAFASASHDIRSALAAVAGLVEVSRPEANPNIVDNLNQMELCTNKLLDILNSILDTTKVESGKVQLEEVEFNMADVLEESVDMANVVGITKGIEVIWDPCDFSVMKCDNIIGDSKRFKQILDNLLGNAMKFTQEGHVILRAWANRPIARGSIGAPSRFAYRSLENNFFSFFFGAKEDRVSQNSFNPLQNDPNSVEFYFEVVDTGIGIPKEKRESVFENYVQVKEGHGGTGLGLGIVQSFVRLMGGEISIKEKEPGERGTCFGFNVLLKTSGNQAAEEDIEEGPSTVSELDIRASVFRETNCFKGWHCILFVHGDETRRVLQAWMESIGMKVWMVPGVESISSTLEKARSSRDDCDVDRCFSSKEMVSQVLPTTLRNNNIMARNLGEHHPLGMLLIVDVSNGQLENIQRQARDFTQMRSQVPCKFVCLTDLRTSYKDFRRFEEMSCDLILRKPVHGSRLYSLLMTLRDVQSSPMHRSSLVGHENYVTRHQDSANIVALAEVGRLDQGLKTEEDRPLDGMHVLLVEDTLVLQTIQRKMLNQLGAIVELAGDGAKAVDMFRDAIERASVSEEHSVPLPYDVIFMDCQMPRMDGYEATRRIREEESRYGIRTPIIALTAHSMEDDLQKAIDVGMDLHMTKPIERRRIVEAVHGVCKGKN

SEQ ID NO: 117883 - protein, 169 aa, Oryza sativa
  unsure (1)..(169): unsure at all Xaa locations
  Clone ID: PAT_MRT4530_21247C.1.pep
RTVIIDLLNKALSAPGSMMDSFLESLMVWEIIWYLVEHIVVEAMDHVALRRXCRAIHLHWYLLLQEVCYLELSGAKSYMTXDYLNLVWSELMLLQCVLELVYNLLFTVVDLLLFKNPMVHITTSADMTTSSDFYFSDPNDLXTTTNTELMYFKDTPCIERTMTYWNAAR

SEQ ID NO: 117884 - protein, 132 aa, Oryza sativa
  unsure (1)..(132): unsure at all Xaa locations
  Clone ID: PAT_MRT4530_21248C.1.pep
MASLVSSPQGSAASTTSATRCAPSKASRPTRSADASGEGRXWRDHRGRAXGELEVSSGGEAEEEDATLIKLPSRVRKEQKTKTAAAGGRWGWRRRGGNWPADTLSPPPSLSFLPLLIREAVPNEPPLQPSSP

SEQ ID NO: 117885 - protein, 97 aa, Oryza sativa
  unsure (1)..(97): unsure at all Xaa locations
  Clone ID: PAT_MRT4530_21249C.1.pep
MSSADSHVPTSRLLSAESEIHQNTGVGYYASQRPEPVYIARVLCXSTLANLPHTDQELRTSPGPPAEPAKGGLRGLPVRSPTLRHHYTPYLRRSRNY

SEQ ID NO: 117886 - protein, 50 aa, Oryza sativa
  Clone ID: PAT_MRT4530_2124C.1.pep
IHIVFILLKCKMACFPQRMMIFQSGESVFPLPFHCYWNHRLVWWFDVYYS

SEQ ID NO: 117887 - protein, 66 aa, Oryza sativa
  Clone ID: PAT_MRT4530_21250C.1.pep
TLGATQPLSRLTKAHHLLEPWGNVYCPDLFLNKEILITVHRFQSIQIKQCIVRIPKICIYPIDFSQ

SEQ ID NO: 117888 - protein, 261 aa, Oryza sativa
  Clone ID: PAT_MRT4530_21251C.1.pep
MAERVLRNVAQRPAWRLAPGAFGFAAFVAGKILVCFVSLIGVAFVSVSEFLGKANIWYQSRMMKIGDSPKGEGGDGWTSGAAVELVVPNSSIVELPMLTRANYHQWALVMRVSLEALELWDTVEAVTKNRAKDRRALAAILCAVPLEMKAGLAVKTSAKEAWDLVKKMRAGDDRVKSASVQRLMKEFENMTFRDGETVGDFAMRINGLIASLRDLGEEMEESHVVKKVLRVVPKRLKQVAVAIEMLVDMDDMSVKEIVGPL

SEQ ID NO: 117889 - protein, 1090 aa, Oryza sativa
  Clone ID: PAT_MRT4530_21252C.1.pep
MASVEVRSVRKSAALRPRGPGKLQPARSMPLDYRYSAAGGRKAANGVGARAAVAPEEEEEEGVEVGVVGFEGDADSPYSSQAATTEEVEEEGDGERGGGDAEVDSAAAATGARATAAGGTTPRRQSPAGAGSPSQRDARWGDTSSYGARKKHRVFCQLPNSDWALCTVITTSGDDSVLKLPEGKVLRLKTESLEAANPEILDGVDDLMQLSYLSEPSVLYNLQYRYSQDLIYTKAGPVLVAVNPFKKVPLYGNEYIDAYRNKTKDSPHVYAIADSALREMKRDEVNQSIIISGESGAGKTETAKIAMQYLASLGGGGGIEYEILQTNPILEAFGNAKTLRNDNSSRFGKLIEIHFSTTGRICGAMIQTYKLNMKKADEYKYLKQSCCYSIAGVDDAQMFRTVTEAMNIVHISKEDQDNVFTMVSAILWLGDVSFTVIDNENHVEIVVDEAAETVARLLGCSIEDLNLALSKRHMKVNNENIVQKLTLSQAIDTRDALAKSLYASLFEWLVEQINKSLSVGKRRTGRSISILDIYGFESFDRNSFEQFCINYANERLQQHFNRHLFKLEQEEYVEDGIDWAKVEFEDNQNCLNLFEKKPLGLLSLLDEESTFPNATDLTFANKLKQHLNNNSCFRGERGKAFAVRHYAGEVAYDTSGFLEKNRDLLHMDSIQFLAKCKSSLPQMFASKMLSQSDNPLPVPYRNSAADSQKLSVAMKFKGQLFQLMQRLESTTPHFIRCIKPNNLQLPAIYEQGLVLQQLKCCGVLEVVRISRSGYPTRMTHQKFARRYGCLLLEDVASQDPLSVSVAILHQFNILPEMYQVGYTKLFFRTGQIGKLEDTSNRIQPGIRGCLVRRCAGNVDLLNVLREFESKKEAEGDQILIKASFLAELQRRILKAEATVREKDEENEMLQQRLQQYENRWSEYEQKMKAMEEMWQKQMRSLQSSLSVAKKSLALDETPRMSDSSVDQSWESNGVHIGSASQLVPRTVGREMNASISVISRLAEEFEQRSQVFADDAKFLVEVKSGQADASLNPDMELRRLKQNFDSWKKDFGSRIRETKVILNKLGSGNESSPNSVKRKWWGRLNTSKFS

SEQ ID NO: 117890 - protein, 63 aa, Oryza sativa
  Clone ID: PAT_MRT4530_21253C.1.pep
STTPAPREIFPSRSRRTPEHLLSPPWHPGPPPPPPPPPSTFAGVGDATPPPPPRPLAMALTSR

SEQ ID NO: 117891 - protein, 122 aa, Oryza sativa
  Clone ID: PAT_MRT4530_21254C.1.pep
MDVCQACQLMNLYMELWDDDMYIPIRRLRRVIQHLGLGSAAFAAAVLDGDGGRGGGGSSRILALVVLLHGVAMVTLSVVCVRARRPRRCRIARAVARAWLAPFLLLAMAGLLRETAAKKVES

SEQ ID NO: 117892 - protein, 62 aa, Oryza sativa
  Clone ID: PAT_MRT4530_21255C.1.pep
MERAPIAAISAAASARLAYATVLIVEGEKYLIFGSSADVAAIEMWWGRRSKMRKRVPMRVCD

SEQ ID NO: 117893 - protein, 112 aa, Oryza sativa
  unsure (1)..(112): unsure at all Xaa locations
  Clone ID: PAT_MRT4530_21256C.1.pep
YTLYTDTVYPRIYGYFLCTLRKFITXIDTEFIDGRSPTXIELGRYYICXGPISPSSTWRSTDPWYKRDPREDLRHRILPPTHPPQLTKPEPTGAKSPGDLVEPTRLRSRRYH

SEQ ID NO: 117894 - protein, 114 aa, Oryza sativa
  Clone ID: PAT_MRT4530_21257C.1.pep
MTYFRAWWYLLPLSQVFPNSDHAGIGARRLFDGMPPSEKRSRTAASSGEEQIGSLPIPERGPPVRALLPSCNETCVLRFSCSPGCWCDVWKSVPVLRVTGSCGGAAAFNKFVSH

SEQ ID NO: 117895 - protein, 46 aa, Oryza sativa
  Clone ID: PAT_MRT4530_21258C.1.pep
MELWKEKKEEVRNCVIDDDPTAPASSGIGLTTSLFQETKAIMGLSE

SEQ ID NO: 117896 - protein, 121 aa, Oryza sativa
  unsure (1)..(121): unsure at all Xaa locations
  Clone ID: PAT_MRT4530_21259C.1.pep
MRGNHHEAHQPKPTTYAMSYCRIRLNRLTSSDSNFADLNHSRFRLQPILTLFPGRFPSRIPSWFLLHLRSLDYQIWLLTHAPQVPRACHFLTVIXALNTNRCPREISHRFLRFHRRSNVTT

SEQ ID NO: 117897 - protein, 516 aa, Oryza sativa
  Clone ID: PAT_MRT4530_2125C.1.pep
SSKTGNPDPLAPDYGGPDDSNAVGDFDPNFIRYVTMKDDRQKSSLNPTTTIAAISLSNGVVQEPKVLISGNDFYAFPRIDHNNKRMAWIEWSHPNMPWDKSELWVGYFSESGDLTKRVEHTNEVISVYTLDAEFTRPLWVFGISSYGFLGESNHIVFSYRQHGRSYLGVLDSDIGSVSLLDTPFTDLSNVVTGNDYFYIEGASATVPMSIAKVALNEDRTKVVSFSIIWSSSSDVVQYSSFFSAPEFVEFSTSSTGQKAYAYFYPPSNPNFQGLPDEKPPLLVKTHGGPTAETRGILDLSVQYWTSRGWAYLDVNYGGSTGFGREYRERLLGKWGIVDVDDCCSCARVLVESGKVDERRLCITGRSAGGYTTLASLAFRDTFKAGASLYGIGDLSLLRAETHKFESHYTDNLVGNENAYYERSPINFVDKFTCPVILFQGLDDKVVPPDQARKIYKALKEKGLPVALVEYEGEQHGFRKAENIKFTLEQQMVFFARLVGNFKVADDITPIKIENFD

SEQ ID NO: 117898 - protein, 341 aa, Oryza sativa
  unsure (1)..(341): unsure at all Xaa locations
  Clone ID: PAT_MRT4530_21260C.1.pep
LRPRVVSXGDKPPPSSSSCGFIIHEADVYSADPADLTRGFAPAVARSSGDEAWYFFSAVRGLKGGRKARTVDDGAGCWHSEAGAKPVLAASSGRRLGHRQSFSFITKDDDGQRVRSGWLMVELSLDVDEEEQLVLSKVYFSPRAPGARKPTTAAAMSRHKRKLSTTDIASPPRRQRRHRVVPSSPPEEPNTSPSPAAAPPDQQEGGDDDPDRGSISWWLRRVFGLTATFTEEESIELNPWLKDILRPFPPPLPPTPPPPCPSPRRKLIDMPEIREFIMRGSYLGGGPAPPRYECDHPAMVMTGGDDQQQLDEQRRDDVGDDRAHYDRVDGQLQFERHYLQL

SEQ ID NO: 117899 - protein, 222 aa, Oryza sativa
  Clone ID: PAT_MRT4530_21261C.1.pep
MSSQPPTATAGFIAGGRIRRPLPRERPHLTRCTKLLCSWFLSLLLVAGVLLFVVYLVVRPHRPRFHVAAFTAAGVQSGGGPVALSGQLTIHNPNHDLAFFFGRVYMSVQYRGDGEVVVDGKDLTGGPLYEPPRGTSAVGFEGVAVPAGAATDMMARDAAAAAAGGGGGGVAFTVKVRSRIRVRVAFWGSHWHPVHATCDVVVGPDGQLLPEFQQKRCGIDFF

SEQ ID NO: 117900 - protein, 55 aa, Oryza sativa
  Clone ID: PAT_MRT4530_21262C.1.pep
SLFATSFYPGVHTTSAHTSQLVMTYQNIMRGNNTFLYTHTTSVLPLMFYCLGHYV

SEQ ID NO: 117901 - protein, 118 aa, Oryza sativa
  Clone ID: PAT_MRT4530_21263C.1.pep
MDEKLHFKKLKNGEWGGITCLLARDSSPGLHVRRWKLVGVQDDDSTRVIWRRGRGMGAAGVGEEGIPRAYLMEVLGRRLGETGWSTASAKGTCNRDAAGWRRPAAGEQRRRRVAIRSR

SEQ ID NO: 117902 - protein, 826 aa, Oryza sativa
  Clone ID: PAT_MRT4530_21264C.1.pep
MAQPYMKKDDDDEDVEYSPFYGIEKGAVLQEARAFHDPQLDARKCSQVITKLLYLLNQGETFTKVEATEVFFAVTKLFQSKDAGLRRLVYLMIKELSPSSDEVIIVTSSLMKDMNSKTDMYRANAIRVLCRIIDGTLLTQIERYLKQAIVDKNPVVASAALVSGIHLLQANPEIVKRWSNEVQEAVQSRFALVQFHGLALLHQIRQNDRLAISKMVSGLTRGSVRSPLAQCLLIRYTSQVAMTRPLAVTNCNVDLESLMSDQNRSIATLAITTLLKTGNESSVDRLMKQITNFMSDIADEFKIVVVEAIRSLCLKFPLKYRSMMNFLSNSLREEGGFEYKKAIVDSIVTLISEIPDAKEIGLLYLCEFIEDCEFTYLSSQLPMNYQVVLLDIVKNADAMILHLLGNEGPRTSDPSRYIRYIYNRVILENATVRASAVSTLAKFGALVDALKPRIFVLLRRCLFDTDDEVRDRATLYLQTLDGEVAVGSTEKDVKEFLFGSFDVPLANLEASLKTYEPSEEPFDISLVSREVKSQPLQEKKAPGKKPPAGAPAPAPVPAVDAYQKILSSIPEFSGFGRLFKSSEPVELTEAETEYAINVVKHIYSSHVVLQYNCTNTIPEQLLENVTVYVDATDAEEFSEVCSKPLRSLPYDSPGQIFVAFEKPEHVPATGKFSNVLKFIVKEVDTSTGEVDEDGVEDEYQIEDLEIVSADYMLRVAVSNFRNAWENMDPESERVDEYGLGVRESLAEAVSAVISILGMQPCEGTEVVPKNARSHTCLLSGVFIGDAKVLVRLSFGLSGPKEVAMKLAVRSDDPEVSDKIHEIVASG

SEQ ID NO: 117903 - protein, 147 aa, Oryza sativa
  unsure (1)..(147): unsure at all Xaa locations
  Clone ID: PAT_MRT4530_21265C.1.pep
HLFVSPPLRPRSLAFFALASPHQYRSSTLLLLCVLSQSTFCGSLVALXXSFLNRPCLFLPSHTLASPSTFLPAVLLPRHLLVLLRFAPPHAIILLQLELAPPTLLISQPFSSVSPGFLSSSSHRGPFFFFFSXTSPMALRVVCFLLP

SEQ ID NO: 117904 - protein, 2100 aa, Oryza sativa
  Clone ID: PAT_MRT4530_21266C.1.pep
MTDVTGLTPVMSSAGGHDSTSHLLPAKVEVVVGRPIRRLGTQNKGEAGSYFVAPSHTNPPKHRRSPAEPAKGGQRGLPMRSPTLRHLARQLFLFSPMAEPAKARDLSPSMSGDDGEQNPRHRARTPPPPPRQSPRQEKALERAEGSATSTSTGGGEGRRDGERHLLVYGDGSTPQGALQAAGALLRHPPVAHDPESPAQRWLDDVAKLVMTARQRLDAGGRSSATKASGAATTGSASSRRRARRAAAAVRHSAATPSSTPPTRDDLRGEPDARVSIERRRNGRRAPHATEGTSSSGVSPHHGRGDQPSVPPVGGVGCRAFVASLRNVRWPPRFRPTIAEKYDGSVNPAEFLQVYTTGIEAAGGDDRVMANFFPMALKGQVRGWLMNLPPASVHSWEDLCQQFTMNFQGTYPRPGEEADLHAVQRRDDESLRSYIQRFCQVRNTIPCIPAHAVIYAFRGGVRHNRMLEKIASKEPQTTAELFQLADRVARKEEAWTWNPSGSGVVASTAPGSAAQTGRRDRRRKKRSAHTDDEGHVLAVEAALRATRKGRPAGDKKKEAGAPSRERPTGKWCTVHNTSLHDLADCRAVKSLAERTRKWEEERRQERREGKSPAVPSGNRRSEAKQKAPAEDIDDGDDDLGFQEPGATIATVDGGACAHVSRRSLKAMKRELLAAAPTHEATRRARWSEVALTFDQTDHPPCVARGGQIAMVVSPTVCNVKLGRVLIDGGAALNILSPAAFDAIKAPGMMLRPSQPIIGVTPGHTWPLGHIDLPVTFGGPANFRTERVNFDVADLSLPYNAVLGRPALVKFMAAVHYAYLQMKMPGPDGPISLHGDLKVALACMEQRADCLAVVTKPEGGDERLGTSAPVAPRQRIVTCDEVPEDALVSFLRANADVFAWRPADMPGVPREVIEHRLAVRPGARPVRQKVRRQAPERQAFIREEVARLLEAGFIREVIHPEWLANPVVVPKANGKLRMCIDYNDLNKACPKDPYPLPRIDQIVDSTAGCDLLCFLDAYSGYHQIRMAKEDEEKTAFITPIGTYCYTTMPFGLKNAGPTFQRTTRISMGSQIGRNVEAYVDDLVVKTRNQETLLSDLAETFESLRSARIKLNPDKCVFGVPAGKLLGFLVSARGIEANPEKIRAIERMRPPSKLKDVQCVTGCMAALSRFISRLGEKALPLFKLLKRSGPFTWTEEAERALTQLKAYLSSPPVLVAPEPNEPLLLYLAATPQVTWPGREQGGEAPEPNGGPRPPTTGVGPLPACQTVLGAPDPQEGPEATVGRPHLSPFDPEANPVLTRPGKEQGEEAPEPNGGLRPLTTGVGPLPACPTMPGAPDPQDGPEATVGRPPLLSSDPEVISTEDKCAPRDCLDEDCPRDAAPSEEDRPNRKVQRPVYFVSEALRDAKTRYPQAQKMLYAILMASRKLRHYFQAHRVTVVTSYPLGQILHNREGTGRVVKWAIELSEFDLHFEPRHAIKSQALADFVAEWTPAPEPVSIPEASTDPSQLPHTAHWVMQFDGSLSLQGAGAGVTLTSPSGDVLRYLVRLDFRATNNMAEYEGLLAGLRVAAGLGIRRLLVLGDSQLVVNQVCKEYRCSDPQMDTYVRQVRRMERHFDGIELRHVPRRDNMIADELSRLASSRAQTPPGAFEERLAQPSARPDPLGETDTPDRPPRPVGVQASGPEGSAPSSLRLIAWIAEIQAYLTDKTLPEDREGSERVHHISKRYVLVEGTLYRRAANGILLKCIPREQGVVLLDDIHEGECGAHSASRTLVGKAFRQGFYWPTALNDAVDLVRRCRACQFHAKQIHQPAQALQTIPLSWPFAVWGLDILGPFRRAPGGFEYLYVAIDKFTKWPEAYPVVKIDKHSALKFIKGITARFGVPNRIITDNGTQFTSELFGDYGEDMGIKLCFASPAHPRSNGQVERANAEILKGLKTKTFNILKKHGDSWIEELPAVLWANRTTPSRATGETPFFLVYGAEAVLPSELTLRSPRATMYCEADQDQLRRDDLDYLEERRRRAALRAARYQQSLRRYHQRHVRARSLCVDDLVLRRVQTRAGLSKLSLMWEGPYRVVGVPRPGSIRLATGDGTELPNPWNIEHLRCFYP

SEQ ID NO: 117905 - protein, 39 aa, Oryza sativa
  unsure (1)..(39): unsure at all Xaa locations
  Clone ID: PAT_MRT4530_21268C.1.pep
EYIVQEIELEECCYTSKIRWLLVQHLGSSXNVSCVIIVG

SEQ ID NO: 117906 - protein, 134 aa, Oryza sativa
  Clone ID: PAT_MRT4530_21269C.1.pep
ERRGCGVQCGGAKAARTWCEASGGEGMGAARRSGHTRARRLDRVVRLRVSPARAPGRGGTSFEKHGWCLVHHECEMGSIWWPAMVGQKQMNRGRSDGIYRWSRALLVPFSWSPGDAVLKSSATPVVLMDSLRVP

SEQ ID NO: 117907 - protein, 262 aa, Oryza sativa
  unsure (1)..(262): unsure at all Xaa locations
  Clone ID: PAT_MRT4530_2126C.1.pep
GPSAHFPFPLPPSSLLGRPQAEAQPSSRPPASXPLGVADRWGPPVGPVSHLPPTPARRRARNGCRAHASAPPGPRRPRXRACAAFPAPAPLSLPLAPAPEMAGIRISNPASLSAPLPHVGRRIPPLPATSDPLSPYLSIAGAPSLFFPISPTPLELPIVPAPCNHPPPLLSALRPPLAAARLAAVLRRRRRXLRAAEVHLVRPSSVEVRRRNPLPTFLRARRSSSAGRRRLPWLAAAARHRLPPRRPPSVRHLLSSPSPFPR

SEQ ID NO: 117908 - protein, 105 aa, Oryza sativa
  Clone ID: PAT_MRT4530_21270C.1.pep
MAHVPAENKYKKVPAYLGMLDVGGSLVPGALYNRVWRMELSSCEVHEDRGSRFGLYRRIHLNTVQIRREKYIMTDYLFKWGGSVRCVQVEGTTGFVNGMPSRTDT

SEQ ID NO: 117909 - protein, 212 aa, Oryza sativa
  Clone ID: PAT_MRT4530_21271C.1.pep
MAFWEDWGKGDCDCGWKKCLIWTAAIAGVGGLIVLLVFAFALVFPPKATADDAVLLRLALSPGSPPSNSTVSYNATVTLSLRNPNLYRGISYDPVAVAFSFNGTRFDESATVPAFYHRPRKTATFHVTVGGAGKPVPKLTAAGVAAFRAENATGRFEVEVRLDTVMQYKARKARCPLAVICPLQLQLVDPDVAATAFQRTKCTVLRAKKSGC

SEQ ID NO: 117910 - protein, 83 aa, Oryza sativa
  Clone ID: PAT_MRT4530_21272C.1.pep
MASFCNDKLPDMVMNHIKQAAERATGFAEAQGWYTEMLEFPVFADRVMLLMRKKPGAAYSVRVVTGTFHGPIAHHRITWQQSQ

SEQ ID NO: 117911 - protein, 78 aa, Oryza sativa
  Clone ID: PAT_MRT4530_21273C.1.pep
GPAPRLPSPSSRPRLLHRPRRLLPTSSPPGSSPPTPVPCHRPPPRPRPPRYLLPRRRPPPPRSAPAMRRLFFCFAGQI

SEQ ID NO: 117912 - protein, 540 aa, Oryza sativa
  Clone ID: PAT_MRT4530_21274C.1.pep
MSARPPPPPRPRLALPPRSAAESLFTGAGDASPGPLTLASALFPSDPDGGGGGGGVMTSSSSSAAGATSFTQLLIGNLSAPPPPPPPPQQQQQREAARGGGVARAGPALSVAPPPTAGSVFTVPPGLSPSGLLDSPGLLFSPAMFDAFDVLDMFIPDKILPKRATRIKLDIYFVKTSPEGGFGMSHREALAQVTAQASHSPLRMFDHTEQPSFSAAPTSSEAMQHMNAAVNMTGISDMVMGPTNNENVAFQPAEASQRYQVNAPVDKPADDGYNWRKYGQKVVKGSDCPRSYYKCTHPNCPVKKKVEHAEDGQISEIIYKGKHNHQRPPNKRAKDGSSSAADQNEQSNDTVSGLSGIKRDQEAIYGMSEQLSGLSEGDDMDDGESRPHEADDKESDSKKRNIQISSQRTSAEAKIIVQTTSEVDLLDDGYRWRKYGQKVVKGNPHPRSYYKCTYAGCNVRKHIERASSDPKAVITTYEGKHNHEPPVGRGNNQNAGNAAPSSSAQQNMQNLSSNQASLTMADFNNINQRPIGVLQFKSEE

SEQ ID NO: 117913 - protein, 319 aa, Oryza sativa
  Clone ID: PAT_MRT4530_21275C.1.pep
MNWDNLSDKPQKNSGRYQGQKRTSLQPLPTPKPTPAPGQTKIEKLPRGITKIKKLRHLLADRSDGEKHSEFRYFKGVQAPNDLSKLEELQTLETVEASKDLAEQLKELMQIRSIWIDNISSADCGNIFATLSNMPLLSSLLLSAKDENEPLCFEALQPISNELHRLIIRGQCAKGTLDYPIFHSHGTHLKYLALSRCNLGEDPLAMLASHLSNLTYLRLNNMHSAKRLVLDAAAFPCLKTLVRKHMPDVNQLKIISGALPVIEGLYIVALSGLESVPSGIETLRTLKKLWLVDLHWDFEAHWIESEMDQKMQHLQELIL

SEQ ID NO: 117914 - protein, 57 aa, Oryza sativa
  Clone ID: PAT_MRT4530_21276C.1.pep
MGSTDTQADQAEIERLEEHASALRKEIESKNKHVKLLIDQLHDLISDISMWQSPCSV

SEQ ID NO: 117915 - protein, 218 aa, Oryza sativa
  unsure (1)..(218): unsure at all Xaa locations
  Clone ID: PAT_MRT4530_21277C.1.pep
SRSIPEAAPPAPATPPPPPRSATPASPPTRQFRSSAAGIAARSSPSPPVTLPPPPRLVLVASAAPPRGDHWTLSHLSTRPWSPPAPATPPWRGTRRCAAGTRRCHLRRRRASSAAGTRDAAGGPPRRRSRDRPRPAXRRRRVRLGCGTRRGRRRRSEAGRRPCGRRCRGCRQGARRGPRWRRGAGARRRRRRSQCRRGSPSAATACAGRPSPARSSPP

SEQ ID NO: 117916 - protein, 88 aa, Oryza sativa
  Clone ID: PAT_MRT4530_21278C.1.pep
KTKQNLKGALAPVEQLQNIPGEHIVEGKYKMPLAAFAAKCFCSGGRKRHWLGWKRSFALFKKKKKASIDQYMGEGNCLVSNPTISLDV

SEQ ID NO: 117917 - protein, 306 aa, Oryza sativa
  Clone ID: PAT_MRT4530_21279C.1.pep
MEAVRASAAWVASRSSHVKVDMLEVEKVVDKIQGNVPKVEWDFEGIHYFDDGPLTVQYLFVLDALNFCFWPDKDLSYDHLASGLKLALEKDKTALDADRLQSYTGPQLRQLLNWPRPLPIEEERVRLLHEVGMELERSFGGEAANLVKSAGNSAATLIELITRHFPGFRDHSLYKGHQVFLYKRAQIFVADLWGAFKGQNYGEFHDIKSITIFADYIVPAVLRELGILKYGSNLSCSIDSSSEIVPGSEEEVEIRACSVYAVEKMRELINKKFGKQLLSIDIDLWLWSCGVQNMALSHHRTLSIYY

SEQ ID NO: 117918 - protein, 351 aa, Oryza sativa
  Clone ID: PAT_MRT4530_2127C.1.pep
MGRTLDVLLGRTTKQTARLKSMLGLAVTRLGVLRGHRQVRCAQARGDVEQLLRLGHPDRALLRAEQVIREQNTLDAFLMLESYCNLITERAALVDSHRECPEELREAAAGLIYAAARCGDVPELQEVKRLMAAKFGREFVSSAAELRSGCGINAKIVQKLSTKQPSLESRQMVLQEIAAEKGIAGVVEAPVRRERRHRVHQPQVDLEEDGSSRYRNVEAPAQAAFESAATAAAAAKAAMELSRGESGGRDDDRRRPEGAQFDRADEETLAAGEVSGDGKKSGRIRRASLGRNYSSEIEDSAEDDEVVRHEITAESEVKPRGLTRSVPVSVRTKRIHRSLDPRPVGHCMHIY

SEQ ID NO: 117919 - protein, 90 aa, Oryza sativa
  Clone ID: PAT_MRT4530_21280C.1.pep
MAAAASRATDPEWQVTVPELRRVRRSRGSGRLRTGASGGGRQPPARERVAAATGVAGGAVRVWKIGADDPRRVVHGVKVGLALSLIAMFY

SEQ ID NO: 117920 - protein, 105 aa, Oryza sativa
  Clone ID: PAT_MRT4530_21281C.1.pep
FIRVPNPCFAHIKYGLVLIEIRNSCCSKWFGPIISVCACRVRVLLRLFFLKKNHSVILVIFGSLALALAHNGCYIITVITPALNEQAVAESTAPASSPRSQQAIN

SEQ ID NO: 117921 - protein, 49 aa, Oryza sativa
  Clone ID: PAT_MRT4530_21282C.1.pep
LSTPFGLCSAVQCSLGVAEKGFASYNTLLLAYHIVDLGCWEDCIALMKC

SEQ ID NO: 117922 - protein, 152 aa, Oryza sativa
  Clone ID: PAT_MRT4530_21283C.1.pep
MVSRSGFGCVSHPRWGMRDRAGKLTEVIEEGDDIGVEEQHGKEGRRRGVWVRILARRWHDFGEVPQMEVWRCGRTTGLAFGGLSWEIKEERSVGGIWLELKKTMRCRRIWRGFGMREGAAGGPRKCLPMRGGGGEGVGNLTDQMYRTRKGYV

SEQ ID NO: 117923 - protein, 102 aa, Oryza sativa
  Clone ID: PAT_MRT4530_21284C.1.pep
GGTLLIFIFISFFLFRKKKNTKPGPLGLSGTKRVTPGGGLRVQNLFPLVNTGRKIFKTFFLNKMAKRRASPKPPNGLGWLFLPRILPSPRYPPYPAPLVKPP

SEQ ID NO: 117924 - protein, 120 aa, Oryza sativa
  Clone ID: PAT_MRT4530_21285C.1.pep
RWLRWLPSLLPLGGFGGSGVLRVDGAASAMACLEPLALTSPPHLSQRWPVISRPTQGGGSFPHREQWRCPPCRERPWRCPRPPLAVAAFPTASSRDSTLLYFRWVDPAAAVSSGSAERPR

SEQ ID NO: 117925 - protein, 97 aa, Oryza sativa
  Clone ID: PAT_MRT4530_21286C.1.pep
MAARYDSGEREAYPEVLAGTSGHQSLFFPGTERPTRRFWPEPPDTKVYFSPRDREGYPEVLAGTSGHQSVGRISLSVARKFLALLPRTSWQVSSSNL

SEQ ID NO: 117926 - protein, 105 aa, Oryza sativa
  Clone ID: PAT_MRT4530_21287C.1.pep
SFEDATHLAKECPFTAMVWNKICLWQGHTAYTLQSSSCTFKNWWESLCKLRPIATRKLILKDLAITWWNIWLERNRRILCHSSQDENQVASLIKENISQINLSRC

SEQ ID NO: 117927 - protein, 640 aa, Oryza sativa
  Clone ID: PAT_MRT4530_21288C.1.pep
MSLSKPFSARRLVPALFPLAHADAASAAASRRARRRDAFVATPPTPPPSPSAVRLAEPLPSLAPSRLALHNRILALLSPSSKDGEKGADLAEAALLTRHALHSNCRPSSFTCAAVLAALLRARRLDDFFALHRFALQAAVPPTAATYALYLSALAARRLPDAALHHLRLISRPGSPVPPSPTAYRVVVKSLVVDHGRLTDALELKDEMLASGFVGPDPQVYNLLMAGFVEAGDGAKAVELYEELKEKIGREPILDGIVYGSLMKAYFLMGMEEKAMECYKEVLGAESEVRFGAESYNGVVDAFGRNRRLDDAIELFERMLREHDPPLKIAVDVRSFSVIVDAYCAAGRFGDAISWFRRMGEWEVVADVAAYNNLIRHLSLQGLVSEAELLYKEMGESGLKADEETYVLLMQGCFRVDRIDEGINYFDGMAELGLKPDATAYHKIVDGLIGFGMLDNAHGYLDKMRGKEISPSIASYEALLKAYIGEASLDKSIDIAKDILLDEKVVFSDEMRDLLEGALREAGREGDITKLYEDVEEKKAEAAARAEEEKARAEALAREEREKRRAEAAAKDEAAARASAAAIEAILGHKRKTENVTGEPAPDANSLDGVFQSRFGITSAGDGALQGTSSGGETKQGDGH

SEQ ID NO: 117928 - protein, 69 aa, Oryza sativa
  Clone ID: PAT_MRT4530_21289C.1.pep
LVWAWTPPVLALLACSGLFFLFRRAQGGPGAGPGGRCGPMLFVRTMSMFQEVPETGVTFVVVRGADQAM

SEQ ID NO: 117929 - protein, 244 aa, Oryza sativa
  Clone ID: PAT_MRT4530_2128C.1.pep
MSSTNNSSGEPPPAVRVLGGWASPFTNRVVVALKLKGVEHEMLQETVGKKSELLLRSNPVHKKFPVLLHHSKPLPESLVIVEYIDEVWPASNGGAPAILPRDPHGRAVERFWARYVDDKILPGLRVLRGSVAGDKDQTAGEMSTTLQRLEEAFVKCSQGKEYFGGDSIGYLDIALGSFLGWIKAVEKIAGVELLNETKLPILAVWADRFCAHPAVVDVVPDADKLVEFTVQYGSVLNTVNVLPK

SEQ ID NO: 117930 - protein, 52 aa, Oryza sativa
  Clone ID: PAT_MRT4530_21290C.1.pep
RGGPFFFFFTKYYYHALAFYLLWSVVRLNQKQDALSSQDTDPHLLISKVITS

SEQ ID NO: 117931 - protein, 98 aa, Oryza sativa
  Clone ID: PAT_MRT4530_21291C.1.pep
SPVARHRCKSVYGEKFADENFQIKHTRPGLLSMANAGPNTNGSQFFITTVKPSWVPGVRAAFGEVVSGFEDVIKPIEALGSSSGTPKTKVTIVNAGTV

SEQ ID NO: 117932 - protein, 112 aa, Oryza sativa
  unsure (1)..(112): unsure at all Xaa locations
  Clone ID: PAT_MRT4530_21292C.1.pep
XXAXSXELAEXGXSXRSSXLLLXQLLDLPAAPYXXXSXAXXHALDVPKAPPCAXPSCSEISSPWLIPALLSLLPSQPRNPNPRNPRGALPSSSSSSATRRLRNEREEKKGGR

SEQ ID NO: 117933 - protein, 62 aa, Oryza sativa
  Clone ID: PAT_MRT4530_21293C.1.pep
MPRGNSIAQCGLGIPAAGWYPTKVMGVPKNRFPKVKTPDIDNTQVWSVNVPLGKVITRLLPL

SEQ ID NO: 117934 - protein, 52 aa, Oryza sativa
  Clone ID: PAT_MRT4530_21294C.1.pep
RQLHCAEHLLRQSHHRFADTDALRGAVPRVRHNVPSARLRVVQYTGSVDSLI

SEQ ID NO: 117935 - protein, 154 aa, Oryza sativa
  Clone ID: PAT_MRT4530_21295C.1.pep
GATARAIVKAYPHIKCTVLDLPRLVDHAPRDGVVNYVAGDAFQCTIPPAQAVMLKLVLHHLSDDDCVKILAQCKKAIPSRKEGGKLIVIDILVEPSLGPVMFEAQLMMDMLMMVNTRGRQRNENDWHDLFMTAGFSDYKIVKKLGARAVFEVYL

SEQ ID NO: 117936 - protein, 317 aa, Oryza sativa
  Clone ID: PAT_MRT4530_21296C.1.pep
MGFGVIPLMEYIARRAFLAAGLRPSTVTLPSTSGDGEARTIHYWAPPGEPRLPPLLLIHGFGPMATWQWRRQVGPFSRRFHIIVPDLLCFGASSSSSSPPPSESAQAAALLDALPALVGTAARVAVAGTSYGGFVAYAMARKAGPERVGPVAISNSDLLKTAEDDGAFLERAGSGWTHPADVLMPLDARGARRLMELTFYRKQAGAMLPDFVIRDIMKKLFSDKREEKIELMNATTVGTDAFQLTPLAQDVLLIWGDHDQIFPLDKAFAVKSCLGDHVRLEIIKKTGHVPQMEDPDRFNKIVLDFLLGSQGSPSNEH

SEQ ID NO: 117937 - protein, 54 aa, Oryza sativa
  Clone ID: PAT_MRT4530_21297C.1.pep
PGPISLTEAPGTISDIGFLSLPRKIMPDGAVVRAVESRPRPRYPERSVHLLSFA

SEQ ID NO: 117938 - protein, 100 aa, Oryza sativa
  unsure (1)..(100): unsure at all Xaa locations
  Clone ID: PAT_MRT4530_21298C.1.pep
ITVVTVGMVGNTLQPPLGANPHRPGEALDRMAXGGFGRTPWFGRTWGRPNPVQFRLVASSVVLLCRLVNFGPVCHVNSEFLAHSYISLVLNIIRLIYLLC

SEQ ID NO: 117939 - protein, 58 aa, Oryza sativa
  Clone ID: PAT_MRT4530_21299C.1.pep
STSQKEKLEPLKEPVRNFWVKPGEATEVDPWGSQRVQNNFFPFQVEKTRYKCNPNPTF

SEQ ID NO: 117940 - protein, 371 aa, Oryza sativa
  unsure (1)..(371): unsure at all Xaa locations
  Clone ID: PAT_MRT4530_2129C.1.pep
MQLLVFVCERGERPAAMGRTLDVLLGRTTKQTARLKSMLGLAVTRLGVLRGHRQVRCAQARGDVEQLLRLGHPDRALLRAEQVIREQNTLDAFLMLESYCNLITERAALVDSHRECPEELREAAAGLIYAAARCGDVPELQEVKRLMAAKFGREFVSSAAELRSGCGINAKIVQKLSTKQPSLESRQMVLQEIAAEKGIAGVVVHVVHEPSSHDEDSGLSHRRRRCDGERRQGVHQPEVDLDEDSFSSXGNRTIGTXTATGQWDPVSSSAKAAMELSRGESGGRDDDRRRPRGAQFDRADEETLAGGEVSGDGKKSGRIRRANLGRNYSSEIEDSAEDDEVVRHEITAESEVKPRGLTRSVPVSVRTKRVS

SEQ ID NO: 117941 - protein, 463 aa, Oryza sativa
  unsure (1)..(463): unsure at all Xaa locations
  Clone ID: PAT_MRT4530_212C.1.pep
IISSLLQSVITELIHENQYGFIKQRTIHDCLVWTFEFLHQCHQSKKEILILKIDFEKAFDTVEHACILEILKAKGFDNTWINWVKDILTTASSSILHNGVPGXKNFNCLRGVKQGDPISALLFVLAADLLQSMINKALNLGVLSLPIPQVDTKFLIIQYADDTLIIMKACQREVFCLKGILQSFAMSTGLKINFHKYSMIPINVNQDRIEILAETFGCPIGSLPFTYLGLPVGTTKPKICDFAPLIDRVERXLLAITMFXNQGQRLTMVNSVMSSLPTNYMCTLKIPKKILLHIDRARRHCLWRKSHEIDAXSSFFLAAWDKICRPKKRGGLGVINLEFQNYALLMNHLDKFFNKKNLPWVKLLWTSFYNNRSMPPHALPDFGSFWWKDITQLIPHFRGFSSIQINTGDIALFXKDLWSDTLLQNSFSTIFSFVKVKAFLWLLFMDRLNETCYKEDTSLFRMD

SEQ ID NO: 117942 - protein, 486 aa, Oryza sativa
  unsure (1)..(486): unsure at all Xaa locations
  Clone ID: PAT_MRT4530_21300C.1.pep
GNHNGWEPFAXKRDLLPGPTEAEITKYGLDLAWKRKLVAREQQDRSYSLQYQFLPENNPWINTVAQLSHSSTYQHDTRSEQASKTYLASLGNESWTRYTDLTFDVNNTSLFNVAKTSHTLLVGLQWVKHKRQTLIFDPSKLQKAEYNHGYFQPSYMPSGHQYTHAFYAQDKIKIHNLTVSIGARYDYVKNIGKPNIATIYNDPTAGHDYSSKHYPGWSSYLGLNYKLTPYLNLFSNISNTWRAPVIDEQYETQYAKATLSPTASSLDLKKERITQLRVGKQIHFDHILSNNDQLSFNSTFFYYKGKDEIFKTRGVRCFESAQNNNNEVCSKKIGNYRNLPGYQIKGFELEANYDSTYWFTNLSYSHTIGKRLASPRNPWLASTSWIAEIPPRKAVVTLGSHIPDTNLTLGWKSEFVRRQDRSPTDQDKDAGHWALPKSSGYALHGIFATWQPKQIKHLRIQFTVDNLLNRSYRPYLSELAAGTGIL

SEQ ID NO: 117943 - protein, 41 aa, Oryza sativa
  Clone ID: PAT_MRT4530_21301C.1.pep
TTTPKHHVITLLLENCNPHFDSIHFHLNGDYYKTFSKMVIF

SEQ ID NO: 117944 - protein, 101 aa, Oryza sativa
  Clone ID: PAT_MRT4530_21302C.1.pep
MGLRDGFSDNKLLDDFGCGDLTRPEPPRNLRELRLGTPRADKALSDPLKTKDHVKGPRASSSENDSPTTRLGARESSIDFRKILFDIDEGSMSLWFYTKID

SEQ ID NO: 117945 - protein, 122 aa, Oryza sativa
  Clone ID: PAT_MRT4530_21303C.1.pep
RIDMPDAEIRDLVSMKRWDDLLKSDQLTKELTNGNTFAGWKEGLINFPPTYKYETNSSKYVGEKPDEVGNKRSPAWCDRILWLGKGIKQLSYWSSGLNLSDHRPVSSTFIVEVEVFHQRKLH

SEQ ID NO: 117946 - protein, 374 aa, Oryza sativa
  Clone ID: PAT_MRT4530_21304C.1.pep
MVEVCGKKWPSEEFTSPRCSSSHLDEYSCIMEKSYLEKENLELKAQLVELTSKHVDLQEKYDELLCSHGNLVDSHAMLEVTHEVIIITVKSYVPHVQVDFTCANSCCSQANIFLRTTCDLDYVGKKDKYIDHGFVCNAQPSQDNRESMLKKLEKGSTVACTKFYQEDNKSNNKSKGQDQSKNKASITCFKCKKMGHHVRDCPWKKQKKLSKNEDLAHKFFKSTKEGHFASSCPCKIDDEATLPRKTSRINRRKCYGCIEKGHEIGFCPHKKDDHSNRSSKRQTGNKQVKKQDKSKTQLCYNCRAKGHIGKNCPIGKIPKPNLSFHHNLLRKAKNGTCATRVISSLHASTKAIWVPKSLVTNIHGPNVIWVPKYA

SEQ ID NO: 117947 - protein, 68 aa, Oryza sativa
  Clone ID: PAT_MRT4530_21305C.1.pep
RRPPPASTPLKTEANVGARPPIQSDVTGDRPVGEGPGAREGGGPKGVTWHPEAPRLLLRLARRGGRAR

SEQ ID NO: 117948 - protein, 88 aa, Oryza sativa
  unsure (1)..(88): unsure at all Xaa locations
  Clone ID: PAT_MRT4530_21306C.1.pep
VSYAIGVPXPLSAFVSTFGAGRTPDMQILRTVKAIFDFRPGMITITLGLKKAGSQRFLQTSAFGRFARVVPSLPWEVVQPLKWEQPSA

SEQ ID NO: 117949 - protein, 378 aa, Oryza sativa
  Clone ID: PAT_MRT4530_21307C.1.pep
IFPWEKIQVTTPMADSSFNPEFLQAHAELWNLTFSYLKAMALECAIKLGIPNAIHRCGGSASLSELVISIPVPETRKPHLPRLMRFLAAVGVFSLDNPTIDEEVTEKGMGIYRLTPLSRLLVDGSIGGHGSLSPFVLSQTTKYHVSAAMNLSDWFMTEDKEVAIEMPFRAAHGTDLWGVMSRDANMNEVFNAGMGSDSRLAINFIISKCGEVFEGISSLVDVGGGTGTTARDIAKAFPHIKCSVLDLPNVIDTITVDGIIEYIAGDMMEQIPPTDAVLLKYILHDWNDEDCVKILKQCRNAIHAQKPGGKVIIIDIVVGSPSKDMFEAQVSFDLLMMVITSGKERDQHEWHKIFMDAGFSHYKTRPVLGFLAITELYP

SEQ ID NO: 117950 - protein, 72 aa, Oryza sativa
  Clone ID: PAT_MRT4530_21308C.1.pep
TAIQTQYSSRSMGAMYHSTPLGSFLDNDQTSPSKGKKFILQTAHVITKNICTIKPIACCCKPAISYMRESLH

SEQ ID NO: 117951 - protein, 111 aa, Oryza sativa
  unsure (1)..(111): unsure at all Xaa locations
  Clone ID: PAT_MRT4530_21309C.1.pep
AQWKKTLRSRRNSREVAHVDVEEVVDHTGSTFSSSCVLFAVLPRRSAPQTSGASTGSITRASKGPXTPIRILIXXSYILGCNPKTPFRSTRQQRPLAKRIDPPGIHKDHIG

SEQ ID NO: 117952 - protein, 48 aa, Oryza sativa
  Clone ID: PAT_MRT4530_2130C.1.pep
MQLATPSKNDGILPSVTAHNKTGICGPSQEVISIGPKFRPIEIWSHSH

SEQ ID NO: 117953 - protein, 111 aa, Oryza sativa
  unsure (1)..(111): unsure at all Xaa locations
  Clone ID: PAT_MRT4530_21310C.1.pep
AQRKKALRSRRNSREVXRVDVEEVVDRTSSTFSSSCVLLAVFPPRSALQTSGASTGSITQASKARRRPIPXPIKRSCTLGXNPKTPFQFTRQQRPLAERIDPPGIHKDHID

SEQ ID NO: 117954 - protein, 111 aa, Oryza sativa
  Clone ID: PAT_MRT4530_21311C.1.pep
VQRKKALRSRRNSREIARVDVEEVVDRTGSTFSSSCVLLAVFPRRSAPQTSGASTESITRASKAHRTTIRIPIRSSCTLGCNPKTPFRSTCQQRSLAECIDPLDIHKDHIG

SEQ ID NO: 117955 - protein, 111 aa, Oryza sativa
  Clone ID: PAT_MRT4530_21312C.1.pep
AQWNKALRSRRNSREVSRVDVEEVVNRTGSTFSSSCVLLAVFPRCSAPQTSGASTGSITRASKARRTPIQIPIRSSCTLGCNPKTPFRSTRQQRPLAERIDPPVIHKDHIG

SEQ ID NO: 117956 - protein, 111 aa, Oryza sativa
  unsure (1)..(111): unsure at all Xaa locations
  Clone ID: PAT_MRT4530_21313C.1.pep
AQRKKTLRSRRNSREVARVNVEEVVDRTGSTFPSSCVLLAVLPHRSAPQTSGASTGSITRASKXRRTPIRNPIRSSCILGCNPKAPFRSTRQQRHLAEHIDPLGIHKDHIG

SEQ ID NO: 117957 - protein, 111 aa, Oryza sativa
  unsure (1)..(111): unsure at all Xaa locations
  Clone ID: PAT_MRT4530_21314C.1.pep
VQRKKTLRSRRNSREIARVDVEEVVDRTCSTFSSSCVLLAVLPCRSAPQTNGASTGSITRASKTRRTPIRITIRSSYILGCNPKTPFQSTRQXRPLAERIDPPGIHKDHIG

SEQ ID NO: 117958 - protein, 111 aa, Oryza sativa
  Clone ID: PAT_MRT4530_21315C.1.pep
AQRKKTLRSRRNSREVARVDVEEVVDRTGSTFSSSCVLLAVLLCRSAPQTSRAFTGSITRASKARRTPIRILIHSSYILGCNPKTHFRSTRQQRPLAERIDPPGIHKDQIG

SEQ ID NO: 117959 - protein, 74 aa, Oryza sativa
  unsure (1)..(74): unsure at all Xaa locations
  Clone ID: PAT_MRT4530_21316C.1.pep
CECXRFVIFLLIFFFGLEASARIEPSRAFFFLAIHTPQRCRFLKSXPLRELKGAACEVPVAKSGTYMGFGTGTK

SEQ ID NO: 117960 - protein, 111 aa, Oryza sativa
  unsure (1)..(111): unsure at all Xaa locations
  Clone ID: PAT_MRT4530_21317C.1.pep
AQRKKTLRSRRNSHEVARVDIEEVVNRTGSTFSFSCVLLAVLPRXSTPQTSGASTGSITRASKVRRTPIXIKLICSYILDCNPKTPFRSTRQQRPLAERIDPPGIHKDHIG

SEQ ID NO: 117961 - protein, 111 aa, Oryza sativa
  unsure (1)..(111): unsure at all Xaa locations
  Clone ID: PAT_MRT4530_21318C.1.pep
AQRKKTLRSRRNSREVARVDVEEVVDRTGSTFSSSCVLLAVLPRRSAPQISGASTGSMTRASKARRTPIRIPIRSSCTLGCNPKTPFRSTCQQRSLAXRIDPPGIHKDPIG

SEQ ID NO: 117962 - protein, 368 aa, Oryza sativa
  unsure (1)..(368): unsure at all Xaa locations
  Clone ID: PAT_MRT4530_21319C.1.pep
ARGAVLNSPPNPCMAEARREAEQVMFGAIDAVLAKTGVRARDIGVVVVNCSLFNPTPSLSAMIVNHYKLRGNVATYNLGGMGCSAGLISIDLAKQLLQVHRNSYALVVSMENITLNWYWGNNRSMLVSNCLFRMGGAAILLSNRGGDRXRAKYQLLHTVRTHSGAADRAYRCVFQEEDDAAGVGVALSKDLMAVAGEALRTNITTLGPLVLPMSEQILFLASLVARRVFGLAGVRPYIPDFKMAFDHFCIHAGGRAVLDTIEKNLGLGAWHMEPSRMTLYRWGNTSSSSLWYELAYAEAKGRVRRGQTAWQIAFGSGFKCNSAVWRALRTVEPDADERNPWAGEIDSFPVEVPKVEAVATATADAASS

SEQ ID NO: 117963 - protein, 435 aa, Oryza sativa
  Clone ID: PAT_MRT4530_2131C.1.pep
MSFGVVDMDEEGGAAAAADEIRRLPAEVNWEMLDKSRFFVLGAALFSGVSAALYPAVVVKTHLQVAPPPQAATATAAAILRRDGLRGFYRGFGASLAGTVPARALYMAALEATKSSVGSAAVRLGVSEPAATAAASAAGGVSAAIAAQVVWTPVDVISQRLMVQTSSTCRYRGGVDAFKKILLADGVRGLYRGFGLSIVTYAPSNAVWWASYAMAQRFIWRVVGAERSESYPSLMAVQGASAALAGGASALVTMPLDTVKTRIQVMETDGAAAARPTLKSTVRGLLKEGGWAACYRGLGPRWGSMSLSAATMVTTYEFLKRLSAKEGLWVLICGRILLLVSSICSLLELGAGARDNEWTALPIDQEHVPDSHSLETRKKEPSHPVTVNLCSEMVSEQALRLELGNSCTLGKIGHDGDGNIEFNTCKNHMGGADVR

SEQ ID NO: 117964 - protein, 830 aa, Oryza sativa
  Clone ID: PAT_MRT4530_21320C.1.pep
MENHARRKFCLSIPQNLMRTSPCLGVLESPTEIVDMLFSIQLQMARWDEILTLPVQNPPTPEFSASDIMWSRVEGWKDSMDRLALIPFSRVNDFVRGESNNKECPTRFHVEARRRRPPTMNCKPKVDGILEYILYWCSFGPDDYRKGGSVRPSRNSSTKRKTPAGRPHTKRGCICHFIVKRLIAEPSVALVIYNHDKHVDKIGKPCHGPMDNMAIGTKAMFAPYISDELRLQIMSLLCVGIPVETIMQRHTEMIEKQGGPSNRDGLLTHRYVRRLERKIRRSVYELDDDDAISINIWVENHQNHIFLYEDFSDKDTFIVGIQTDWQLQQMIQYGNRSLLASDSKFGTNKLKYPVHSLLVFDKQKNAIPVAWIITPNFSHGEAYRWMGALYDRVRTKDPTWQLGGFIIDDPFADVRTIRGNGGMELFEAFLEDFVDCAGFLDYFRALWFPRLGSWITMLRTTPLATTEVASAIESYHHLLKLRLLNEANERVYQRADWLVHKLGTKVHSYYWLDEYSGKDNFSRYWRSEWKSGPNPWQQGLQIPDSDVVVEGNCARVVCQKNKERSHVIVNPGSDLALCDCSWSRKGNICKHAIKSTKVFRQRGLAPPSLALFRYYQALANVVHCPPSDTLISDHAVAVAIFVRTQLDSLLDATNGNSSNRSTSKDPQSVIEPRESDVREGSIENDVCASQSQAECGDEVSDEQNDDLDRFVFKKRKSREASDEEGSPTATQITQPSETESSQATDLQEPLDRRENRAPKKSKSKEASDGGKANARQAKQPSETESRPAIDQQEPLHHRQENPAHKKTKSGEASDGEETMAMQVMEPSETE

SEQ ID NO: 117965 - protein, 117 aa, Oryza sativa
  Clone ID: PAT_MRT4530_21321C.1.pep
MGEDRGDDYLGTLPDYLLHKVMSFLPARQAVQTCVLSRRWRDLWRSMPCIDIDGDEFGGGMAKVRWEKLMDFANNLLEFGDVHVIDFNPPFLERISKPKVSETYPLNCWCTPADGME

SEQ ID NO: 117966 - protein, 86 aa, Oryza sativa
  Clone ID: PAT_MRT4530_21322C.1.pep
HGTCHLAHNCYDERKWIHVHISLLPRTQASSLYDWTLLIEAHMDRITEQLLDVQRPDRGGDHIHLRHQIQREQHLHHPICNDARAG

SEQ ID NO: 117967 - protein, 83 aa, Oryza sativa
  Clone ID: PAT_MRT4530_21323C.1.pep
APAPTAKGWAVSPAPQARRPAAPTSPPAAPPRSAPGTSPPRPPASPPPPSPSSPPPPPPPRRRRAKNPTKNISKKIKKINTLS

SEQ ID NO: 117968 - protein, 118 aa, Oryza sativa
  Clone ID: PAT_MRT4530_21324C.1.pep
MAIRPLAKGWSDQPWPPCYQAIWDFHRLLNPGTRMAAKGYGGPAIACWHTPPRRPSARPAGCYYSVVSATCVARAPPPTTPQRCPAVPCSAERPRQPPLTLPLRRLVLPPVPPEEGKK

SEQ ID NO: 117969 - protein, 210 aa, Oryza sativa
  unsure (1)..(210): unsure at all Xaa locations
  Clone ID: PAT_MRT4530_21325C.1.pep
MEGYRIISRVPIRHNDVEIILDFHVFELHDFDLHIDHLIEKIYLDEPRTRVLDIKLGNLTFSFMISQLKNSLEPIPESGLIEEVLVVSSFESLGYLLEDNAIAFVKEDDNPEEVVPKKGGMTVVENSKNELMPQQTITGWRICIDYKKLNKATKNDHFSLPFNDKMLERLANHSFFCFLDGYSGYHKIPIHLDDQXKTMFTCPYGPICAT

SEQ ID NO: 117970 - protein, 266 aa, Oryza sativa
  unsure (1)..(266): unsure at all Xaa locations
  Clone ID: PAT_MRT4530_21326C.1.pep
RFVHDIVHVRILVKVTFHSPTFVRSRSLTYXIIAFHVHVRXSFTFVRQRSSSRSFTLLSFTFVLSFSFTFVGSFTFVRSFSFTFIHLVIVHVRSLVLIHVRXARSRSRCGGSGTAVWRQRSGGGMARQQRGAARGIGVARRQCAASWRFVARRRRGXRRVVTRSASASETRWPAATERERERDRDRRERSRGRRRAAALTPEMRRRRRRRRRRRRQRARDDGEIRRRRRREDALGSGGEGEAERDRSGKXLLSVGGEDEGAHREYI

SEQ ID NO: 117971 - protein, 94 aa, Oryza sativa
  Clone ID: PAT_MRT4530_21327C.1.pep
KNLKWLRFLFNLYFNYQNLFQHNRCWRPILTLVRKTLNCGGRPPALSYNWHQFGWTSVPECLFWLGSPVPFKKEFLDNNWQFSYSFKGLAQKPF

SEQ ID NO: 117972 - protein, 247 aa, Oryza sativa
  unsure (1)..(247): unsure at all Xaa locations
  Clone ID: PAT_MRT4530_21328C.1.pep
NFLPDRSLSASPSPPLPRASPRRRCRRISPSSRARHRHRRLRLLRRRRISGVRAAARRLPXSLSPISISLSPSRMTPAAEFXRRRRRPCNDTTPCHDDAGPRDGTTPHAGVAPXDAARGATPSPSXRRRFADGTPTFRCRHTENVNERTNVNENKXMSVNENERTNVNEPTNVNENERTNVNENKNERTNVNEPTNVNENERTNMNENKVNERERERCRTNVNEPTNVNVKCHYTPVNERERTNVGE

SEQ ID NO: 117973 - protein, 175 aa, Oryza sativa
  Clone ID: PAT_MRT4530_21329C.1.pep
MAVGIAASEVGIDTTAEGIDAAATDPRDSTRARASLFSSRARERGEGGVEGSRLLSWSRGLIDNGLMNPSMGLWDMVLVRSFFLEAAISERRLVMLSQPRSSEWCGRTATGGSMKEVLAIVRPCGRVEPSLWATGGLAAGAPGAHGGGRWASTVRWRRRFYERNFASDGEGIRLG

SEQ ID NO: 117974 - protein, 117 aa, Oryza sativa
  Clone ID: PAT_MRT4530_2132C.1.pep
KLQEYVHDINENIEKLPTRGPVSKYVLPDENLRGRLEITIDEDIMNGVACNLESRGFQALCKATEEIVGHVEPYSITGSLPLIRELQDEGFDVQTAGYGLLKTYHAKNEYCLFSDMA

SEQ ID NO: 117975 - protein, 258 aa, Oryza sativa
  unsure (1)..(258): unsure at all Xaa locations
  Clone ID: PAT_MRT4530_21330C.1.pep
KFLPDRSLSASPSPPLPRASPRRRCRRISPSSRARRRRRRLRLLRISGXRAAARRLPLDLSLSLSIAAGRRVSXPTPTSSRYDAAPRRRRATRRHDAARRRRATPMPRAXATPPRHAPALCXRGATPPPRRPPPSHCRHTENVNERTNVNENKVNEXNENERTNVNELTNVNENERTNVNEPTNVNENDRTNVNENKVNERERERCRTNVNEPTNVNEKCNYRQMADRDEKQILGLPTGTKDRSLVPVISPGTKDSDL

SEQ ID NO: 117976 - protein, 85 aa, Oryza sativa
  Clone ID: PAT_MRT4530_21331C.1.pep
MPTVAVPTYPDARDGSVVTQLATNVVVIVAHAAIAPESVTAGSALAWLAAVVIARPSCSCRRTACHRLALDPDVAELDLIVISNR

SEQ ID NO: 117977 - protein, 332 aa, Oryza sativa
  Clone ID: PAT_MRT4530_21332C.1.pep
MSTSASPSSTPTADYAEWKKHLFHQLASTYLTDLFPEAVPQTTESSPPHHSESGVEIQYALGLLPSGGGLTRPIIGYHAPRTSTLLHGLPCVPIAPNVGKKKRAKSAAAPSAAKNKPKKQKTTADDLPTIDPDVEEFLEGEELVEDVDESAEHPPRPPTLISESSEHTPSAAGSHHIDEGEEVAPALAIPVLANMFSFDIRQFMDEEEDTTSKALEPLADDTKSTLLDISKRLEGSLETLVTSCGSIRDRFHEIHDKIPDELADAITLVAYLEQHRLKLEKAKQRISDRRERQDLEATVQANRASINEEKAKHDELEAGPDSTQANINRLNA

SEQ ID NO: 117978 - protein, 81 aa, Oryza sativa
  Clone ID: PAT_MRT4530_21333C.1.pep
PLLSSPQIGSREPQSHHDLSRHRRRRERELDLVRRVKDRSSSSGGRAGGEAPLSSVFSGDETDPFFGFLGAASALVFSCMG

SEQ ID NO: 117979 - protein, 62 aa, Oryza sativa
  Clone ID: PAT_MRT4530_21334C.1.pep
THLHRTCAVARNHLRLFTRGKGGLTKGVKASLSLTLRYYWGILQCSVFLSKHSHKMSWELIT

SEQ ID NO: 117980 - protein, 267 aa, Oryza sativa
  unsure (1)..(267): unsure at all Xaa locations
  Clone ID: PAT_MRT4530_21335C.1.pep
MARGLKKHLKRLNAPKHWMLDKLGGAFAPKPSSGPHKSRECLPLILIIRNRLKYALTYREVISILMQRHVLVDGKVRTDKTYPAGFMDVISIPKTGENYRLLYDTKGRFRLQSVKDEDAKFKLCKVRSVQFGQKGIPYLNTYDGRTIRYPDPIIKANDTIKIDLETNKIVDFIKXFDVGNVVMVTGGRNTGRVGVIKNREKHKGSFETIHVEDALGHQFATRLGNVFTIGKGNKPWVSLPKGKGIKLSIIEXEQRKRDAAAQAAANA

SEQ ID NO: 117981 - protein, 166 aa, Oryza sativa
  Clone ID: PAT_MRT4530_21336C.1.pep
MPNPRTQRKHICFVLTAPCSTPHTLSSHIGRQYVATPCARAHTYTHTTTGRRRALFALLARPYMAGLQRSSETFRRSGSSGMVWEDKLQQSGELGGKAEAPAPAARAAAQRSGSSGHGGYKAGHVQPALDPPSPRVAACGFCNLFGKDKHHQARPRGGASAKSRRR

SEQ ID NO: 117982 - protein, 63 aa, Oryza sativa
  Clone ID: PAT_MRT4530_21337C.1.pep
METRAVTGVVEELLLEHVAGSLPAVYVNTECEDCCGGDADGDDLLPSGVGGCGSEAASMADWL

SEQ ID NO: 117983 - protein, 78 aa, Oryza sativa
  Clone ID: PAT_MRT4530_21338C.1.pep
MDASALSNPRLQAMLEEEKRKAMANEFVAKLTDVCWDKCITGSIGSSFSNSEASCLSNCAKRFLELKMLTMQRVSSPR

SEQ ID NO: 117984 - protein, 95 aa, Oryza sativa
  Clone ID: PAT_MRT4530_21339C.1.pep
YAAISRTAPSIGVREIIPLAHWFPHQYASISRTAPSIGVREIILLAHWFSHHNLSHRNFRWSRYDYSNNVVVLRLSHYFHFKWSSYDYCLVLDQR

SEQ ID NO: 117985 - protein, 457 aa, Oryza sativa
  Clone ID: PAT_MRT4530_2133C.1.pep
MASPSLRDAVGGLDRDPFVSLLGKLIGESRRLQNDPPALVPQEDLVAQHVVDALLPVSMETGGGPLVVRKVSYAEGRSNVIVEYPGTVPGRAISFVGMHMDVVPANPDEWDFDPFSLTFDSEDKDKLRGRGTTDCLGHVALVAQLMRRLGEVKPVLKHSVIAVFIANEENSLITGIGVDGLVKDGLLDKLKNGPLFWIDTADKQPCIGTGGVITWHLKAIGKLFHSGLAHKAINAMELNMEALKEIQTMFYNDFPPHEKEKLYKFATPSTIKPTKWSYPGGGLNQIPGECTISGDIRLTPFYSTTSVVKKLQEYVHDINENIEKLPTRGPVSKYVLPDENLRGRLIINSPLLTIDLARLEITIDEDIMNGVACNLESRGFQALCKATEEIVGHVEPYSITGSLPLIRELQDEGFDVQTAGYGLLKTYHAKNEYCLFSDMAQGFQVFLSIISQLEADV

SEQ ID NO: 117986 - protein, 61 aa, Oryza sativa
  Clone ID: PAT_MRT4530_21340C.1.pep
INEMYIIELYISLSQRSGYIYELAIKQLARNQSIAVPETQQSTRSNASYLRHMHGFITDFD

SEQ ID NO: 117987 - protein, 206 aa, Oryza sativa
  unsure (1)..(206): unsure at all Xaa locations
  Clone ID: PAT_MRT4530_21341C.1.pep
MGSKDGLSDNKLLDDFAVGTSNPTGVCLPTRSEPSSSTTWSIEIIQASSFAAYQKXMSDRMMSNEYATXEQLSTRVGYGRVHSIIENILNKCGVIAPNLPTKIDDLSHRTGHGWTTREKCLSHYFHFKWSSYDYCLVLDQRCSDFSYYLYFNKFDIRYTRSPSVLPRDPSPQKTPSVATYPTVPLRRLDKASEEPKGTSAGDTQSR

SEQ ID NO: 117988 - protein, 312 aa, Oryza sativa
  unsure (1)..(312): unsure at all Xaa locations
  Clone ID: PAT_MRT4530_21342C.1.pep
ISVVRVLSKEQLSTRLGYGRVHSIIENILDKCGVIAPNLPTKTNDLSHSTGHGWTTQEKYVAISRTAXFHRCSRDNSARSLVLAPXVAISRTXSFYRCSRDNSARSLVLAPWLRNSYDWSSTGSVAALLIHLLLVVELRLXLVLDQRCSVSPTTSTLSGRVTTTAWSSTSDVAFLPPLPLQVVELRLLPGPRPAWSSYDYCLVLDQRCSDSPTTSISTKLIAGTQYRQVFYPEIPCHXRHLALKPILLSLYAVLTRPPRNLRDLRLGTPRANKALSDPVETKDHTLRLLDRSRTVAGSRQGTWSEEMVYQPR

SEQ ID NO: 117989 - protein, 226 aa, Oryza sativa
  Clone ID: PAT_MRT4530_21343C.1.pep
ATAHTTVTRARTRTRTCVATEPPDRIESTRAPETAYVAVDRDGRRTHVGVVVVARAGVASRSRGPPAPRGSRARGSARPYVRGLRLPTYIHQDWQIANRMMRPTRAARTRVPRYRRRLRRTCMRTDKDQLVLNYALVVQYIATIGVPFDTLIRICIGDTNASSMQLLWFYPHLRMNLACLDTGLAAMYSVSQMLGARTYRRRTRAGPNDDDDDDTMLCMRHTLLLP

SEQ ID NO: 117990 - protein, 363 aa, Oryza sativa
  unsure (1)..(363): unsure at all Xaa locations
  Clone ID: PAT_MRT4530_21344C.1.pep
EDGLSDNKLLDDFSYEEIXPNRIRNILYVIYRIYPDHXSIVRSIIYYVYLEHVFYIMSVEQLSTRVGYGRVHSIIENILDKCGVIAPNLPTKTDDLSHSTGHGWTTREKYATISHTXNFHWCSRDNSACSLVLAPVRSNLSHRNFHXCSRDNSARSLVLAPWSSYDYXWSSTSDVASLWLLRLSVVELRLXLVLDQRCSISPATSTLSGRVTATAWSSTSDVASLRLLPLXVVELRLLPGSRPAWSSYDYCLVLDQRCSDXSPPTSTSTKLVAGTQYRQVFYPEIPYHXRHLALKPILLSLYAVLTRPPRNLRDLRLETPRADKTLSDPVETKDHTLRLLDRLRTVAGSRQGIRNEEMVYPPR

SEQ ID NO: 117991 - protein, 112 aa, Oryza sativa
  unsure (1)..(112): unsure at all Xaa locations
  Clone ID: PAT_MRT4530_21345C.1.pep
MQMLMSVFVIIIGCYTAIGWITDIVFFIIGVGTMHLKRCQTVKLYIAAPLXFYIVMVLFGFXKQLIGYNIIAFCHPSTVFIFGKSTREIMVRMIEALGFGVIXFERRLSFRL

SEQ ID NO: 117992 - protein, 75 aa, Oryza sativa
  Clone ID: PAT_MRT4530_21346C.1.pep
MCSPAGRRMRQRLATSCRRSPAIASGGGEGVGCEVWMVTGVRQQRLGVRESCRWVWRGLWRTKAGRRGAPVLGSH

SEQ ID NO: 117993 - protein, 318 aa, Oryza sativa
  unsure (1)..(318): unsure at all Xaa locations
  Clone ID: PAT_MRT4530_21347C.1.pep
MGSKDGFSNNKLLDDFGCGEVXSVFSRLIFIIDLLIXRYIRHVSTKVRNILYTIYRTYISNLYSIEQLSTRVGYSRVHSIIENILDKCGVITPNLPTKIDDLSHSTGHRWTTREKVVIKRLLLLVLEPVKHSDLSCLTXKWSSCDYCLVLDQRRVSPATSTSSGRVTTTAWSLTSDVAFLPLLLLXVVELRLLPGPRPAWSSYDYCLVLDQRCSDXSPTTSTSTKLIVGTXYRQVFYPEIPYHXRHLALKPILLSLYAVLTMPPRNLKDLRLGTPRADKALSDPVETKDHTLRLLDRSRTVAGSRQGIQNEEMVHPPR

SEQ ID NO: 117994 - protein, 113 aa, Oryza sativa
  unsure (1)..(113): unsure at all Xaa locations
  Clone ID: PAT_MRT4530_21348C.1.pep
TQMLMSIFVINIGCCIATDWITNIVIFIIGVGTMHLKRCQTVKLYIAAPLTFLYXVKVLFGFLSXLNGYNIVAFCHPSTVFKFSKSTRETMTKMIEALGFGVIXSERRLSFRL

SEQ ID NO: 117995 - protein, 142 aa, Oryza sativa
  unsure (1)..(142): unsure at all Xaa locations
  Clone ID: PAT_MRT4530_21349C.1.pep
ASFGQRIDEALKQECRRSSRYAGGHVLACIRHHRPQLHLEFLHEGFSRSRXTPVEIDHLAKSMALLAGKDFQSMDWHWPSCDFDQSFESYTLPSPSLVIGEFFSEDKALGPLTYLGSDKALSALGVPSQRSLRFLGGLVKTA

SEQ ID NO: 117996 - protein, 350 aa, Oryza sativa
  Clone ID: PAT_MRT4530_2134C.1.pep
MSFPDEEEDEAFLLAVAATEEAALASSDSSKRRRLSMTSSTSSSPTSATPPPAAVPEGPYLAALKGSHSSAWKQQQETLSQARKRPGGSQTLATPGGAFGGSGGGGGGYGDAGGAVEEKACPCGAGSCLVLTSNTPRNPGRKFYRCPMRDNGGCNYFEWCDNPSPGPANVSGNTVFQSDTSVAHMLCPCGAGACLILTTKTGKNVGRQFYRCPANQGISYLFLNGGSSCGYFKWCDEQQLRTAAPLQASTQYHTDVASSGQIPSKRSSSACFKCGQENHWAKDCPNQSSDPYPDKGGRTFTSASSPDACFKCGKSGHWSRDCPTANCGSSTVSSHVKSSSTLGSWNSHRY

SEQ ID NO: 117997 - protein, 120 aa, Oryza sativa
  unsure (1)..(120): unsure at all Xaa locations
  Clone ID: PAT_MRT4530_21350C.1.pep
TQMLMSVFVIIIGCYTAIDWVTDIVIIIIGVGTMHLKRCQTVKLYIAAPLTXFYIVMALFGFIKQLIGYNINAFCHPSTIFIFGKSIREIMAKMIEALSFGVIXFERRLSFRLRKCPWYL

SEQ ID NO: 117998 - protein, 376 aa, Oryza sativa
  unsure (1)..(376): unsure at all Xaa locations
  Clone ID: PAT_MRT4530_21351C.1.pep
MGSNDGFSDNKLLDNFGSGXIQPVQIXSSDEIRIITIDYSIRRDRPSFKTSPSRKTLTNYRRTRVNYKEQLSTRVGYGRVHSIIENILDKCGVIAPNLPTKTDDLSHSIGHRWTTXRKYAAISRTAXFHRCSRHNSTRSLVLTPVRSNLSHLNFHRCLRDNSARSLVLXQYAANSHTAASIGVREIIPLALLQVVELRLXLVLDQRCSVPPTTSTFSGRVTAKLRLLXWSSTSDVVILRLLPLSVVELRLLPGPRPAWSSYGYCLVLNQRCSDXSPTTFTSTKLVAGTQYRQVFYPEIPYHXRHLALKPILLTLNAVLTRPPRNLRDLRLGTPRADKALLDPSETKDHTLRLLDCSRTVARSXQGIRTEEMVYPPR

SEQ ID NO: 117999 - protein, 112 aa, Oryza sativa
  unsure (1)..(112): unsure at all Xaa locations
  Clone ID: PAT_MRT4530_21352C.1.pep
MQTLMSVFIIIIGCYTAIDWITDIVIFIIGVGTLHFKRCQTVMLYIAXPLTFLYXIKALFGFIKQLIGYNIIAFCHPSTVFXFSKSTRRXMAKMIEALGFGVIXFERRLSFR

SEQ ID NO: 118000 - protein, 125 aa, Oryza sativa
  unsure (1)..(125): unsure at all Xaa locations
  Clone ID: PAT_MRT4530_21353C.1.pep
MAAGGPPPPPPPSSPPLRPPAASPPPPPAPAPPPXPRPAQRPGRRRRPRPRRRARTPRCRSSGAGCRPTARTRGPARRRPPPSPRVASASSRHGTCPAGRCSPRCPRSSGWTPTPSRPPTSAAPS

SEQ ID NO: 118001 - protein, 720 aa, Oryza sativa
  Clone ID: PAT_MRT4530_21354C.1.pep
MASFLSRAAAVSLLAIVLVLTAATSTSPAAAAARFPEEARPTRSGYLNVTSTNSLYFAFYEATDPVTTQPAAVPLLVWLQGGPGCSSLIGSFAELGPYLLLDSTSALARNDNRWNRRFGVIFIDNPLGAGFSAPASGDDIPTDERTIAAHLLAALQSFMALDPAFRARPLFLTGESYAGKYIPAAASHILDANAKLTDDRRVNLQGIAIGNGMTHPVAQVTVHADQAYFAGLINAEQKAKVEEMQDKTVSLIKSKKWAAARRERNRIIAFLKNATGVATPFNYAREKGYPTRPLRDFLNTGEAKAALGARSDVEWARCSEAVSAALADDIMRSARGDVEAVFLAPDGVRVLLFQGVFDLHSGPASVEAWVRELAWPGLGAFLAAERAVWRLGDEQLAGYVQRSGALANAVIVGAGHMAAGDNRPAAQAMIEGWVLQTGPFDGSAAVADCRWIALSRRHRLRIHSPPPPLPPDPPDATTATEGRREAAAVTDATTTDCRRIRSWPPPPLPPPPPLPPPPPPDPPIGKTAPRQHARPGTYYRRPRRARPSLSHGHTGAVRSFLSLLNRCTWQGTMKKEEDGKMMKKALMDVAHAATAWLNGTVARPPQPHMHKAIALSRLREPIASNRATVPGCIRARRIQPRRHARRPGRARPPAACSAGHSRRRPPTMATRPLRRSHSTSIRSVDCPPRPWCPLAAVTPHLAPPPPYANRAGRCSWSGVT

SEQ ID NO: 118002 - protein, 112 aa, Oryza sativa
  unsure (1)..(112): unsure at all Xaa locations
  Clone ID: PAT_MRT4530_21355C.1.pep
MQMLMSVFVIIIGCYTAIGWITDIVIFIIGVGTMHLKRCQTVKLYIAAPLTFXIVMVLFGFXKQLIGYNIVAFCHPSTVFRFGKSTRETMAKMIEVLGFGVIWFERRLSFRL

SEQ ID NO: 118003 - protein, 115 aa, Oryza sativa
  unsure (1)..(115): unsure at all Xaa locations
  Clone ID: PAT_MRT4530_21356C.1.pep
TQTLMSVFVIIIGCYTAIDWIAGIVIFIIGVGTMHFKRCPAVNFFHSCPTXLFYIVKALFGFIKQLIGXNIIAFCHPSTVFKFGKSTRGTMAKMIEALGFAVIXCERRLSFRLRM

SEQ ID NO: 118004 - protein, 124 aa, Oryza sativa
  unsure (1)..(124): unsure at all Xaa locations
  Clone ID: PAT_MRT4530_21357C.1.pep
MQTLMSIFVIIIGCYTAVDWITDIVIFIIGVGTMHFKRCQTVILYIAXPLTFLYXVKALFGFIKXLIGYNIIAFCHPSTVFIFGKSTRETMAKMIEALGFRVIWFERRLSFRLRTCCCVDLTCS

SEQ ID NO: 118005 - protein, 66 aa, Oryza sativa
  Clone ID: PAT_MRT4530_21358C.1.pep
ASKLAMALPSICHGGSCSAESACGVVAGPLLVTVLPPFACSSSQQQLRMPVLGSLGWSYGRGDHLT

SEQ ID NO: 118006 - protein, 111 aa, Oryza sativa
  unsure (1)..(111): unsure at all Xaa locations
  Clone ID: PAT_MRT4530_21359C.1.pep
TQTLMSVFVIIIGYYTAIDWIADNVIFIIGVGTMHLKRCQTVKLYSYPAXLFYISQGAVWVFKQLIGYNIVAFCHPSTVFRFGKXSTREIMAKMIEALGFGVIXFERRLSF

SEQ ID NO: 118007 - protein, 61 aa, Oryza sativa
  Clone ID: PAT_MRT4530_2135C.1.pep
SFAYKNNPARGSSGAHYVSLCDIHGAVSLVPAGSCHNTLKKYCQSCLVTRYQLVADIGVLV

SEQ ID NO: 118008 - protein, 303 aa, Oryza sativa
  Clone ID: PAT_MRT4530_21360C.1.pep
MLLNPASREVAALDSIRHHLLEEEEETPATAPAPTRRPVYCRSSSFGSLVADQWSESLPFRPNDAEDMVVYGALRDAFSSGWLPDGSFAAVKPESQDSYDGSSIGSFLASSSSEAGTPGEVTSTEATVTPGIREGEGEAVAVASRGKHYRGVRQRPWGKFAAEIRDPAKNGARVWLGTFDSAEEAAVAYDRAAYRMRGSRALLNFPLRIGSEIAAAAAAAAAGNKRPYPDPASSGSSSPSSSSSSSSSSSSGSPKRRKRGEAAAASMAMALVPPPPPPAQAPVQLALPAQPWFAAGPIQQLVS

SEQ ID NO: 118009 - protein, 97 aa, Oryza sativa
  Clone ID: PAT_MRT4530_21362C.1.pep
SMTDWRMEKKEGGRKKHLGHYIDHKEPDDVCGNEITHNIATFVPPTSGSSLAQFSCQGFVHAISLVQGTFLHLLYFIYFYFIWSFLEPHLWHIVIPG

SEQ ID NO: 118010 - protein, 118 aa, Oryza sativa
  unsure (1)..(118): unsure at all Xaa locations
  Clone ID: PAT_MRT4530_21363C.1.pep
PADGLGPVSNNDWKCYCVLDSPNSTVAYVYINPYTIPSETRXGLEINSGMCRRPRLGRCVRPIRISVAHMVCXLPPAGDDKPTSYDLYLREKLMCIRHDHALDNMFRTHDDGSVHGLC

SEQ ID NO: 118011 - protein, 87 aa, Oryza sativa
  Clone ID: PAT_MRT4530_21364C.1.pep
IIAEPLMPSWRRSGSICNSAQVFLLHAIYVFAASYILLVLYQVKRLVGFVSPLYLVPRDPYTEFPGVLIACHLGGYGPFLSMLSVQM

SEQ ID NO: 118012 - protein, 848 aa, Oryza sativa
  unsure (1)..(848): unsure at all Xaa locations
  Clone ID: PAT_MRT4530_21365C.1.pep
MRRDDAGGGGFGDLFDSVRRSIAFRTSTAPETPGPLGGGGGIGVRISSCLRKSRGMGLLGLISKSPSPPRRLLPPAPEFSGGGGGGGRGGGGGEESPQIRWRKGELIGSGAFGQVYLGMNLDTGELLAVKQVLIGSNNATREKAQAHIRELEEEVKLLKNLSHPNIVKRYLGTVREEDTLNILLEFVPGGSIQSLLGKLGSFPEAVIRKYTKQILQGLEYLHNNAIIHRDIKGANILVDNKGCIKLADFGASKQVAKLATITAAKTMKGTPHWMAPEVIVGSGHNFSADIWSVGCTVIEMATGKPPWSQQYQEVALLFHVGTTKSHPPIPEHLSPEAKDFLLKCLQKEPELRSTASDLLKHPFVTGESENLQPLNCAAQQETCVNELPAHDVSSGLGLNHSVNWPTISSNRSSKIKPLWEGSCDEDDMCEFADKDDCPGCWXSYNPMSEPFDNWESKFDASPEQTSHQSMEFGGLAKHAESSMTENDFTFPCEGSCEDDDVLTESKIKAFLDEKALDLKKLQTPLYEEFYNTVNAGNSQVADHTSNGIFSNSPKLPPRGKSPTSKMRGGAAAASTCDNSNNTRPESCSNQLSEDTVQSSRILREIASPQLDELGNKIHSDVQDSPSVSFAERQRKWKEELVQELERERGKTGHVHGHHGVTKSSGVTSSSRSGPGLHTVIVPRVSQTVGAGITVPRRRLLRFFYYRTPAFSLRPTCFVRTDAPNSDDASKKNDLAERAHHLQSTLEGRALFTGTLTTMLMRKTKFKWMRNKIYLPRLYNWPETIHVDLVTKDGETTFVPKLQGANTMEDTYGIHLCSYELGQQQEAREFWGTERVEYSMWVDFGGNYV

SEQ ID NO: 118013 - protein, 58 aa, Oryza sativa
  Clone ID: PAT_MRT4530_21366C.1.pep
QKNLCILHKGDTNRQTLTEYIQLPMQTPVMVTCLQGYNTSRYYWSVIRYMQMNGLATQ

SEQ ID NO: 118014 - protein, 370 aa, Oryza sativa
  unsure (1)..(370): unsure at all Xaa locations
  Clone ID: PAT_MRT4530_21367C.1.pep
VTHHVTDIWAKSSAYYVDAMYALWPMGGAWLCTHLWENYQYSLDKEFLEKRAYPLLEGCAMFLIDWLIKGPGDYLETNPSTSPEHPFIAPGTGGHLASVSYSTTMDISIIREVFLAVISSAEVLGKSDTNLVERIKKALPMLPPVKISKDGTIMEWAQDFHXQKSIIDTCHICLVFTLVILVAMQKXLRFAKLLPIVSTNEGKMALDGRPHGRWHCGHAFXNSENAYRMILKLITLVPPGGKVDFEGGLYTNLWTLISTCYQHHHGCSGAAFQQLQLQSTHGDADLYLLPALPREKWPKGYVKGLRARGNVTVNISWEKGELQEATVWSSNPKCTLRLHYGEQVAMVTVLGGNVYRFNGGLQCVETYMAP

SEQ ID NO: 118015 - protein, 172 aa, Oryza sativa
  unsure (1)..(172): unsure at all Xaa locations
  Clone ID: PAT_MRT4530_21368C.1.pep
KESAFYLGITTGGSFMQXTPSEGKVSLDRILENTSFMDQCNELLPEASVSRIEEPPTPESXSEPSTSTDSAEEPSAEPLPVENEEIQTPGCAPTFRDDLYEDYGNTLNYFSKKKPPIPLPPPDPIEYQYLKETVRELTSIMSDEWLKEENVDAKNAVARPSTSPLLAGHAAA

SEQ ID NO: 118016 - protein, 57 aa, Oryza sativa
  Clone ID: PAT_MRT4530_21369C.1.pep
RAASAMASVKCAPPPRSGRPRRPHYPSPSPRRPWHAAAIRSAARDSGSFWKGSETAG

SEQ ID NO: 118017 - protein, 99 aa, Oryza sativa
  Clone ID: PAT_MRT4530_2136C.1.pep
MVGGIGHKSQLAWERNMAKNKVALVSQLEANMKATTIQCKICMQTFICTTSWTKCKEPAAAMLPNSDLTACLPHLQKSWRWHFSAQSDEKKSSFHIPLC

SEQ ID NO: 118018 - protein, 42 aa, Oryza sativa
  unsure (1)..(42): unsure at all Xaa locations
  Clone ID: PAT_MRT4530_21370C.1.pep
SKHXXLLGSSIYTDEATHYYNARKSLIMRYHVNMNRFFSHNN

SEQ ID NO: 118019 - protein, 94 aa, Oryza sativa
  Clone ID: PAT_MRT4530_21371C.1.pep
SATALTPKPTQLPLLRRQRHAADARTTVSSSSPLAQIDPRAPANPTRRTIHCSSSPAATTGALPLSLSLSLSLSSVVSLRRGCCRKWRLVPPRA

SEQ ID NO: 118020 - protein, 102 aa, Oryza sativa
  Clone ID: PAT_MRT4530_21372C.1.pep
EKFRFFNPRNPKLWFPQNGKKGGKKGTNPWFYGGGLQKKKTLPGGPEFGTLSGSRNGGLRGGLWVRAQGPPPHPLGGSEPLGGIYKTGWGGDPSTGARRTRG

SEQ ID NO: 118021 - protein, 76 aa, Oryza sativa
  Clone ID: PAT_MRT4530_21373C.1.pep
MTADLGRIEGVAAEVGEERNKWRMSKKRESSSGGWRGGGVAMEVGVTLMVPMKKVAVSAAPLVALWKVDIWSWTQQ

SEQ ID NO: 118022 - protein, 367 aa, Oryza sativa
  Clone ID: PAT_MRT4530_21374C.1.pep
MRYIYRLAKRLQGEQRESCCEVIMKPRPSPAAASSGGVPARLRPHLTRLTVFLIVFSAGYSVGIMSSSIRPPASKPSQTVIRPRAAHLSGTASSTDVPASNGSAAAAANYPRSPPHDLFRFREECGEAIPSDAVVRTLLDKLFDGESPYESFPPPHTAALLHPAAARPRGWGSTGAVFAELIEEVRPDVIVELGAFLGASALHMAAVSKNLSLSPAILCVDDFRGWPAFRDRFRRDVPPPRHGDALLLPQFMSNVAAAGADATARVLPLPFSTASALAALCHWGVYADLIEVDAGHDFHSAWADINLAWAVLRPGGVMFGHDYFTAADDRGVRRAVTLFARVKGLTVRPHGQHWVLSPKPPLRRDGR

SEQ ID NO: 118023 - protein, 145 aa, Oryza sativa
  Clone ID: PAT_MRT4530_21375C.1.pep
MEDLHDWECRFTPRKLASLNKWSSRAGLSPMELQSCAGEVTDKVTAIAWGGRIRYLHLAFGGSSCWRYVVGLREGNKNVGAIVKGFHDGVAMGVFSLVDSREAAEAPTASHGDGLESQCGGSHAAVQGEHNLEPWAEACVCSIAF

SEQ ID NO: 118024 - protein, 266 aa, Oryza sativa
  Clone ID: PAT_MRT4530_21376C.1.pep
CLVHVGLVCSDSRRRPAHARSSDVESADGDAAGAGTDSSDSDDDDDEGREQRSSFAKRCESINTMVSFLWWIIGFYWVVSGGDVLEQDAPRLYWYCGPKPVPITDYFMIVQSNVHMLSVVFLAFDVFFAVFCVAMACFIGIALCCCLPCVIAILYALAGQEGASDADIGFLPRYRYSDPSEDGQKGTDEGVMIPVLNNSGTSTSERILLHEDAECCICLSSYEDGAELSALPCNHHFHWTCITKWLRMHATCPLCKYNILKGSESA

SEQ ID NO: 118025 - protein, 85 aa, Oryza sativa
  Clone ID: PAT_MRT4530_21377C.1.pep
EPQNRTFFTPNYANRTNYPPRTNSERFCPTWRTCGNPRAREDGRRGRRGDGRSAWAVGDGGGIERGGDKARQRWRQRARGGKRRE

SEQ ID NO: 118026 - protein, 361 aa, Oryza sativa
  Clone ID: PAT_MRT4530_21378C.1.pep
MAQCGGGDVSRHRKGHLDTVESLCQGLLDDVMLDDDKCRAMFGYLQEWQDLASMCYGSLGGEPPLAPEASNGSGSSGGGGSFRKRRPDDAKGESNSICKRQRGKQQQQQQPCHPDQMAAAVGKGRPERARPGAKKKAEVASPKDSPATSASTVTAGQKTDYIHVRARRGQATDSHSLAERVRRERISERMRYLQELVPGCNKVTGKAGMLDEIINYVQSLQKQVEFLSMKIAASNPVVNFNIVEDLFGRQLSQAACNPAALPAMALPMAQVEPSCLQMSPLQQMQTSAGSSGYGLEMVVSNQYSPPGGPMSVPAGASVEPCLNVNGAAGWDIGSHGLFSGFDAPFQSVQSDCLLDNLKMEM

SEQ ID NO: 118027 - protein, 110 aa, Oryza sativa
  Clone ID: PAT_MRT4530_21379C.1.pep
THKCTCIAIDDISTVSMNKESSATNIDVVKTLGMRTSPSFIPSYISILRLSSKQSPAGESRSWIQSLKLNIKGTLSSFNTFITHRYKNLVKVQHKVTCKLDSQNQLLTLY

SEQ ID NO: 118028 - protein, 546 aa, Oryza sativa
  Clone ID: PAT_MRT4530_2137C.1.pep
MAGHTPNPLFLLLFLGYLLFAAAQPPLTVTVGLIIDGGSPVGKIANTTIPMALDDFYAAFPRSPARVRLLHRDSRGDVVAAASAALELMEGRGVRAILGPQSSVESAFVADLATRAEVPVVSFSATSPSVSPGGGRFFARAALSDAAQAGAIAALARLFGWRRVVPVYQDDDYGAAFVPFLVDALTAEGSEVPYRCALPAGADADAVAAAMYRMESLQTRAFVLHARPDLAGRVLAAAEAAGMMGEGFAWVITDGLTGLLGSINAPQGVIGLAPYVPTTPRLRDVRRRWVRRFMAEHPAADAEHAEMGSYAVWAYDAAWAVASAAEHLTAGDLSPPQGGLVGGKGGPTDFAGLGKSRSGKKFLEAITSTTFDGLGGRFQLVDGELAVHAFRVLNIMDRGKERSIGFWTKDGGLTRHLGVGGGGGGELAPVIWPGESTVVPRGWVVPTSARRLRVAVPGSVNPGYRAIVHLDVDAATNRTTAGGFVVEVFEAAVRLLPYALPVEYVKAESMPYDKLVQMVADGFSVIRSHEMGNLWADNDLASRKLT

SEQ ID NO: 118029 - protein, 133 aa, Oryza sativa
  unsure (1)..(133): unsure at all Xaa locations
  Clone ID: PAT_MRT4530_21380C.1.pep
SSTRPNNIYVLDAVTATMEDHHQVYRXGEQCXPPIIYPTSSLTICPTLTRRRCAGRGSGXADNKQVMEDCWRQIAGGVDRWRMSGALDHMLNSIYRELAAIEAAHSMDEAFTMXRRGDXLRAAASIAAICNED

SEQ ID NO: 118030 - protein, 212 aa, Oryza sativa
  unsure (1)..(212): unsure at all Xaa locations
  Clone ID: PAT_MRT4530_21381C.1.pep
GXAGLLARAPCXPXQXXHIVDXKXXXXIXQKXAMRSXXXHXXMSXIXTXSXRISXSKWYPLXLFQTSSSXTTXVSTRVXNTAEXQQIQTNAIAXKLQKTXRFXTXXYCXXXXXDQFXXXXSSXPPXIAIXIXXYXXFWLXKELXSLCXXCLGVXQTIXRRLXKXTGXXXXXXXGNXXXPAGEXWWXXGSXEAPXXXGXXPXRXXPRGGGAGA

SEQ ID NO: 118031 - protein, 47 aa, Oryza sativa
  Clone ID: PAT_MRT4530_21382C.1.pep
KKRRCARHKKLWLRTPDSEYYKVLHPCWGWFTIIAGEYKPTVCNYYI

SEQ ID NO: 118032 - protein, 459 aa, Oryza sativa
  Clone ID: PAT_MRT4530_21383C.1.pep
MEDWLFYSLTSLLCLACSLLLRARASAASPKAAAAEAAPLPPGPRTVPVLGPLLFLARRDFDVEPTLRRIAAEHGPVFTFAPLGPSRPTIFVAARGAAHRALVQRGDGVRVAPPRRRGARRPRCSPAAAGTALRRCISSGVLNPARLRAFSDARRWVLDVLVSHVRGEGGAPVTVMEPFRYAMLCLLLHMCFGDRPGDARVFAFLPPITKLVFRKRWNKMVSLRRRQEELFVPLMRARREAGAGGDCYVDSLVKLTIPEDGGRGLNDGEIVSLCSEFMSAGTDTTATVLQWILANLVKNPAMQDRLMEEIAAAVAGDGEVREEDLQAMPYLKAVVLEGLRRHSPGLYALPRAVEDETTLDGEIGLDSEVWTSPEVFRPERFLAGGEGEDVDLTGSKEIKMMPFGAGRRVCPGMALALLHLEYFVANLVWEFDWREVAGDEVDLTEKMLEFTVARRVFLY

SEQ ID NO: 118033 - protein, 780 aa, Oryza sativa
  Clone ID: PAT_MRT4530_21384C.1.pep
MGSEAKEMKYRRRARVPEPFDYGQCGGDRSGVLDWGALKENPVELLRKLDELRDHITRSCEITDQPRERHRMSRRTASLRPSHAEPPPLGRGPEHYRSRYTGRYGSGFPHSPNDQLHRSMHRDRYERQPSGRFRQWPERQWENSGYLGGNHHQSTCQCAQCLHGQRAVMQEEHIPMTRYFAGQQGSHLFDRSPSVSSELDRRSVASSLYSHFSVSKRRTEFFRKKAESFCRPVRGAAPFVVCSSCNQLLQLPPGKCTARKQIQVRCGSCSEIVSFKLKEVKIHPLVAPTSFPASKTVGSSSRQVNKSFGWYQHQDEGNSSFHKLQAQERWQQNKDLADNISVSSTSSYDRIDKECGSNRSSQLLSVSVRRSRLANIPKDILCQGDAYSQVETSAFNTGNLQAPVIEDKCVDPFSSRLKDCSGGDRTSKECSLNIMADSVDANVRDERSDVTYEQNSKDHKEGFGEETVSSRHEQKLKESTSGFCDDGSMGNIDKLTADNDDTSSLEDGDVSKKYEEKIKQDDNNFQSEFITERYSKCSKEDNNSVIQVETIATICKQDDLDDCYSELLSPNSEHAIMPSKLESSVNERTNSSSRVSSEAELDEVQSAATKNGDSKFFAGFLKKGLKDISLFNQSVDSAKVSINGHSISERVLRKAEKKSGPVGPGSYWYDYRAGFWGVMGHECSGIIPPFIKEFNYPMPKNCAGGNTGVIVNGRELHQKDFELLAGRGLPRISGKSYSVEINGNVIDETTGKKLRKLGKLAPTVEKLKRGFGMHVPEEKS

SEQ ID NO: 118034 - protein, 74 aa, Oryza sativa
  unsure (1)..(74): unsure at all Xaa locations
  Clone ID: PAT_MRT4530_21385C.1.pep
LRRPHLLVSQRFNEQCIDWCLSMLGEEKKSHLLQLPLDNGIPLNXLYNLSAXVQEGLVDVAASHCWLVAHGHPR

SEQ ID NO: 118035 - protein, 881 aa, Oryza sativa
  unsure (1)..(881): unsure at all Xaa locations
  Clone ID: PAT_MRT4530_21386C.1.pep
MARPRGRKRAAAAAAVAEEDSSKPEAAEAKKPAARGRGKRAKASPKPKPETEYFPEKRNLEDLWLSAFPVGTEWENIDKIKEFNWNFENLEHDIRFPVGEQKALEEGGELYGKTVYLFGSTEPQLLEVNGESKIVLIPIVVAVDCPFPPSDKIGINSVQRENEEIVPMKAMKMAWVPYVPLEDRLSRIDSLKTKIFTLGCTQRRSALRHLKTERVKLFDYCMPYYMPLNPPEDEDDTVVNIIYPLEPPIVCDFDWEMDDYEDFADEKVKDEVLPEDEKEKFKEFIKERVRERKRELKQAKEARKKAIDDMDPKVKEAFENIKFYKFYPVKTPDTPDVSNVKAKYINRYYRHAHHLMGGESAAFLIVGSTSTSSSSSSRTRRKLAAGGLERAASSRPPCCCGDRRSRAAGDPHGRSSCCYLTLNSYLEACRFCVGMEVVLHEGDAKDWVYKGEGAANLILSYTGSSPSMLGKVLRVKKILKDKGQPAPNCIVFSSHEEHLWGKIPGLLESVKNDCLPQAYATIVMSQHLGANHVXDGGVRVRVSKTFFRALLGKNVLDNRPAWRVNASAIDAXADSALLISDHTLFSGNPRGSSCIAVEIKAKCGFLPSSEYISKENSIKKQVTRYKMHQHLKFHLGEISKTSEYDPLDLFSGSKERIHMAIKSFFSTPQNNFRIFVDGSLVFGGMGGGADSVHPNETEKCLEDLSKVTGLQLSDFIELLSEAIFKSGVLGKLLATQKLDDHDIEGAIHLYYNIISQPCLVCKSITDTELLRKYSTLHSLPLDKSEKIVRDFLISATAKDCSLMISFRPRQSGTTDSEYDSVFLDSVNQSYDYKAYFIDLDVKPLDKMVHYFKLDQKIVNFYTRNGEVGGDPRDPPKGCGPR

SEQ ID NO: 118036 - protein, 82 aa, Oryza sativa
  Clone ID: PAT_MRT4530_21387C.1.pep
QAYPQPSLPRRPPASTSSRFASPATSKSSVFTMKSSSPAELELLGDAATDAELELDLVLDQAVAALDLVLERRGRLAAATRP

SEQ ID NO: 118037 - protein, 360 aa, Oryza sativa
  Clone ID: PAT_MRT4530_21388C.1.pep
MSELPSPPPPAAGNQYGAEHAAAKKAVALAARLCKKVQQDLLKLDVQTKADRTPVTVADYGSQVLVSVVLKIELPSNSFSMVAEEDSEDLRKDGAQEMLGHITKLVNETIINDGSYSITLSKEDVLVAIDGGKSEGGPSGRYWILDPIDGTKGFIRGDQYAIGLALLDEGKVVLGAMACPNLPFKSIDHNGGSSGDQVGALFSATIGCGSTVESLEGSQPQKISVCSISNPVDASFFESYERKHCMRDCTSSIAEKLGIQAPPVRIDSQAKYGAVAQGDGAIYWRFPHKRSKEAVWDHAAGSIIVTEAGGLVKDASGNDLDFSKGRYLDRDAGIIATNKYLMPLVVKAAQEAMKEEGILG

SEQ ID NO: 118038 - protein, 97 aa, Oryza sativa
  Clone ID: PAT_MRT4530_21389C.1.pep
SRNSTDLDAHTGRRVRYATPCGWTDAVLPPANNCTGLWFFPYGAKGRIGNRKIFVALRGETRRRLADYVRVGPTQKAHSALATFADDTLKNSPNPLH

SEQ ID NO: 118039 - protein, 425 aa, Oryza sativa
  Clone ID: PAT_MRT4530_2138C.1.pep
MAQDASDAVLPASRIMADRHLSLPRKIMPEDAAVRAGESRPRPRYPERSVHLLSFAMAGLIPPFSGLFHEVLDFYEIHALHLAPNVVMTLAIFAHLCEMFIGVRPTMRLFQSFFVPQLLQGPSPVSGEGRRWAPLKDKLWFSFQAKAQKLASRWWDEGRLSLPVTAADPSLGLGNNDTTGAGDDDMASKEPSGDHDHEMNGTSAGGGEPKDGAVVTGRNRRPRGRPPGSKNKPKPPIFVTRDSPNALRSHVMEVAGGADVAESIAHFARRRQRGVCVLSGAGTVTDVALRQPAAPSAVVALRGRFEILSLTGTFLPGPAPPGSTGLTVYLAGGQGQVVGGSVVGTLTAAGPVMVIASTFANATYERLPLDQEEEEAAAGGGGHMMAPPPLMAGAADPLLFGGGMHDAGLATPAWHHARPPPPPPY

SEQ ID NO: 118040 - protein, 212 aa, Oryza sativa
  unsure (1)..(212): unsure at all Xaa locations
  Clone ID: PAT_MRT4530_21390C.1.pep
YFTTHASSPRLAACVLVLVSGEAITSSRIRRAAGGEERRRRERRCRIRPRWPPPPTDPPSDEADAVVAVDATVAVDADGERERERGRDGRLRHTPPSLRHAGETXRGESRRHSPPSPRRAGEKGGRREEKRRRWWERRPAGGRGSGGKWGEGAAPPEGXRGXRRRXGRGGGGEAASGVGEAVERLGGRGWGRVRVRVRVFIRPXWADRQGTK

SEQ ID NO: 118041 - protein, 83 aa, Oryza sativa
  Clone ID: PAT_MRT4530_21391C.1.pep
LRLLLQLSLAIQEIKLPYLLPINLVWLYTASVVQVKNKKILNGEFNTYLTQFIKSDQMISGPQIEEKLICAVNRSPATCQVDH

SEQ ID NO: 118042 - protein, 370 aa, Oryza sativa
  Clone ID: PAT_MRT4530_21392C.1.pep
MASNSPATSDAATGDVPEPSRSSSVVKAMSGYHVLKMEGYAAGVKGLGVGKFIDSGSFDVGGHRWCIRYYPKRSPASPGDGDWISIYLNLCSTAAAIGDANASFTISLLDQDDDEHQPVAAHSRSCSSTVTFSSAATKAWGFPRFVERKTLEESPYLRDDSFVLRCDVTVFKETIIEPAAPTPLVAVPPPDMHRHLGSLLSGGHGADVTLQVGDETFAAHRCVLAARSPVFMAELFGPMATSRHNDRETIRVHDMEPRVFEAMLHFIYNDSLPKVDDDEVVAMAQHLLVAADRYGMERLKLMCEDTLCSHVDASTAATALTLAEQHHCEGLKDACFKFMADPDNLKVVMESDGYLHLTRSCSYVLKKLAT

SEQ ID NO: 118043 - protein, 118 aa, Oryza sativa
  unsure (1)..(118): unsure at all Xaa locations
  Clone ID: PAT_MRT4530_21393C.1.pep
MATSGLRSCSAVRDPSLLDADVDRSRLPVCAYATTYGRATRSSEWMPHQPRPVHLDGSSHRDSGGDPLGLSTGAQNIERITEPDGYHXRSATLTVPGVSTTEALGPIILEQALPGRAP

SEQ ID NO: 118044 - protein, 130 aa, Oryza sativa
  Clone ID: PAT_MRT4530_21394C.1.pep
MQTTKMDRVVRVYSGGTVSANGKFDEMKVGVLVFASSPTWAQLCDRVRSKMEHVVPTNVMRMEGQYVASWLIACYCTCSHHSTCPEETLTQDPPLAEIAGPGETTKFGMNRRMGYAHMGDGLVWILRAIK

SEQ ID NO: 118045 - protein, 55 aa, Oryza sativa
  Clone ID: PAT_MRT4530_21395C.1.pep
EHNLTGEQAQVWEGTGAFHWWGEVASLYRHGPEERGVLLSRQYGTQASDCPFSVL

SEQ ID NO: 118046 - protein, 87 aa, Oryza sativa
  unsure (1)..(87): unsure at all Xaa locations
  Clone ID: PAT_MRT4530_21396C.1.pep
MALSAMASSATTVCPLQGXKSTAGMPAARRSGKSSSCNGSKGRRIRSMQVWPIEDIKKCKTLXYMSTITVEDRLKHIEYLLRSKWVT

SEQ ID NO: 118047 - protein, 50 aa, Oryza sativa
  unsure (1)..(50): unsure at all Xaa locations
  Clone ID: PAT_MRT4530_21397C.1.pep
TXYARKPQEFINNKTKLNLPSQFSNYNSYLLSSNPKFPPPAQFIILFPKI

SEQ ID NO: 118048 - protein, 552 aa, Oryza sativa
  Clone ID: PAT_MRT4530_21398C.1.pep
MPLLLRGGSLFRLYGCGCGLPSANFSPSKLALIRLSLMMAETRATYSRRAASKNTDIKKDDEHVLEKEDVAESKLEIEQLRNDPDRLQSMTVKELREITRMMGIPVKGNKKDLVSALMDSLGKERNGVNYLGVPFLLDAGILSAGKVGTSSVEKIGVSEVPSKRKGASVVVEQNIDSSEVISETPSKRSRAKNKGTAEESSGANVKQSKTSVQKKKLVVQGASVDHEEPWTVLVHKKPQPAWIPYNPKVMRSPSLSKDTKALKILSWNVNGLKALLKSRGFSIHQLAQREDFDILCLQETKMQARYDFSFSYAKLPSKIGQKFINQELRYFEQEKDVEVIKEGLLEGYTHSFWTCSVSKLGYSGTAIISRVKPLSIKYGLGVPDHDTEGRVVTVEFNDFYLLTAYVPNSGDGLKRLTYRVTEWDPSLGNYMKDLEKSKPVILTGDLNCAHQEIDIHDPAGNRRSAGFTIEERESFETNFLSKGFVDTFRKQHPNVVGYSYWGYRHNARKTNKGWRLDYFLVSESIAERVHDSYIIPDISASDHSPLGLVLKL

SEQ ID NO: 118049 - protein, 486 aa, Oryza sativa
  Clone ID: PAT_MRT4530_21399C.1.pep
MDMWTSNQNKSYMCITVHWIDDTWKMQKRIIKFMHVEGHHSGSNMCKEFYDSIVDWNLDRRLVGLTLDNASSNDVCVKDVILKLRKISPLICDGIFFHFEAFQKCALEVSLDNTKGLSMDTPTRWNSTFLMLKNAIYYRNAFDRLFLRHGRKYAKCAPTKVDWSMAIALCKCLKPFHEATELFSGTTYPTANHFFGKFCSIKLYIADWCNSTDGTIKTMANAMQTKYDKYWEKSNMALAVTCFLDPRYKTSSIEYYGMKIYGLEAAEKFDEFNGVIKKLFDVYATSACATSKKKGAEMHVHQLQIQPDPVHNTDEFDDIFNENDSSHDHEQHFQRFLLERSQPICSDKTELQIYMEQPLLLWTSKDPFDILSWWKLKQAEFPILCKLARDFLCIQVSTVASESAFSAGGRVVDPFRTRLDPEAVQALVCTKDWIKAANNSYKTQAIINELDIESVERHLANLLIVEKEENNDDMEQDDVLMDEMDE

SEQ ID NO: 118050 - protein, 220 aa, Oryza sativa
  Clone ID: PAT_MRT4530_2139C.1.pep
MQCRPNWEGGQYEGDDATRFEALRLAMELGVNYVDIELKVADKFISFIYGSKPEKCKLIVSAHNYESTPSCEELADLVARIQAVGADIVKIATTANDIVDVSQMFQVMVHCQTVQKNLPKIDRRLNANRLCAEVTLISADSLANVAAEPIPSSTWQGLNTNRIGAKLLISVPISGAELWDLAARSWATQHNSYVGRPRGAEPSNLSANVIGNDPKDLSAN

SEQ ID NO: 118051 - protein, 50 aa, Oryza sativa
  Clone ID: PAT_MRT4530_213C.1.pep
MGRGGRKRRGGGDYDSYHRDILSQRGVAVLMEGVMRVARLLIEQEPTTQL

SEQ ID NO: 118052 - protein, 283 aa, Oryza sativa
  Clone ID: PAT_MRT4530_21400C.1.pep
VIIFTIDTSPAAGALVMKFCSIKLSIADWCNSTDGTIKTMANAMQTKYDKYWEKSNMALVVACFLDPRYKTSSIEYYSMKIYGLEAAEKFDEFNGVIKKLFDVYATSACATSKKKGAEMHVHQLQIQSDPVHNTDEFDQHLQRFLLERSQPICSDKTELQIYMEQPLLLWTSKDPFDILSWWKLKQAEFPILCKLARDFLCIQVSTVASESAFSAGGRVVDPFRTRLDPEAVQALVCTKDWIKAANNGTLCVCAIINELDIESVERHLANLLIVVSYFLILPL

SEQ ID NO: 118053 - protein, 420 aa, Oryza sativa
  Clone ID: PAT_MRT4530_21401C.1.pep
MAAITLLRSASLPGLSDALARDAAAVQHVCSSYLPNNKEKKRRWILCSLKYACLGVDPAPGEIARTSPVYSSLTVTPAGEAVISSEQKVYDVVLKQAALLKRHLRPQPHTIPIVPKDLDLPRNGLKQAYHRCGEICEEYAKTFYLGTMLMTEDRRRAIWAIYVWCRRTDELVDGPNASHITPSALDRWEKRLDDLFTGRPYDMLDAALSDTISKFPIDIQPFRDMIEGMRSDLRKTRYKNFDELYMYCYYVAGTVGLMSVPVMGIAPESKATTESVYSAALALGIANQLTNILRDVGEDARRGRIYLPQDELAEAGLSDEDIFNGVVTNKWRSFMKRQIKRARMFFEEAERGVTELSQASRWPVWASLLLYRQILDEIEANDYNNFTKRAYVGKAKKLLALPVAYGRSLLMPYSLRNSQK

SEQ ID NO: 118054 - protein, 741 aa, Oryza sativa
  Clone ID: PAT_MRT4530_21402C.1.pep
MESGSASSASAAASTTASSPVLQLPAPPSHATAATQDTSPTAGALAHNDAIDLTTNDDSEVLPPPGKKQKKCSSEVWQHYTKYKVSKKGSDDTVIVEEYAKCNKCSYKRRCESNCGTSVFWNHLNNKHNIKSGQQQLQMKKSEDGTEGAVETYRYDETVSLKKFYMAIIMHEYPFNIVEHDYFVDFIKSLRPTFPIKSRITVRKDILNIYEEEKKKLWQHLLTLSCRFSTTMDMWTSNQNKSYMCITVHWIDDTWKMQKRIIKFMHVEGHHLGSNMCKEFYDSIVDWNLDRRLVGLTLDNASSNDVCVKGVILKLRKISPLICDGIFFHVRCFNHILNLVAQDGLKQITGAVLKIRNTISILKHSPLQFEAFQKCALEVSLHNTKGLSMDTPTRWNSTFLMLKNAIYYINAFDRLFLQHGRKYAKCAPTKVDWSMAIALCKCLKPFHEATELFSGTTYATAKSFFRTDRTIKTMANAMQTKYDKYWEKSNMALAVACFLDPRYKTSSIEYYGMKIYGLEAAEKFDEFNGVIKQLFDVYATSACATSKKKGAEMHVHQLQIQSDPVHNTDEFDDIFNENDSSHDHEQHFQRFLLERSQPICSDKTELQIYMEQPLLLWTSKDTFDILSWWKLKQAEFPILCKLARDFLCIQVSTVASESAFSAGGHVVDPFRTRLDPEAMQALVCTKDWIKAANNGYKTQAIINELDIESVERHLANLLIVEKEENNDDMEQDDVLMDEMDE

SEQ ID NO: 118055 - protein, 361 aa, Oryza sativa
  Clone ID: PAT_MRT4530_21403C.1.pep
MTVIDGAVAADAGGAAAAVVQPGNGQTVCVTGAAGYIASWLVKLLLEKGYTVKGTVRNPDDPKNAHLKALDGAGERLVLCKADLLDYDAICRAVAGCHGVFHTASPVTDDPEQMVEPAVRGTEYVINAAAEAGTVRRVVFTSSIGAVTMDPNRGPDVVVDESCWSDLDYCKETRNWYCYGKAVAEQAAWEAARRRGVELVVVNPVLVIGPLLQPTVNASVAHILKYLDGSASKFANAVGRYVDVRDVAAAHLLVFESPSAAGRFLCAESVLHREGVVRILAKLFPEYPVPTRCSDEKNPRKQPYKMSNQKLRDLGLEFRPASQSLYETVKCLQEKGHLPVLAAEKTEEEAGEVQGGIAIRA

SEQ ID NO: 118056 - protein, 1289 aa, Oryza sativa
  unsure (1)..(1289): unsure at all Xaa locations
  Clone ID: PAT_MRT4530_21404C.1.pep
RYAGHVGFSVRKSSSDKSAENITRSRTFVCSREGFRKDKKGAKEVKRPRPEPVGVAGLFKYSTAMDIVLLVLGCVGAMINGGSLPWYSYLFGNFVNKIXQRRQDADDEGRQAGLAACIAMIISSISQLRFKSEITCWRIIGERSALRMRREYLKAVLRQEIGFFDTEVSTGEVMHSISGDVAQIQEVMGEKIPGFVHHVFTFVFGYVVGFAKSWRIALAVFAVTPAMMACGMAYKAIYGGLTAKEEASYQRAGDVAQQAISSIRTVMSFVMEERLAGEYAEWLDKAAPIGVKMGFAKGAGMGVIYLVTYSQWALALWYGSRLVANGEIKGGDAIACFFGVMVGGRGLALTLSYMAQFAQGTVAAGRVFEVIDRVPEIDAYGAGGRALPAVKGRMEFKDVEFAYPSRPDAMVLYNLNLVIPAAKTLALVGVSGGGKSTMFALIERFYDPTRGSITLDGHDLASLNLRWLRSQIGLVGQEPVLFSTSIIENVMMGKENATRHDAISACAMANVHTFVLALPDGYDTQVGDRGAQLSGGQKQRIALARAIIRDPRILLLDEPTSALDTQSEAVVQQSIDRLAAGRTVVVIAHRLATVRNADTIAVLDRGAVVESGRHADLMARRGPYSALVSLASDSGGARPDLAGAAAAYTSFTDESGYDVSVSKSRYGFQTIREEEEKKDSQDAKVRVSEIWRLQRREGPLLILGFLMGIHAGAVFSVFPLLLGQAVEVYFDADTARMKRQVEYLAMAVVGLGVACILTMTGQQGLCGWAGARLTMRVRDRLFRAIMRQEPAWFDEEDNAMGVLVTRLARDAVAFRSMFGDRYAVLLMAVGSAGVGLGICFGLDWRLTLVATACTPLTLGASYLNLLINVGARSDDGAYARASGIAAGAVSNVRTVAALCAQGSVVGTFNRALDGPAAKASRRSQLMGVILGLSQGAMYGAYTATLCAGAHFINNGVSTFGDVSKIFLILVLSSFSVGQLAGLAPDTSGAPAAIAGILTILKRRPAITGDSTKRRITIKDGKPIDVELRWRRRVAASFPRTPTAGPHRLLPAPPHSDSSTPPPSAVVAIRVLPHPRLPRAVAADGVGRLLVAPVHAPALPRHVCAGAHTRRRWRQGAVAAKRGDRRAPGQCRETEEDAKEANIHKFISALPQGYETQVGESGVQLSGGQKQRIAIARAIVKQARILLLDEASSALDLESERHVQEALRRASRRATAITVAHRLSTVRDADRIAVVSAGRVVEFGGHDALLAGHGDGLYAAMLTLKQATCSSAAEMRVGNKVSFSLEADIS

SEQ ID NO: 118057 - protein, 199 aa, Oryza sativa
  Clone ID: PAT_MRT4530_21405C.1.pep
MANKSSSAAAAESPWWQQQQELEPSPNAGPRRLLHHRGDVPRSAPPRRPWPPGERGGRQASSNVLLTSSLRAKVGDFGFARWASGRVTPSSSSTASRRSVSYDTLVGLFRPPASGGDEAASTAAGGGSLRSCTAEAPPPSEKGEERGGVAKGGEGDTDDDDDMEMARSWRWSPARRRCRSGGEEKRGREEREGREREEE

SEQ ID NO: 118058 - protein, 155 aa, Oryza sativa
  unsure (1)..(155): unsure at all Xaa locations
  Clone ID: PAT_MRT4530_21406C.1.pep
WRRAAPPRRRRSRAPPAAASSPPGPSPRIGRSVPPATPRHRRRPPSASSAXRRRSSRSLAAGPSAAATPPPRPSSSSSDATFTAPPPPSSAPAKSTSSFPPDTTHRSPNAVRSRSKSDDNDDEDDIDFTSASSSTKFSSSVAIASAALWLWMDVV

SEQ ID NO: 118059 - protein, 69 aa, Oryza sativa
  Clone ID: PAT_MRT4530_21407C.1.pep
SIKTCFTEVYIQHINSSTTGGAIDIIIELSANISFSFRNITPNNHERYEVGVLPKLNLNGAVQNANVGS

SEQ ID NO: 118060 - protein, 65 aa, Oryza sativa
  Clone ID: PAT_MRT4530_21408C.1.pep
NPVSNFRIMDIYFPSGDPSSCNRRRLPSQYRRQLCHSTDHSCWTMCPLYLFILINHRTVLVEVHL

SEQ ID NO: 118061 - protein, 39 aa, Oryza sativa
  Clone ID: PAT_MRT4530_21409C.1.pep
KSSVLIQSLYKNDAKKKLGETHHYCQLMLLLLLAGSLSS

SEQ ID NO: 118062 - protein, 194 aa, Oryza sativa
  unsure (1)..(194): unsure at all Xaa locations
  Clone ID: PAT_MRT4530_2140C.1.pep
MHLRKVVQNPRAPLRTSAWFGEPLVGRARGCRAEDEHRLRWRWGCCGGRSSCSGALAPLSSPPPRRPSPTAGLSPPPPAGLLSLPXPAASAPSTPFATAPGPXPPPPRPPLWCPAPPPPPAQHRWRHRAIDAIHNRPPPSPCPASQPPPPSXSPASPWRPPPQPPVGLAREGKRRVREREEEEEGKEREGDDVA

SEQ ID NO: 118063 - protein, 78 aa, Oryza sativa
  Clone ID: PAT_MRT4530_21410C.1.pep
VEQQKNMGKGTLQPHQGKKWKQGMLCHSGWWNQRMKISLQNFSVKVEVEGKLLQLLCCASDHTISIILLGCAIHQLIL

SEQ ID NO: 118064 - protein, 99 aa, Oryza sativa
  unsure (1)..(99): unsure at all Xaa locations
  Clone ID: PAT_MRT4530_21411C.1.pep
WCXRVXXLKYDNRRXDDSEXVVXHXQGTRRQGGQHTRELNDTPGSXLETLXERRSXGGKXHPRYGFQSCMGLHAIRIAAYSPILLSGLXSILNDXXXRY

SEQ ID NO: 118065 - protein, 96 aa, Oryza sativa
  Clone ID: PAT_MRT4530_21412C.1.pep
LCLVLDAEEEYEDERVHHGVASLHVRDPRCAAGDAQPRAQQAKVPVQYGCACVEHSTLDQLVGSCLIPSPTPWLTLFRPGPPPRVRIASPAVRWFA

SEQ ID NO: 118066 - protein, 82 aa, Oryza sativa
  Clone ID: PAT_MRT4530_21413C.1.pep
MPPWSRRVPWTVATTSHSIGQPPRKPTNALDGGAFTCRVSGPVVLPCTWHVGPARVARYYAYVKLLVAAALAFGVGGLWLQC

SEQ ID NO: 118067 - protein, 335 aa, Oryza sativa
  Clone ID: PAT_MRT4530_21414C.1.pep
MSSYDQMLAPLLGAGRSAWTAHDGGGGGGEAVVRQILKCTRWQLEETTDFVTCPYHYYCDSSYPGDYHAAVGVLVAAFAAYCFLSTLAFTVLDLARSGGGGGGAGGVRGIRRKYLLPSGPFLLPLVLLVLAKGQRINAVFPLAQLGPALLLLLQASALAFRNEADGDIRYAVLEASTVSGVLHASLYLDAVVLPYYTGLEALRWSQFSGECATCLCRMEPLVVGGTAVRYRGLSKTALAIIFALCSRMVCRIYGEERLSAWTRSALEAAGWVFVAADAVYLVGWVAIEGGAVAVLAYSLVAGLVFLSVFGKVYRFLAWLETRQSQWKSSLCHSAV

SEQ ID NO: 118068 - protein, 114 aa, Oryza sativa
  unsure (1)..(114): unsure at all Xaa locations
  Clone ID: PAT_MRT4530_21415C.1.pep
QKTRGLGDLLNSSAGSKLAFGCMSVTVDLILQSTRNKDKETVIKSINDSRSARTLSIYGNHLEAHQLKPDVGYESYCRNRLYYLTQSDSNLADPXVADPDSNXFLLCFRDNPHL

SEQ ID NO: 118069 - protein, 109 aa, Oryza sativa
  unsure (1)..(109): unsure at all Xaa locations
  Clone ID: PAT_MRT4530_21416C.1.pep
SIDDDAAPPASGFRRATXAPPDVLARTSSDRSPALSPPFARLVCCLEQDACIDLGGGIRSRGASDAALGPPHSSAIAVSSLQGLPSPSPSPSAPGPAAAADAAAATGAS

SEQ ID NO: 118070 - protein, 79 aa, Oryza sativa
  Clone ID: PAT_MRT4530_21417C.1.pep
MRGGAERRKSGGECVVGSLGCAPSSGSSDRFSSSWVNVGSGGGCEGIAYGVGDGFDSLIDRGVSCIRKQRWLRRGVGRH

SEQ ID NO: 118071 - protein, 78 aa, Oryza sativa
  Clone ID: PAT_MRT4530_21418C.1.pep
RRKSGGECVVGSLGCAPSSGSSDRFSSSWVNVGSGGGCEGIAYGVGDGFDSLIDRGVSCIRKQRWLRRGVGRHGEEGI

SEQ ID NO: 118072 - protein, 130 aa, Oryza sativa
  unsure (1)..(130): unsure at all Xaa locations
  Clone ID: PAT_MRT4530_21419C.1.pep
EKWISLSDAALDAVSYVLAXFAFFGVAVGLVVFLRQVLHQENAEAANSVSMWMGTXXNFSLFCAFLSDSYMGRYITCIMFQFIFIVVCNPSLVKQVISIVCSQRNIQAFSAYLRSGVSKNFSEPWQASLV

SEQ ID NO: 118073 - protein, 131 aa, Oryza sativa
  Clone ID: PAT_MRT4530_2141C.1.pep
GGSVDIPFGVPHVCSAPSVGLSAVLVLTGCSGVPLFSLGCSCMGWLQVSLLDRSVAGLFPAATRFSVSSVCLPSWSSLSFGAWILTEYRCSIALWAGALFRLSPMFTQSPSCDDAWLWQTNAWVVPGCPVR

SEQ ID NO: 118074 - protein, 122 aa, Oryza sativa
  Clone ID: PAT_MRT4530_21420C.1.pep
NTSNVKYLVVSWRKEQVFDFKNIFFFFFSIAGNKMISLMASNISGPSLQGQTNWQFYKRIKGSISIALNSWKTIQGLMPPLNLSLLFDKDRLATPLFGEYPHNPTHLYVNQITTLIPKLNFS

SEQ ID NO: 118075 - protein, 79 aa, Oryza sativa
  Clone ID: PAT_MRT4530_21421C.1.pep
NFCGGRSIIQASEMFLIYTICFGNSTTCLNSAKFCSVFFVRNFLVLLKFFIQLGSFLFSLLTRLLKSIISPTFPKIRNL

SEQ ID NO: 118076 - protein, 120 aa, Oryza sativa
  unsure (1)..(120): unsure at all Xaa locations
  Clone ID: PAT_MRT4530_21422C.1.pep
EGEGMPGQRECQVGPSAGIEAADHIWVTRYTSLREXGSTLGVELTLHPKPSQADWSGAGRHTNYSTKSLLEESRFEVNKKAILNLLLRHDXHITAYGXEGNERGLTGIHETPSMDIWSWG

SEQ ID NO: 118077 - protein, 79 aa, Oryza sativa
  unsure (1)..(79): unsure at all Xaa locations
  Clone ID: PAT_MRT4530_21423C.1.pep
PLEQDWSLSSXEYSXGKGFFSKQGYYGEGSSEEGYYGEHHQHPGMTRVRLTRARQYAAQLPSMCRVEPHQCSIFPAGQY

SEQ ID NO: 118078 - protein, 40 aa, Oryza sativa
  Clone ID: PAT_MRT4530_21424C.1.pep
IGWTTRVRSNSVHVGCREHSNVRTQQQRLRLVSLVDMVLR

SEQ ID NO: 118079 - protein, 118 aa, Oryza sativa
  Clone ID: PAT_MRT4530_21425C.1.pep
PGAIGLRMQCCQQLQDVSRESRCAAIRRMVRSYEESMPMPLEQGWSSSSSENYGGEGLLSEQGYYGEGSSEEGYYGEQQQQPGMTRVRLTRARQYAAQLPSMSRVEPQQSSIFAAGQY

SEQ ID NO: 118080 - protein, 65 aa, Oryza sativa
  unsure (1)..(65): unsure at all Xaa locations
  Clone ID: PAT_MRT4530_21426C.1.pep
RQRGSRRSRGYYXKGSSKEGYYGEQQQQPGMTRVRLTRARQYAAQLPSMCRVEPQQCSILAAGQY

SEQ ID NO: 118081 - protein, 110 aa, Oryza sativa
  Clone ID: PAT_MRT4530_21427C.1.pep
MGRDARRRRAGTAAARARGSPATGRWGMGAPGGSKAARQGAARGRAGGGTRRRADTAAAKEATRQAGSSAGQQQGRRQAGQHQPGNHQGSKASNSAKRQGNNSTIEDLSK

SEQ ID NO: 118082 - protein, 378 aa, Oryza sativa
  Clone ID: PAT_MRT4530_21428C.1.pep
MYGFSRFLIRVTLRKSDNCFLHYRFLEGNLIGDIIVHYLMHTQLISFTEALNIFAQRRPPGIYKNDYIQAIYSFYHEIPENIVCPPTPEWKRPSDLDLNGEAKQDDDDDGNVDRAPSPNHEDDKVITNDDILGDAVPYDQQDFLRSICFRLLELVPSGRANAQFPGSHPVSLNSENLQILRQRYYYATWKADGTRYMMLITRDGCFLIDRNFCFRRVQMRFPLRNSNEGFHHYTLIDGEMIVDTVPDLGLKRRYLAYDLMSINSQSVVKVRRKDFWQLSAVNKILKEFIPKLCHESDGLILQGWDDPYVTRTHEGLLKWKYPEMNSVDFLFEVMRSITDNITEDKLLEEIYEIMTFLCMLIGKQRLTREVWLNNEGDD

SEQ ID NO: 118083 - protein, 118 aa, Oryza sativa
  Clone ID: PAT_MRT4530_21429C.1.pep
RGGLGLGIQCCHQLQDVTRECRCPPIPRMVRSSEESMPMPLEQGWSLSSSEYYAGKGSSSDQGYYGEGSSEKGYYGEQQQQPGMTRVRLPRGRQYAAQLPSMCRVEPQQCSIFPPGQY

SEQ ID NO: 118084 - protein, 265 aa, Oryza sativa
  Clone ID: PAT_MRT4530_2142C.1.pep
YWKQRGKIRRIKLGIDNTNFFKAHASNNHRKTYVRLIKVQGVEFSDHAAKASIMHDYYSAILWSTSNPEWHFDLAALYSHRIWNCDSLIALFTQTEILLAIRQMDRNSAPGPDGFGPGFYQAAWGTISSDVMLMMQSFHANEADLEQINRAYIVLFPKPRKENTPDGYRPISLQNCLVKIIAKALANRLQMVLPELIDADQTGFLKGRSISENFIYASELIQCCHKRKLPTAIVKLDFAKAFDSVTWISLLEILRVRGFPELWCS

SEQ ID NO: 118085 - protein, 83 aa, Oryza sativa
  unsure (1)..(83): unsure at all Xaa locations
  Clone ID: PAT_MRT4530_21430C.1.pep
IAGGRPYHGWSSSSSEYYSEKGSXFEQGYYSKGSSEEVYYGXQQQQPEMTRVRLTTARQYAAHLPXMCRVEPQQCIIFAAGHY

SEQ ID NO: 118086 - protein, 69 aa, Oryza sativa
  Clone ID: PAT_MRT4530_21431C.1.pep
EQIVLKLSSKILLFLLVKHNSELLSKSLIGDHEKSIMACMFRRDYNTCSYKNKQNIVCDRFPLRLIFAL

SEQ ID NO: 118087 - protein, 147 aa, Oryza sativa
  unsure (1)..(147): unsure at all Xaa locations
  Clone ID: PAT_MRT4530_21432C.1.pep
VFDRAASPARRGFPARCSARPGALGLRNAGAGQQLQDVXRECRCAAIRRMXRRHRAPPSRPPCEPQGLVRSSSSELLPAGEGFVLSGATGXLRRRGPSEEGYYGEQQQQXPGMTRVRLTRARQYAAQLPSMCRVEPQQCSIFAAGQY

SEQ ID NO: 118088 - protein, 38 aa, Oryza sativa
  Clone ID: PAT_MRT4530_21433C.1.pep
EVGPFLVQKGMSVLHCCRYYWNCGASLMFLESPVGVGF

SEQ ID NO: 118089 - protein, 66 aa, Oryza sativa
  unsure (1)..(66): unsure at all Xaa locations
  Clone ID: PAT_MRT4530_21434C.1.pep
YIIKISFFYQXYFPHWFSKKNFFFXHXHQPGITPLSFTRARQYSAQLPSMFRVEPHQCXIFSAGQY

SEQ ID NO: 118090 - protein, 90 aa, Oryza sativa
  unsure (1)..(90): unsure at all Xaa locations
  Clone ID: PAT_MRT4530_21435C.1.pep
RREGGKTIYIVLSDVKKTKQPSISWWEAIENVQAWWKNLTNMTCVPKXGLRSLILLVVWEIQKKWNQRIFEHNESMTITLLAKIKEEAKI

SEQ ID NO: 118091 - protein, 193 aa, Oryza sativa
  unsure (1)..(193): unsure at all Xaa locations
  Clone ID: PAT_MRT4530_21436C.1.pep
MFPSPRAGLSPPGRAPARGLRPHLSPPRERFQSRCVPPAPGALALRIQSLASSLQDVTRESRCSQPXARMVRSYEESMPDALEQGWSSSSXSEYYGGEGSSXSEQGYYGEGXLSEEGYYGEQQQQPGMTRVRLTRARQYPGSSCTSMCXRVEPQQCKHLRQPASTRLLACLIASRITPLLCCMQRDSDQTNNE

SEQ ID NO: 118092 - protein, 78 aa, Oryza sativa
  unsure (1)..(78): unsure at all Xaa locations
  Clone ID: PAT_MRT4530_21437C.1.pep
MPLEPSCRLSRSTTREGSSSDQGYYGEGSSEEGYYGEQQQQPGMTRVXLTRASQYXAQLPSMCRVEPQQCSIFAAGQY

SEQ ID NO: 118093 - protein, 85 aa, Oryza sativa
  Clone ID: PAT_MRT4530_21438C.1.pep
MQRRGGSSRAVASTDAAGASPLSPRSSETNPSTSSLNAHPPRSNRYQPPPEPPEPPEPRPQFRALPRSVHFDEWTQIPPMQASKV

SEQ ID NO: 118094 - protein, 350 aa, Oryza sativa
  Clone ID: PAT_MRT4530_21439C.1.pep
MAASPPWANLIGALVREIATRLPCKFDRVHFAAVCRSWRESLEQLAPLPRSPALPFLILPLAEGPAVSCILSDYATHPAVVPDWVRYARYIGAYDDGWVFLSTAPPQDVDGRCVFAGIINVGPVPQGRPMIAFWRIFDPVVPGLFSGPLNPRREWDAVDVVHHHGAFHFLTQGEHIIVAKPEFHYWCPVPAMPQVDWEFRCFPSNRRGYNQQHVKARYLVKSREDLLMVVRCSPHPGQPTSAFKVFRMVPSQRARCRQYIWQRVPSLGGRMLFVGRGCSRSYEADHYPAGIAGGIYFFDDGFIQDPVMLQQPQYSCSDCGKWTESPGPMVERCFPAQGASNYSPQGWRLP

SEQ ID NO: 118095 - protein, 239 aa, Oryza sativa
  unsure (1)..(239): unsure at all Xaa locations
  Clone ID: PAT_MRT4530_2143C.1.pep
GFWRKSTMDKAVLRHPLVEGSIPDRLLMERREGGTKHIHNLGKIVTFASFTQCGFLPPLSXFFSLLLDIYRIYLLYLNPNFFAFLRIFAHLCXAYLGEGPFLDLNRYFYKLRIMEKSRIXSDVVFVDTEXKPKRQSTWTSTLSKSKSLDIFVENIIELWDXGLMVHEIISDFVRRWTYMLKEREQLMYEYTGXEDPTQISLAGYYSLRFKARTKKVLIDKPXTASDIPTPFCLSYITKR

SEQ ID NO: 118096 - protein, 109 aa, Oryza sativa
  Clone ID: PAT_MRT4530_21440C.1.pep
MVGCEHMVVKVVLMAIKDRLRSGEKFVGVAGESIASGFEGEIMIQEWCTVAFTPPPRGRRLLAVGRGTRLLPRHYWSRPTAYSRHHQIDSAASNHVPFAASLLVASTPG

SEQ ID NO: 118097 - protein, 85 aa, Oryza sativa
  Clone ID: PAT_MRT4530_21441C.1.pep
VLSSPPIQNTHVTLCVRTCVGSYEVGFDIRNVTKTVNESLVLRTTQGRSVTAGLVLLNYAKRRLVGLQLTGPVRDPGPVVMVTSF

SEQ ID NO: 118098 - protein, 86 aa, Oryza sativa
  Clone ID: PAT_MRT4530_21442C.1.pep
PIWLYGTSMSFMAGYTFFLRTKKEPSFKGLFESRFAVKQKQVMHARYFDLRRNDELRRALYLPVVRTPTSTCRPMSSSTTQESHCQ

SEQ ID NO: 118099 - protein, 76 aa, Oryza sativa
  Clone ID: PAT_MRT4530_21443C.1.pep
PGGPFTPLGLPNTPEAFAELKVKETKTAPPPMFPMLGFLVQAIVPGKGPPKNLPGPLADPVNNNAWGYPPNFVPAK

SEQ ID NO: 118100 - protein, 114 aa, Oryza sativa
  Clone ID: PAT_MRT4530_21444C.1.pep
MAVAARAAVLPTLAQVAKREGRYLARQQKRYMAEEERPLKTTVPPARAGAIQLGYHSRSKGGASGLYDPQSSLRGPRGIKEERAKAVSNRVDCVPAVRWAATLELSRSLAWLTA

SEQ ID NO: 118101 - protein, 147 aa, Oryza sativa
  Clone ID: PAT_MRT4530_21445C.1.pep
LEATWRRHRGVPPRRARGAGRRPCHLAVQLAELLGAAAAFHPVGLAEPAGAIATFLSGCSAAPPPRYCTPSSSRSWPAPLPPCRPARRTARRCSGVPSRRARGTSRRHRHLAVRLLSFPLLFSAAWRLGSQMFEQAVNRQKVLTFWT

SEQ ID NO: 118102 - protein, 95 aa, Oryza sativa
  Clone ID: PAT_MRT4530_21446C.1.pep
GDCPNGNVINLSMITHDQDQFAPICAAKQEHDGMTTELEDAWCRGLNHRAHCALDLGCWLTGERAPIIAFHVITHIDDTLDHERYKLRADHQSPF

SEQ ID NO: 118103 - protein, 121 aa, Oryza sativa
  Clone ID: PAT_MRT4530_21447C.1.pep
MAKSGTEEWRRNTDTHKMSAEEVRAAGVEASMRPPGRGHGPGEVLHQRGRMPYGPGTMALAGLGIFGVLGYLVLYHKARPGTPATEVAKVAVGHGDPVAGRDAHKTPDDAAAAAAAARQGK

SEQ ID NO: 118104 - protein, 222 aa, Oryza sativa
  Clone ID: PAT_MRT4530_21448C.1.pep
MASLANSSVHLLLLVVVLAAAADAVTFTIVNKCGYTVWPAALPSGDGNQLDPGQSWAVYVPAGTKGARVWGRTGCGFISGGSLGQCQTGDCGGTLRCAAVGAPPVTVAEFSLGQASKDDYFDISLVDGFNAPMAIVPAAAGGRRCPRGGPRCAAEITLQCPGELRAKAGCSNPCRGNSTCGPTKDTEFFKKLCPETVTYARDGQGTTFTCPAGTDYQIVFCP

SEQ ID NO: 118105 - protein, 128 aa, Oryza sativa
  Clone ID: PAT_MRT4530_21449C.1.pep
MTALRIGNGYDIHRLVGDRPLILGGVTIAHHLGLDGHSDADVLTHALMDALLGALSLGDIGHYFPPSDARWQGADSLKLLAQVHQLILERGWRINNLDNVIVAEQPKLKPHIQAMKENLAKVSLLSSE

SEQ ID NO: 118106 - protein, 521 aa, Oryza sativa
  unsure (1)..(521): unsure at all Xaa locations
  Clone ID: PAT_MRT4530_2144C.1.pep
MHEETRRAAARQGGAARSGWARRNAACGGWARGGGVQPGKERGGARRPGMRDAGRGNRARKDAARGTQRRHHGAMDIRRTPLFGPTSDEKCRDSSGAVRIFAASGLQRGRPGRSAKQQPHTACSNTSPATGQPPCSGHRATSNNVAYLSIPGAASPATAAIAVLRTSALGPSQALTIVKYVLLVSVKTQDPFFLLISNELEDHKDKTKKTAPNLSLHSEAFLDSATAGKQQVQQPRPHAASSNTSPAPPERPPCSGHRCQVPPAPPRLGLVYSDPRDGIQLPLGDGSSSAPAHPSSASFGLVNGCQEAGATASRLRRPHLDVADAGAGAAAVLRPPRSSPSASVGASWPEGITWSSASAAVTPAGIIRTPTAAPVATATAASAASIPDQPGCAAAATTAATVLVVAVVAAAVXCSHKLFLATMRLFELIAGVAILAALSTTTSNAPSPVAVAAGRAVRAPPSPKPAPPIRPLFRAPPPPPARSVQPTCSSAPPPPPAKSELAMSSPPLAGEVGSTNASELP

SEQ ID NO: 118107 - protein, 66 aa, Oryza sativa
  unsure (1)..(66): unsure at all Xaa locations
  Clone ID: PAT_MRT4530_21450C.1.pep
XGDCCLPKGGFKVXVNRPRVFSPSPPTVCXKPTGPKLKXXXLNTTPLXRXXLGYPGPPPSRFEPHG

SEQ ID NO: 118108 - protein, 77 aa, Oryza sativa
  Clone ID: PAT_MRT4530_21451C.1.pep
DIAVSTRNCAPSIEGDCKTFQQYWSVRRNKRSSGSVNTGAHFNAWAQAGLRLGSHDYQILAVEGYQSSGQATMTVSG

SEQ ID NO: 118109 - protein, 52 aa, Oryza sativa
  Clone ID: PAT_MRT4530_21452C.1.pep
MVGPGHGGSDRVEVWHALGTGRWQWSPVVGRSTTSAVTVTASSEAVGMGASG

SEQ ID NO: 118110 - protein, 111 aa, Oryza sativa
  Clone ID: PAT_MRT4530_21453C.1.pep
AVGEHTGGTHVSVKERRMVEIVRQQQDVAAQELEGQTDENAAEADERISRSPPGTKEKLWMMQDQLIMAKAYLQFASLHGSAHLVRELKLRIKEIERVISHFSSSSRVPTR

SEQ ID NO: 118111 - protein, 175 aa, Oryza sativa
  Clone ID: PAT_MRT4530_21454C.1.pep
FKEEAAMQEGRAKQLEEEIKELRTRHKKELQDAAEHRELLEKDLEREKAARAELEKTSSRDAPKIPLPDQTRNAPLRKLSSSGSINSLEESHFLQASLDLSDNASLERRMSAESNMSYYLRSMTPSAFESALRQKDGELASYTSRLASLESIRNSLAEELVKMTEQCEKLRTEAF

SEQ ID NO: 118112 - protein, 314 aa, Oryza sativa
  Clone ID: PAT_MRT4530_21455C.1.pep
YTIPSWQSSLEAALQGADKQSQSKADEIARLMNENEQLKSTIDDLKSKSAEAEMDALKDEYHQRVATLERKVYALTKERDTLRREQNKKSDAAALLKEKDEIISQVMAEGEELSKKQAAQEATMRKLRAQVRQPGPEKQRLNSKIQVEETKVESIKRDKAATEKLLQETIERNQTELAFQKEFYTNALNAAKEAEALAEARVNTEAKVELESRLREACEKENILIKTIEELRHALTRQEQEAAFREERLKRDYDDLQMDPLCSELPHSDLQERVHDPAPGLPTGLLPAVTNRRTLRTLCYILSSFLLVRPDQFK

SEQ ID NO: 118113 - protein, 1097 aa, Oryza sativa
  Clone ID: PAT_MRT4530_21456C.1.pep
MAWWSGKVSLGGLQDIAGAVNKISESVKNIEKNFDSALGLEEKRDDEEGSGSHASNSDRIGFFNPVMAFMGNNGEEDSAEASEKQQPPKSTTAEQSQSASTEAPTSKVDASEESESTQSPKPSEQGETLISSTEPPVSKAEVSEQLATPKTPKSLSATEEKPSHSTESPTYKGDSEAPQSPTDPSTAEENSGSTETGNTIETGNQDHQETKYSGPNDEAPQSQIGESDRGIPDGTKPSSPTELDQSGNTGTTEYLHAGTENIDDKNAIQSQPLDSILASSDDVNEAVKIVKGADDRNEISSSHENTDTVDQASHVEVIEHDEHTNAAENDEEANRTEAQVATVVEREENTMVQLEDLSSMSIIVSNDSNSQNESVPTSADVPVGLVEVGSNSNDLRKEENIQGSVTTSNHLESVGAVAELEKLRREMKMMEAALQGAARQSQSKADEIARLMNENEQLKSTIDDLKSKSAEAEMDALKDEYHQRVATLERKVYALTKERDTLRREQNKKSDAAALLKEKDEIISQVMAEGFEAFIWHQQFFYNEQVRELEEEKQRLNSKIQVEETKVESIKRDKAATEKLLQETIERNQTELAAQKEFYTNALNAAKEAEALAEARVNTEAKVELESRLREACEKENILIKTIEELRHALTKLACLQAAFREERLKRDYDDLQRRYQSSELRYNELVTQVPESTRPLLRQIEAMQETAARRAEAWAGVERTLNSRLQEAEAKAAAAEEKERSVNERLSQSSSRITVLETQITILRTEQTQLSRSLEKERQRASESRQEYLAIKEEAAMQEGRAKQLEEEIKELRTRHKKELQDAAEHRELLEKEKSWMYVIVLIGLVTFMVYQCCPVKFINVWSLGETVFNLFKPTISYRSDINIELWNLSYSRSFSGFNKRDLEREKAARAELEKTSSRDAPKIPLPDQTRNAPLRKLSSSGSINSLEESHFLQASLDLSDNASLERRMSAESNMSYYLRSMTPSAFESALRQKDGELASYTSRLASLESIRNSLAEELVKMTEQCEKLRTEASALPGLRAELEALKQRHFQALELMGERDEELEELRNDIVDLKEMYREQVDLLVSQLQSLGARV

SEQ ID NO: 118114 - protein, 40 aa, Oryza sativa
  Clone ID: PAT_MRT4530_21457C.1.pep
FTRVYHPSIIISVATIYSPLGGNHHSSNTTVISTYSVSSE

SEQ ID NO: 118115 - protein, 63 aa, Oryza sativa
  Clone ID: PAT_MRT4530_21458C.1.pep
MENGLTTLDPPSLAPFTRLTDKQDPVVSDLAPPPLVATQITPTLLDPSTLIAGTIDGEDELDD

SEQ ID NO: 118116 - protein, 71 aa, Oryza sativa
  Clone ID: PAT_MRT4530_21459C.1.pep
MDKWLESFDLTILKTWHCGDVQKVTETLTALAVVAEACPILACASRTAEQIGTLKMTLLVQKIVSEDDTKA

SEQ ID NO: 118117 - protein, 110 aa, Oryza sativa
  Clone ID: PAT_MRT4530_2145C.1.pep
PHQWPARVGDLAGDWMIGCEFGGHEHVEDDETNPTVLTTTTNDERRRPATRRATAAARLNGGGDSQVAGGEEGQAAGLLHPLAHLLATAASGGDGGRGGAAWLEVGRGIL

SEQ ID NO: 118118 - protein, 134 aa, Oryza sativa
  Clone ID: PAT_MRT4530_21460C.1.pep
MKEVEVAAVLSGAMSANTVAAIDEASVGADSVQVGDVCAGSLGGHATAGVWPGRWREIGGRACAWTAAEGLEIDGQERARPAKLNPQLNRRLLRSSWVGSAGTQMIHGVVHFNLMVWILVYDWARRRHMHLSLL

SEQ ID NO: 118119 - protein, 195 aa, Oryza sativa
  unsure (1)..(195): unsure at all Xaa locations
  Clone ID: PAT_MRT4530_21461C.1.pep
GGISHAPRPPRPPXSRRRRPSPSPAAMGCAASATDSAERRRPGRSPGHDGEQQQQQDGRRRGCKVAPEPKEEDGAAAAAFLASMPGSPSFRYYCQKSATVDAIVADADGDGDSDGDECVRITETPQPIKNNGHGSSEVEINPWLRSSSRIPNRIHPEFNMQLSKSAPEASRQACLIRLKEKENHSEFGRCSSRFK

SEQ ID NO: 118120 - protein, 62 aa, Oryza sativa
  Clone ID: PAT_MRT4530_21462C.1.pep
IHLKGNKQNIWGKFVDMSHRANYIHEGRGRLQLVTLEYLRRKCTQLSLFSLICFCNLFYIFI

SEQ ID NO: 118121 - protein, 122 aa, Oryza sativa
  unsure (1)..(122): unsure at all Xaa locations
  Clone ID: PAT_MRT4530_21463C.1.pep
PQIALSASDTTAITTMQYFPPTLCMSTMNARRPYMMMTLRMCSSTHVSMSQSXYLLHKQCSMXLQSMMPHCHCATXCHMMNNMQXLFVRGLPAAXMMKMAMHMPYMCNMAPGNFQFSSCGCC

SEQ ID NO: 118122 - protein, 73 aa, Oryza sativa
  unsure (1)..(73): unsure at all Xaa locations
  Clone ID: PAT_MRT4530_21464C.1.pep
TSEPRLLLAATYLSATAILLVPRGHCSQCVVTVTRLRSMDKVINYTALINFTLENIRGSSCISSHEXFLERLI

SEQ ID NO: 118123 - protein, 59 aa, Oryza sativa
  Clone ID: PAT_MRT4530_21465C.1.pep
MDPHLSVCASATTIPMATLQCGRAFNGSPRGANLWSTGSVLLAAERPNRSPITRHHKLW

SEQ ID NO: 118124 - protein, 759 aa, Oryza sativa
  Clone ID: PAT_MRT4530_21466C.1.pep
MEWSSMRWWCLAVVLLLSTPLLAAGYLQERKNYIVHLEPRDEAAAAAGDASVEEWHRSFLPQVAKLDSDSDGADGGPRIVYSYSDVFTGFAARLTDEEAEAVRATAGCLRLYPEEFLPLATTRSPGFLGLHLGNEAFWSHSGFGRGVVIGILDTGILPSHPSFGDDGLQPPPKNWKGTCEFKAIAGGGCNNKIIGARAFGSAAVNSSAPPVDDAGHGTHTASTAAGNFVENANVRGNADGTASGMAPHAHLAIYKVCTRSRCSIMDIIAGLDAAVKDGVDVLSFSIGASSGTQFNYDPIAIAGFKAMERGIVVSCAAGNSGPDPGTVGNGAPWMLTVAAGTMDRAIRTTVRLGNGDEFDGESLFQPGNNSAANPLPLVYPGADGSDTSRDCSVLRDAEVTGKVVLCESRGLNGRIEAGQTVAAYGGAGIIVMNRAAEGYTTFADAHVLPASHVSFDAGTKIAAYVNSTDNPTASIAFKGTVIGSSPSPAVTFFSSRGPSKASPGILKPDITGPGMNILAAWAPSESHTEFSDGVGLSFFVESGTSMSTPHLSGIAALLKSLHPDWSPAAIKSAIMTTSDAVDRTGVPIKDEQYRHATFYAMGAGYVNPALAFDPGLVYDLHADDYIPYLCGLGIGDDGVKEIAHRPVTCSDVKTITEAELNYPSLVVNLLAQPITVNRTVTNVGKPSSVYTAVVDMPKDVSVIVQPPMLRFTELKEMQSFTVTVRWAGQPNVAGAEGNLKWVSDEHIVRSPIIIPATAA

SEQ ID NO: 118125 - protein, 672 aa, Oryza sativa
  Clone ID: PAT_MRT4530_21467C.1.pep
MASHANASGGGGDEEMVEASTLRHRHGAGKDANGVGTERQLAAAAAEGEEEGPSSVERAFVDRAVPSWREQLTVRAFVVSFFLSIMFSIIVMKLNLTTGIIPSLNVSAGLLGFFFVRLWTAAIERVGLLRQPFTRQENTVIQTCVVAAYGIAFSGGFGTYLFGMSETIAKQATEANNAQNVKNPHIGWMIGFLFLVSFIGLLALVPLRKIMIVDYKLTYPSGTATAYLINGFHTPEGAKLAKFYFDFSPTYVGVGMICPHIVNVSVLLGGILSWGIMWPLIRNKKGSWYAASLSETSLHGLQGYRVFISIALILGDGLYNFVKVLIRTTAGFVVMMKKNSTLPVSNNGSPMVATEAISFDDERRTELFLKDQIPKTVAFGGYVAVAAVSIGTLPQIFPQLKWYYILVAYVFAPVLAFCNAYGAGLTDWSLASTYGKLAIFIFGAWAGASNGGVLVGLAACGVMMSIVSTASDLMQDFKTGYLTLASPRSMFVSQVIGTAMGCVIAPCVFWLFYKAFADIGVSGTEYPAPYAIVYRNMAILGVDGFSSLPKHCLTLCYIFFAAAIAINLARDLAPSKVARFIPLPMAMAIPFYIGSYFAIDMFIGTVILFVWEMVNKAKAEAFAPAVASGLICGDGIWTLPQSILALAKVKPPICMKFLSRSVNAQVDGFLGN

SEQ ID NO: 118126 - protein, 717 aa, Oryza sativa
  Clone ID: PAT_MRT4530_21468C.1.pep
MASHANASGGGGDEEMVEASTLRHRHGAGKDANGVGTERQLAAAAAEGEEEGPSSVERAFVDRAVPSWREQLTVRAFVVSFFLSIMFSIIVMKLNLTTGIIPSLNVSAGLLGFFFVRLWTAAIERVGLLRQPFTRQENTVIQTCVVAAYGIAFSGGFGTYLFGMSETIAKQATEANNAQNVKNPHIGWMIGFLFLVSFIGLLALVPLRKIMIVDYKLTYPSGTATAYLINGFHTPEGAKLAKKQVKELGKFFLFSFVWGFFQWFYTAGDGCGFQSFPTLGLQAYKNRFYFDFSPTYVGVGMICPHIVNVSVLLGGILSWGIMWPLIRNKKGSWYAASLSETSLHGLQGYRVFISIALILGDGLYNFVKVLIRTTAGFVVMMKKNSTLPVSNNGSPMVATEAISFDDERRTELFLKDQIPKTVAFGGYVAVAAVSIGTLPQIFPQLKWYYILVAYVFAPVLAFCNAYGAGLTDWSLASTYGKLAIFIFGAWAGASNGGVLVGLAACGVMMSIVSTASDLMQDFKTGYLTLASPRSMFVSQVIGTAMGCVIAPCVFWLFYKAFADIGVSGTEYPAPYAIVYRNMAILGVDGFSSLPKHCLTLCYIFFAAAIAINLARDLAPSKVARFIPLPMAMAIPFYIGSYFAIDMFIGTVILFVWEMVNKAKAEAFAPAVASGLICGDGIWTLPQSILALAKVKPPICMKFLSRSVNAQVDGFLGN

SEQ ID NO: 118127 - protein, 290 aa, Oryza sativa
  Clone ID: PAT_MRT4530_21469C.1.pep
DSRREPYTAAHNILLSHAAAVHNYKTNYQAKQGGSIGIVVAMKWYEPLTNSTEDVRAARRALAFEVDWFLDPIFFGEYPREMREILSSNLPKFTPEEKKLLQNKVDFIGINQYTAIYAKDCIYSPCALNTYEGNALVYTTGVRNGAKIGKPTAFSTYFVVPESIESAVMYVNGRYKDTTIYITENGYSQHSDTNMEDLINDVERVNYLQGYLKYLSSAVRKGANVGGYFMWSLIDNFEWVFGYTIKFGLYHVDFDTQERIPKMSAKWYRDFLTGSNVTDDTQVWSRRADS

SEQ ID NO: 118128 - protein, 251 aa, Oryza sativa
  unsure (1)..(251): unsure at all Xaa locations
  Clone ID: PAT_MRT4530_2146C.1.pep
MSTVSPEMGFSCRLVMARALLLLILAALASASSMAAKKQGRQPRGCGGHTSTSPTPELELPPCSGHRGQAPAPVLGLLGRRGSPGAPPPPRSHPPXYANCKELTGRVSFMCALESQDKQIQVNHRKFQYKFSLSSAAAVRLQSQTVLGYDEAVRAHRRSCHPGCSVHHHLKRAIAGRRGGGEGGEGAAVAEAGAAHKAALPGATTTSGEVSSTNVFVSAATTSGEVRTSYEFAASRRRSRFNQRLRATMNP

SEQ ID NO: 118129 - protein, 526 aa, Oryza sativa
  Clone ID: PAT_MRT4530_21470C.1.pep
MGCFSCFDSPAEEQLNPKVGGPYGGGSSSSAAAAAYGGGGGSSAGRHGERGGGYPDLHHHHQQQQLPMAAPRVEKLSAGAEKTRVKSNAILREPSAPKDANGNVISAQTFTFRELATATRNFRPECFLGEGGFGRVYKGRLESTGQVVAIKQLNRDGLQGNREFLVEVLMLSLLHHQNLVNLIGYCADGDQRLLVYEYMHFGSLEDHLHDLPPDKEALDWNTRMKIAAGAAKGLEYLHDKANPPVIYRDFKSSNILLDESFHPKLSDFGLAKLGPVGDKSHVSTRVMGTYGYCAPEYAMTGQLTVKSDVYSFGVVLLELITGRRAIDSTRPHGEQNLVSWARPLFNDRRKLPKMADPRLEGRYPMRGLYQALAVASMCIQSEAASRPLIADVVTALSYLASQSYDPNAAHASRKPGGDQRSKVGENGRVVSRNDEASSSGHKSPNKDREDSPKEPPGILNKDFDRERMVAEAKMWGDRERMVAEAKMWGDRERMVAEAKMWGENWRDKRRAIENGQGSLDSPTENG

SEQ ID NO: 118130 - protein, 493 aa, Oryza sativa
  Clone ID: PAT_MRT4530_21471C.1.pep
MAGGGGGGRASAQRRAALAALITLLLLASLAFLLSATGTASAPNSAPFRLAAIRRHAEDHAAVLAAYAAQARKLSAASASQTESFLSISGHLSSLSSRISLSTVALLEKETRGQIKRARSLAGAAKEAFDTQSKIQKLSDTVFAVDQQLLRARRAGLLNSRIAAGSTPKSLHCLVMRLLEARLANASAIPDDPPVPPPQFTDPALYHYAIFSDNVLAVSVVVASAARAAAEPARHVFHVVTAPMYLPAFRVWFARRPPPLGTHVQLLAVSDFPFLNASASPVIRQIEDGNRDVPLLDYLRFYLPEMFPALRRVVLLEDDVVVQRDLAGLWRVDLGGKVNAALETCFGGFRRYGKHINFSDPAVQERFNPRACAWSYGLNVFDLQAWRRDQCTQRFHQLMEMNENGTLWDPASVLPAGLMTFYGNTRPLDKSWHVMGLGYNPHIRPEDIKGAAVIHFNGNMKPWLDVAFNQYKHLWTKYVDTEMEFLTLCNFGL

SEQ ID NO: 118131 - protein, 107 aa, Oryza sativa
  unsure (1)..(107): unsure at all Xaa locations
  Clone ID: PAT_MRT4530_21472C.1.pep
IRSSPTDLNQSQRVRLVEVVGGDEVEAPEAKAKPAAHKIDSIAFLNRKLGXTPTWRANCRNMNSAIIKGGSARDIKVDGCGDKGFRQVQALSMRGNTRSQGSDGYKL

SEQ ID NO: 118132 - protein, 196 aa, Oryza sativa
  Clone ID: PAT_MRT4530_21473C.1.pep
ARGSLHLDTVNWTVFPPLGEFWPPKEPGQEYLRSVQGKSFQNLKTLELVGLTRLEKWVHNDKFLLFSLLEIFIIRDCPELVELPVSQYASQKFKQDVMIDLFPKMQEVRIADCPKLESLPLIPWTDTLHTVDMKNVGSSLEKLVYSTKSSSSKLLLEIKEDHHLEYLDEMVAFHNLSKIHELEVSKSPPLMNKHLH

SEQ ID NO: 118133 - protein, 106 aa, Oryza sativa
  Clone ID: PAT_MRT4530_21474C.1.pep
SSPSMFFRSFIVVVHLVLPYELWHACQFLCFRLSLSMGTSGFDIVPIFYARLRDCDSVAFYPSVRFLLELNQGVIALTLEEACRCTAVLFCSFFFHPTCRPCGSEL

SEQ ID NO: 118134 - protein, 55 aa, Oryza sativa
  Clone ID: PAT_MRT4530_21475C.1.pep
MACTGGRCSSANEVKGEADGDGELDGHARKTFLSKYSFEIKFRIGQQQAPILLRR

SEQ ID NO: 118135 - protein, 191 aa, Oryza sativa
  Clone ID: PAT_MRT4530_21476C.1.pep
MEPNEARLASPSVIKKVTLVGGRLAALNLLVDAGEGKPAFGRAMEQGSERQDERPPLPCANGCGFFGSADTRGLCSKCYRQTVMSQASAPSAAAQSAEHDQVVLPAPEGVPVDEGAMPPPPPRHGAKTKSRCAACGRSVGLMGFECRCGAVFCGAHRYSDRHDCGYDYRGAGRDAIARANPVVRPDKVEKL

SEQ ID NO: 118136 - protein, 204 aa, Oryza sativa
  Clone ID: PAT_MRT4530_21477C.1.pep
MAPNGEGAVAAAAAAPAPAPAVARGKRAEKPRRISMEGLQRAMSDLALELTKKQQVADAAAGGGGGGEKLPEITEQQQVVVEEARCECCGMQEECTPEYARRVRERYCGRWVCGLCAAAASAEADRRCRHGGTGWTTATAEEALAAHMAVCGRFNRVGRANPVLMQTEAMREILRKRSRSNSPRDHGHGGLTRSSSCIPAITKD

SEQ ID NO: 118137 - protein, 553 aa, Oryza sativa
  Clone ID: PAT_MRT4530_21478C.1.pep
MVAGDDHRRDSTRGGRRKEGKGRGDGGGPHRGAPATEGAAAEGGGSPRGAATEGAAALHGAKTTAAIRRSPTKVEERPGAAVARCRSRQSGGGARVHGGIGASGVDLRSGPVAGMRHGAAALWEAAARPGEVGVEAGARHGEAKPTAHTARRGGGWGGGKKRPVNSGERRLLGLARGERARAPGARESWGNGRGDHGDRFYWLGAVGSWPRRAESTGNGLRSGLRRRGRSGVVRRRFWRGKVGEESGGGGATRSRGQGERAGGGGGGIGGDVGRPWRRFRLREPEFSAMATSGDDGERSSTGSTGIHDSGATETDSFFALFANDTSSEDVNDDEASDASKPSRLVNMADVAADGSFEVGQAPAPHVDMSPEGGIHAEERLLEITGEVDPTKEADRVCNTVLAMDEGALSLESGTNSRSDEDKIPSGGNDYTVPREGMAAMFRLTYNVECHIGSDCVRLSLLSDAEGSLIGRHLCNLNPGSLLLVEHPVIPFLPDRSCYQDDYHVEPTLPRPGNSSSSNQPPIDEGGLSHRETIQATNGIKDKPRKLKGLWTCN

SEQ ID NO: 118138 - protein, 882 aa, Oryza sativa
  unsure (1)..(882): unsure at all Xaa locations
  Clone ID: PAT_MRT4530_21479C.1.pep
MKSLRLTSPAGNMLVSPIISFSNVSRSTPSTVGASVGLSQEMVVVVDGGAAGESKVSSLRMPTSSLQSSQPTTTSGMRKDTEEVGEGGEMVLADVSKGRPAPTRGPHTSASQRGRAHGGHGPDVXSGARPPRGRPRSAKADRTAGDSRAARPGQRSHKAGGGGGRDRSDGGTRAGRPPAAAARRAQAREAAGQGEKEGGERSAHRGRRRRDDHGEATGGGKDGGGRHGRRRERRSDDARPRRSHGRGAVXAANAVEAVARREVDGDGGKRRPVGGXSGGARVCGGNGASGVDLRSGPVAGMRHGAAALWEAAARPGEVGIAGGERLETEGRAAARXHGGVVFRWWFGGKGVEAGARHGEAKPTAHTARRGGGWGGGKKRPVNSGERRLLGLARGERARAPGARESWGNGRGDHGDRFYWLGAVGSWPRRAESTGNGLRSGLRRRGRSGVVRRRFWRGKVGEESGGGGATRSRGRGERAGGGGGGIGGDVGRPWRRFRLREPEVRDGPDRWGPPVGGSGGRREETVGGEDDRNKVDMHWQDQQPTESYHQLTERSGQTTALSVERNSGFIRLYQSFRCSPYNKCLQRHRYILPPLGCLVESVYVTIPLALELRNHEKKERGMKEPPIPLFALKFEAPPSSKEDIKGKVNGAEQGIRLICTGKINNPWRGVSIAKRFRDARNRCFSLNITKRDLVDLAFSGLLAPINERLDGQQFLDISQLMQKNSAQVSRVRESNVSIVDYPDDSDSDNDDGNNDIHVAEWSWTNMNKPFVCSNLMLTPRKDRQSEIKYSFDVAKCDKIFDYLLQEKQITLPKGYVISSPEELKRHAYCKWHDSHTSNDCNVFRRQVQSAIEEGRLKFIEGSKMKLDHDPFPMNTIDFNDKRC

SEQ ID NO: 118139 - protein, 152 aa, Oryza sativa
  unsure (1)..(152): unsure at all Xaa locations
  Clone ID: PAT_MRT4530_2147C.1.pep
KQSISNGISLLLLESSSSAHPTATTTSASFSLVICSQAAASHRLQQHFTSDGAAAMLRPPWSSPCAANLGTSWSXASNQSSASAAATSNNVAYLSIPGAASPATAAIAVLVAVDSVVAGSVEFRTFNQQESSMDLLCFSALQLSAPPRLSPL

SEQ ID NO: 118140 - protein, 88 aa, Oryza sativa
  Clone ID: PAT_MRT4530_21480C.1.pep
SPLSRAPVAAGALFAAAHSALTAASSAGGCGPPLRCRPLCPPSSRAPPVVPNSAAPFVARALLVVVLKVSFPSPPHPRRQLRCFPVRG

SEQ ID NO: 118141 - protein, 88 aa, Oryza sativa
  unsure (1)..(88): unsure at all Xaa locations
  Clone ID: PAT_MRT4530_21481C.1.pep
WVIYTGGINPRWCHSIAGAGSFNLPTYDIXLTPFLRLLVYSNAHXSGSSCSTGSPXWPRYTNLDLWLDPSTADMHATLGAYQTPGLEI

SEQ ID NO: 118142 - protein, 332 aa, Oryza sativa
  Clone ID: PAT_MRT4530_21482C.1.pep
MEEGSNYYLVRKGEMVAVYKSLNDCQAQICSSNTVILPVDKVSGPAASAYKGNSWSREKEEYLSSRGLSNATYVINAAELREDLFGTLIPCTFQEITVSSSNQSALNHTGVLNNTRYQPGAQSVDLNYDAVGSGQASAEHYSQRINQGYSVRGQAFNRLESRPSSSSHFSPNNLDQSGTVDAQPLSKQYMVCLLHFDGASKGNPGKAGAGAVLMTEDGRVISRLREGLGIVTNNVAEYRGLILGLRYAIRHGFKKIIVYGDSQLVCYQVKGTWQTKNQNMMELCKEVRKLKENFVSFEINHIRREWNAEADRQANIAITLSSGVVSEERGDG

SEQ ID NO: 118143 - protein, 40 aa, Oryza sativa
  Clone ID: PAT_MRT4530_21483C.1.pep
MAKEDFIKAELEAEIEFGNRAGIGCSPDRLRLGSAESESS

SEQ ID NO: 118144 - protein, 141 aa, Oryza sativa
  Clone ID: PAT_MRT4530_21484C.1.pep
MKTGKYASRHALRLCPHPPPPTPIQTQPKRKKTATQRSSHRSSLLVALAPVRNRETRGSQAPNRDARRRTTTCPCRASGEKTGKRKGKRSRFRSGRRFAGLGVVVDGRARRRVRGVAARCVRVAVHSRKRMRLRLCLPSNF

SEQ ID NO: 118145 - protein, 48 aa, Oryza sativa
  Clone ID: PAT_MRT4530_21485C.1.pep
MGDLLPWGKDICFFASRGGSNVNKNLTGEEKRQGVDDPTVTHGSGEDI

SEQ ID NO: 118146 - protein, 137 aa, Oryza sativa
  Clone ID: PAT_MRT4530_21486C.1.pep
QNTAGGGTTEAPGGHAQAPSTGAPWSRKRVVRTDGLVLCGPTSAAPRARQARSYRDHPRIAARPMDRVLPDETNAQGCGSDWMQGRMDTQSRGEHREGRRNPPSPAAGAASSRSLPRLVSSGTSPSSDAWVGPGIPA

SEQ ID NO: 118147 - protein, 618 aa, Oryza sativa
  Clone ID: PAT_MRT4530_21487C.1.pep
MTTEEKMLIRTLKECNIPTRHMIVILSVLRGGLTSLPYTKKDISNVRTTINKETSSNDMMKTLEFFRRKKEKDPHFFYEFDLDESKKVKNLFWTDGRSREWYEKYGDVVSFDTTYFTNRYNLPFAPFVGISGHGNTIVFGCAFLHDETSETFKWLFRTFLKAMSQKEPKTIITDQDGAMRSAIAQVFQNAKHINCFFHIVKKAFNLFGNLFKAKEGLYDEYEDIINNSVTEEEFEYLWQEMIDSFEVQHINFLKHMWSIRKRFIPVYFKGDFCPFIKSTALSEGTNSRFKNNVGPQYSITNFMIEYERVMDTIQNLEQFDDHISRTKKPSKLWSHYYIEYQAMRIRRKYLVIVDLEKEDFNCICSKFEKDGLLCCHVLKVMLHLNAMKIPEKYIIERWTKKEYKGLGGKGNGNIPLAQSSILRFNILSRKSAEIASNGSKSNETFQFAVEEMDKIAKQLELMCSNKDAEQEINDSDPNAEDNLNSHEKGNQQSEENTEEILLDPDIAKSKGRPAQRYKTIREEIQQKELYHCSHCQRTDHTFPTCPLKHVEFDLPRKKRRKVKNTREQDGVEQKKKDVSNKRKDLQQDISQEKHNSGAELEGKKKRNSSSSKRGGTKE

SEQ ID NO: 118148 - protein, 65 aa, Oryza sativa
  Clone ID: PAT_MRT4530_21488C.1.pep
MFVLTHSRKGRLKGTKIRWQGTTMNRAVRVRVADAGESKTDHSSGVEVLWQKPHIYEEKQVLTAF

SEQ ID NO: 118149 - protein, 114 aa, Oryza sativa
  Clone ID: PAT_MRT4530_21489C.1.pep
EEKGEGGGDEERVLLGERGSRRASTTTAAAITSPRVCRPPRRPPPRGRSRRQRPGRQKAAADPTEKTTRARLTGEETVRVRSAGERRRRKRESSWERRRRRTGERRRAERGASC

SEQ ID NO: 118150 - protein, 104 aa, Oryza sativa
  unsure (1)..(104): unsure at all Xaa locations
  Clone ID: PAT_MRT4530_2148C.1.pep
TDTTQIFLKIKXTNKSIWRTLVIFLTQTDINILINRYNCLKXALSLNGNDSYPNRGPNXPQVDLYRLNXILTADAQSVSARFNLLRFRFDIQLQIXVYLAKFCC

SEQ ID NO: 118151 - protein, 434 aa, Oryza sativa
  Clone ID: PAT_MRT4530_21490C.1.pep
MELGEEKEERKRGSKSQMEGESTMSESKSSSRGKKKSKTTSEQKVEIHTKETQNLANTKKKQEEGKIKRNKKAPVQGVIQKDKECKSSKEIEGKNIDIKKHFKALTEMDTEIISQSNLTEINTAMLSSGITIELSEGERSIQSKQIQNMKQSILTEYETTFVNSGITGNEVGISNALDEPNTDHIGLGAEDATVEKQSMDNSASVTEAFVDYSNKYSYDELSLFGSMNSVANMSYTSLMEQIISSQPTISDMQEQNSAHSTFVASPSAFQEDESNEEDAMDNWNLDIFNLLDGEKEPSSMDNHRCTSVQGTRDDDNNPNDNSETNQQELTEEDINIFVENEQEEATKGNNAAIDSRYIPRVGTQFKTITKAHEFFNFYALLAGFSIVRAHNYHTTSKKRNGEVTRVTFRCNRQGKPTSQSKSRGMRFGIFQGYN

SEQ ID NO: 118152 - protein, 227 aa, Oryza sativa
  Clone ID: PAT_MRT4530_21491C.1.pep
MELGEEKKERKRGSKSQMEEGESIMSESKSSSRGKKKSKTTSEQKVEIHTKETQHLENAEEKQEEGKIKRNKKAPVQRFIKQRTGYHYFKVGHVQKPNEFISMKTSKGFKGNKEKEKNNSMDMQKVESGVIEKEKECKSSKEKERKNTGVIQKEKQSKSSMEIEEKESGVIQKEKQSKSSMEIEEKESGAIWKETQSKSGKEKGEGRNIDLMEGNDNFIVFGTTASI

SEQ ID NO: 118153 - protein, 123 aa, Oryza sativa
  Clone ID: PAT_MRT4530_21492C.1.pep
MPPGRPPTRPSPDTPRDTPPMPDPPVADTAPPTAEATIAGSGGHGGWFRPSALPPPLPPPPLWPSLPSGKNSPKLVTSNKGNSAGRRAGIGGPVPPPLPPLRTGEAASHTPRGAPPHFNTSFP

SEQ ID NO: 118154 - protein, 1136 aa, Oryza sativa
  Clone ID: PAT_MRT4530_21493C.1.pep
MELGEEKEERKRGSKSQMEGESTMSESKSSSRGKKKSKTTFEQKVEIHTKETQNLENTKKKQEEGKIKRNKKAPVQGVIQKDKECKSSKEIEGKNIGGIQKEKQSKSSMEIEEKESDIKKHFKALTEMDTEIISQSNLTEINTAMLSSGITIELSEGERSIQSKQIQNMKQSILTEYKTTFVNSGIIGNEVGRSNALDEPNTDHIGLGAEDATVEKQSMDNSASMTEAFVDYSNKYSYDELSLFGSMNSVANMSYTSLMEQIISSQPTISDMQEQNSAHSIFVASPSAFQEDESNEEDAMDNWNLDIFNLLDGEKEPSSMDNHRCTSVQGTRDDDNNPNDNSETNQQELIEEDINIFVENEQEEATKGNNAAIDSRYIPRVGTQFKNITEAHEFFNFYALLAGFSIVRAHNYHTTSKKRNGEVTRVTFRCNRQGKPTSQSKSRNEIWNISRVQLDHNHQLSPRDEVRFLKSHKHMTTEEKMLIRTLKECNIPTRHMIVILSVLRGGLTSLPYTKKDISNVRTTINKETSSNDIMKTLEFFRRKKEKDPHFFYEFDLDESKKVKNLFWTDGRSREWYEKYGDVVSFDTTYFTNKYNLPFAPFVGIYGHGNTIVFGCAFLHDETSETFKWLFRTFLKAMSQKEPKTIITDQDGAMRSAIAQVFQNAKHRNCFFHIVKKAFNLSGNLLKAKEGLYDEYEDIINNSVTEEEFEYLWQEMIDSFEVQHINFLKHMWSIRKRFIPVYFKGDFCPFIKSTALSEGTNSRFKNNVGPQYSITNFMIEYERVMDTIQNLEQFDDHISRTKKPSKLWSHYYIEYQAMRMYNRKIFIKFQVELKRTTRFQINEVEKFKTYEVFLALNQNIQVIRRRKYLVIVDLEKEDFNCICSKFEKDGLLCCHVLKVMLHLNAMKIPEKYIIERWTKKEYKGLEGKGNGNIPLAQSSILRFNILSRKSAEIASNGSKSYETFQFVVEEMDKIAKQLELLCSNKDAEQEINDSDPNAEDNLNSHEKGNQQSEENIDEILLDLDIAKSKGRPTQRYKTIREEIQQKELYHCSHCQRTDHTFPTCPLKHVEFDLPRKKRRKVKNTREQDGVEQKKKDVSNKRKDLQQDISQEKHNSGAELEGKKKRNSSSSKRGGTKE

SEQ ID NO: 118155 - protein, 128 aa, Oryza sativa
  Clone ID: PAT_MRT4530_21494C.1.pep
PNFLSANPPRPIKARSNSSRSSSKVPGAVHSQKFSKIVNSGLNEEMPHILRDDASPGNCVKTSSPNGKRVSPPHNALSVSPSRKGGRKLILKSIPSFPSLIGDASSGSSMNSSESAFNTASPLALGPS

SEQ ID NO: 118156 - protein, 136 aa, Oryza sativa
  Clone ID: PAT_MRT4530_21495C.1.pep
MAARKGLRPDAGADAGGGRVRVVVRSECEPMMDLFRSDEPVGRAGEWWMYMVDVERLKQKLRLPVGSCNLALPLWGPGVCEDDLTRVCVGQSHPKSVGIWSGNVAKGHELIMDKVLIINSSSSLDFLFSKTYTRIE

SEQ ID NO: 118157 - protein, 1146 aa, Oryza sativa
  Clone ID: PAT_MRT4530_21496C.1.pep
MLGCRPASTPIEQNHKLCAELGDPVNKERYQRLVGRLIYLCHTRPDITYAVSVVSRYMHDPRSGHMDAVYRILRYLKGSPGKGLWFKKNGHLGVEGYCDADWASSLDDRRSTSGYCVFVGGNLVSWRSKKQPVVSRSTAEAEYRAMSQDLEENMKSKRFLIVLDDVWDVTTDCWNKLLAPLRANHVNPSKEKVTGNSMVIVTTRKNTTAKLCGTVGSINLEGLKDDDIWSLFKAYAFGSDKHSNNPILQNLGRKIAKELNGNPLAAKTVGSLLRRNLTVDHWSSIIENEEWKSLQHTDGIMHTLKFSYDHLPSHLQQCFSYCSLFPKGYSFSEAQLIQIWIAQGFVEKSSEKLEQKGWEYLAELVNSGFFQQVENEWPSSEDIVLHDLMHDLARMVSKTECATIDGSECEKLAPSIRHLSIVTDSAYSEDPHGNISRNEEFEKRLLKVMSRKGEELPSSDSNGSPSSEYFTDIISNEVIYGLEPHHSLKHNGVTSPTCLATSLTSLQTLYLENCGKWQILSLERLCLLKKLVLIRMSNVVEVSICSLEELVLIKMPKLKRCFCTSIRNLNDNLRVLMIKTCPALEVFPLFDNCQQFKIEQPSWLFRLSKLVIHKCPHLHVHNPLPPSTNVSKLSITGVSTLPTVEWSRGILRIGVLDDSDDPSVIDEPSDQLITLDDKVLSFHNLRFLTELVIAGCQNLTSISLQGLRQLIYLRTLEIRGCPKLFSSNMPPELVRENMAATYHNALPSLEYLFIAACGITGKWLSLILQYAQALQDLDLYECEQITGLSIGEEESSQPNLMSTPETLSLGHQGDSPTSSARDGLVRIPLNLISSLKHIYIGDCPGLTYNGNDEGFAKLTSLESLRIMNGAKLLSSLVHGNGYDERKNIKLIPLSLEVLELRGYDLPEEVVPDFLRNPIRLKKLSVMDTLSLKYLQLQSCTALEELEIVNCESLATLEGLQSLRSLKNLIIWGCPILPQWLWSSLEQVQELLPRLERLKIQDASVLTTSFCKHLTSLQRLTLFACNWELVRQTDEQDIALQLLTSLQELSFTCCRNLGDFPVDLYSLPSLKRLNIYYCKDISRLPEKGLPPSLEELDINDCSEELNDQCRMLPSKLKEDEQRRRFTSRSLNLVRLPEVRLPHAHDFH

SEQ ID NO: 118158 - protein, 107 aa, Oryza sativa
  Clone ID: PAT_MRT4530_21497C.1.pep
EHRVRTRYGSVSVSVFGDEDKPALITYPDLGAASISSDVPVPSVDELVDQVADVLDFFGKFVGMDKTLNQRLCKPVEVRHDLTEALKKLQCRTLIFVGENSQFHDDA

SEQ ID NO: 118159 - protein, 347 aa, Oryza sativa
  Clone ID: PAT_MRT4530_21498C.1.pep
MGDSSRSVSIDVERISFGGKEHRVRTRYGSVSVSVFGDEDKPALITYPDVALNYMSCFQGLFFCPEAASLLLHNFCIYHITPQGHELGAAPISSDVPVPSVDELVDQVADVLDFFGLGSVMCLGVTAGAYILTLFATKYRDRVIGLMLVSPLCKAPSWSEWLYNKVLLNLLYYSGSRGLVKECLLQRYFSTEVRGNGQDPESEIVQACRSLLHERQGSNVWRFLQAINERHDLTEALKKLQCRTLIFVGENSQFHDDAVHMTTKLDRRYCALVEVQACGSLVTEEQPHAMLIPMEYFLMGYGLYRPSQLDSSPRSTLNPFCISPELLSPESMGVKLKPIKTRISLKV

SEQ ID NO: 118160 - protein, 61 aa, Oryza sativa
  Clone ID: PAT_MRT4530_21499C.1.pep
PPPPWAYSRAFSGWLPRSRVICSRATEGKTAYPGGAAAVRAAYPPTVAVACGARSGQVTAR

SEQ ID NO: 118161 - protein, 217 aa, Oryza sativa
  Clone ID: PAT_MRT4530_2149C.1.pep
GIQLPLGDGSSSAPAHPSSASFGLVNGCQEAGATASRLRRPHLDVADAGAGAAPVLRPPRSSPSASVGAFWPEGITWSSASPAVTPAGIIGRPTAGAVATATAASAASISDQPGWAAAATTAATVLVVPVVAGSVGFRIFSQEGSSNDLLICFGPFGTIVNFLPFGGSKFFFAHFKLVRFKTADVSCTRGQFFKNVHVLRGNFCPPINMKLAHPVPV

SEQ ID NO: 118162 - protein, 122 aa, Oryza sativa
  Clone ID: PAT_MRT4530_214C.1.pep
MAIACALSVAAPSLTGKTNSNPPPRRSFQQQWRERRRRGVAARFSGKSADVDAEADSGRIEDDSSYLWKLGLGSVGGAAAIKYGSILLPDITRPNIVVALLMVSIPVAVAVLLLLKVSSRDD

SEQ ID NO: 118163 - protein, 47 aa, Oryza sativa
  Clone ID: PAT_MRT4530_21500C.1.pep
RFTLRRVEEHTLSTPWGCYRMCCKSCARALLMRMHSVLGWAEFSLNI

SEQ ID NO: 118164 - protein, 116 aa, Oryza sativa
  unsure (1)..(116): unsure at all Xaa locations
  Clone ID: PAT_MRT4530_21501C.1.pep
MVALRRGFKTLAVARAVVLSTAGPHFCAXIELSSPXNPAMAPSSSGNSGPARAAEGLRRTIVEMQAVXRKPMLTALHVACVGGGVEVRAACAIVEKSRRRWGRNLCGAHGWPMISG

SEQ ID NO: 118165 - protein, 122 aa, Oryza sativa
  Clone ID: PAT_MRT4530_21502C.1.pep
MAAVSPAAAVLGSRRLCWPLAQAAARQRKGRGRAAAAARVAPPESPDAGGDAGDSLNCQGLKLRLPNFSNKNYRFLLSRLRTMTYHIHLQAAFKLSQDIEKSALGSTINNGKQKVHKGTHNT

SEQ ID NO: 118166 - protein, 88 aa, Oryza sativa
  Clone ID: PAT_MRT4530_21503C.1.pep
MARWCRSLSFVRSSLLPSPRRCRGRGRWRHGCGEGKRRRMGMVEPKPYGRWCGGGSPRVVREKEAQERGRREGGRETTTVARPTARGR

SEQ ID NO: 118167 - protein, 28 aa, Oryza sativa
  Clone ID: PAT_MRT4530_21505C.1.pep
DFFNARILHLILAFNLPWGLLNHLPANR

SEQ ID NO: 118168 - protein, 401 aa, Oryza sativa
  Clone ID: PAT_MRT4530_21506C.1.pep
MYGKYPESIKCDPTTVSMSIKENEPFVYTYEVSFVESDIKWPSRWEAYFKMEGAKVHWFSILNSLMVIAFLAGIVFVILLRTVRRDLTSDVFRAPSNPMLLCVMVGDGVQILGMAVVTILFAALGFMSPASRGTLITGMLFFYLVLGILAGYVGVRVWKTIKCGDHTGWMAVSWRVACFFPGIAFLILTTLNFLLWGSQSTGAIPFSLFVILILLWFCISVPLTLVGGLLGAKAPHIEYPVRTNQIPREIPPQKYPSWLLVLGAGTLPFGTLFIELFFIMSSIWMGRVYYVFGFLFIVLLLLVIVCAEVSLVLTYMHLCVEDWKWWWKSFFSSGSVAIYIFLYSINYLVFDLKSLSGPVSATLYLGYSLFMVIAIMLATGTVGFISSFCFVHYLFSSVKAD

SEQ ID NO: 118169 - protein, 93 aa, Oryza sativa
  unsure (1)..(93): unsure at all Xaa locations
  Clone ID: PAT_MRT4530_21507C.1.pep
ELGTPKKKTKKGWEKKKKKLKKKTKIRGKKKXLKELKKLTLKKKKRGAKKKQKKKGGGPKGKKTPFWKKKKKPWGVKKGDPKKKKEGIGGGGK

SEQ ID NO: 118170 - protein, 665 aa, Oryza sativa
  Clone ID: PAT_MRT4530_21508C.1.pep
MARLLPFLVAAAAALVAVSLSAPGADGFYLPGSYPHKYNPGEPLSVKVNSLTSIDTEIPYSYYSLPFCTPPDGVKDSAENLGELLMGDRIENSPYRFRMHANDSDLFLCRSPPLAADAFNLLKKRIDEMYQVNLILDNLPAIRYTKKDDYFLRWTGYPVGIRVGVDYYVFNHLQFTVLVHKYEEANVARVMGTGDATDGFPSTGKDGSGGAAGSSGWMVVGFEVVPCSIKHNPDDVKSLKMYGKYPRSIKCDPTTVSMSIKENEPIVYTYEVSFVESDIKWPSRWDAYLKMEGAKVHWFSILNSLMVIAFLAGIVFVILLRTVRRDLTRYEELDSEAQAQMNEELSGWKLVVSDVFRAPSNPMLLCVMVGDGVQILGMAVVTILFAALGFMSPASRGTLITGMLFFYLVLGILAGYVGVRVWKTIKCGDHTGWMAVSWRVACFFPGIAFLILTTLNFLLWGSQSTGAIPFSLFVILILLWFCISVPLTLVGGLLGAKAPHIEYPVRTNQIPREIPPQKYPSWLLVLGAGTLPFGTLFIELFFIMSSIWMGRVYYVFGFLFIVLLLLVIVCAEVSLVLTYMHLCVEDWKWWWKSFFSSGSVAIYIFLYSINYLVFDLKSLSGPVSATLYLGYSLFMVIAIMLATGTVGFISSFCFVHYLFSSVKAD

SEQ ID NO: 118171 - protein, 617 aa, Oryza sativa
  Clone ID: PAT_MRT4530_21509C.1.pep
MTAQTKKRGGGESGNGGAGLGLAAFIANGEDLGPIVRHAFESGKPESLLQGLRSIVKMKEVEIEELCRVHYEEFILAVDELRGVLVDADELKGMLSGENLRLQEVASSLLLKLDELLELYSVNKNVEEALGMLKICLQVTSLCQMCNKDIAEARLHSALKSLELIEKDFLQNIPLKLLKKAVQKQIPIVKLYIEKKVCNEFNEWLVYIRRTAKEIGKVSISQASLARQKNEGIHSQQREAEDCSRIGFDEHAYALDLDLIGEEEVLEFDLTPVYRANYIHTCLGLGEKFREYYYNNRLMQLNLDLQIPTTQPFMESHQHFLAQIAGFFIVEDRVLRTADGLLSDSQVETMWGTAISKVTSILEEQFSRMDAANHLLLVKDYVTLLGATMKKYGYQTTSLLEILEKNRDKFYQLLLSDCRKKIDGIFTKDSYEQMIIKKENEYHMNVSAFQLEPIGVVPDFPYVAPFSSSVPDACLIVRSFIDDSVNYLSYDPMMDAYDVVKRYLDKLLIEVLNDGLLNLIHGGCLEITQMVQIAGNIAILEKSCDMFLFHAAQLCGVPRRLLDKPHSGLTARAVLKASQNAAYNGLIALANSKIDEFMLLLTKHQWTPEETSEHVND

SEQ ID NO: 118172 - protein, 439 aa, Oryza sativa
  unsure (1)..(439): unsure at all Xaa locations
  Clone ID: PAT_MRT4530_2150C.1.pep
MATPSSFSSARKKAPSPPKHRHDGTSGLPFGMDWSPPPKRWEGRNTIWPHNPQTGWSYCVMIPSWIAQTPEASATADNFLKSIVDXFYRIHVGIQSPEGISSSHGVLRRXQTSDTLKHTVIINLDLVYTLKQEFPRKGIPPAPPKHAFSRINSSRVLLEERRNALEEWMQKLLSDIELSRSAPVAAFLELEAAARSCVLSESSQMNSAFAHGNGPTGATGNGMLGESILDQPNERASSMSNHRKKNHVFLEHGVRNGSIDTYKGVVSEEDHDSNPGHARKDSAESIGSDLSSLRGSELSVPGVSSSLWDGPVDLPSGIDGHSQTEQFTGLDMQLLYDMDAQIILPADQRPKLTRLLISMDRRQVTAKTDMEDLIARLNQEVAVKEYLATKVKDLEVELEATKKKDKEILHQAVLTEREKITQLQWDKDELYRGSTSVTR

SEQ ID NO: 118173 - protein, 509 aa, Oryza sativa
  Clone ID: PAT_MRT4530_21510C.1.pep
MEKTGNEAHKAQPNGLLWAYWEAHFKAFFFFSPRALPFVSTRKPRNQERKKSRTCDMDQEFHFDPFTGGDFDYPDGESFSGGAASGGFDYPGSCGRSSSAGEELHGHPYRDGYSFSGGAASDECHFLGRSGFPSSGGERLLVHRHPDRYRCGEPFSGGYARGHGDLLGWSSCHSSCSQLLQDPATIVIVINDGAHAHGGGLAQAGQASSMSVPLVKSKQGTSLVPQLKLGPSAAPNLLHWLMEHILWDALEFSISWTTLRRHQPKLPSEWSWWMAMGSPFIQIDGICSIAASFMCVEAQHRLAFEILHGIGRFPLKAKRLKGVKKKCINKKVWSPADGAFVEDVLKVVAKGRGKDVSHEAAVRLLLAHGPLLATLWVNDEYMICTTKNDLVYRGSSNSEKDPNHTVVCFAYRFVGEELHLRVLDDHTEDGPVRWVLYECIDEIHLLTLKEPLTKELIDRYRKKGQTESFLSNSANKQDHPSYLPIISPIQLQQSIGEYEDKGFRQSHHR

SEQ ID NO: 118174 - protein, 76 aa, Oryza sativa
  Clone ID: PAT_MRT4530_21511C.1.pep
MGTGTGMVKFFHRGDGDADVIPDGSIPMGTLSDTYGYQIRSPWVPFLILKEEEDESTKMVKKPMKQRKKWSSGLFY

SEQ ID NO: 118175 - protein, 147 aa, Oryza sativa
  Clone ID: PAT_MRT4530_21512C.1.pep
MASASSSSLSTRRNRLVVPLIVCPSCNVKTIVRCTAKTDANEGRIFYTCPDHEKDGTGCNFWYWEEGYINYLKRNGFIAGEDGTYGKTAQHLDLNQDAFGRQDEIEKKLIAIVPIVREILLAVKCMLVVGLFGVLILVCVLVVVLMK

SEQ ID NO: 118176 - protein, 83 aa, Oryza sativa
  unsure (1)..(83): unsure at all Xaa locations
  Clone ID: PAT_MRT4530_21513C.1.pep
CQPPPPPPPXYPPPGXPPPPYPPPPPPPPYPLPYPSYPPPPYPPYPPYPPPPPPPPYPPPYPPPXPPYPPPYPPPFPPPYPDP

SEQ ID NO: 118177 - protein, 156 aa, Oryza sativa
  Clone ID: PAT_MRT4530_21514C.1.pep
MSSALDKFIAVVKETKPRWDLRAATRCLEAVLARLLPPHQRRSSHSRRRPPNHGIDNDDDRDIGTDRALSRLFVKGISLATLMRPELPGGVYFPGCPGAVPFPKTQGHSLHVIVQLGCSLVMVITATATDFNCPQRLSSEHTLCLVPEIREKFGES

SEQ ID NO: 118178 - protein, 900 aa, Oryza sativa
  Clone ID: PAT_MRT4530_21515C.1.pep
MAERLLDRKIKSVQTDWGGEYQRLNSFFQRIGISHHVSCPHAHQQNGSAERKHRHIVEVGLSLLAHASMPLKFWDEAFLTATYLINRTPMKIIHYDTPAYLFEEQPDYNALRTFGCACWPNLRPYNTHKLAFRSKQCVFLGYSPLHKGFKCLEVNSGRVYISRDVVFDENIFPFAQLRPNAGARLRAEVLLLPSHLVHSFGGTELCNQPLINIPNHTDETAELHAGISAGENGANPGENAGADGAETAANSRHFMQHGSDVHGAHPEGGSALQSPPRSAPSATCPSQTQDSVPASITHPHDEPGGDTSSISPADVVSSAAADGMHATHGSATSSGGNVSSPHTFDAAQQIQQRPVTRSQHGVHRPKKYTDGTVRYGCLTETGEPSSLQEALSSANWKQAMDKEFSALLHNKTWHLVPPVKGKNIIDSKWVYKIKKKADGTIDRYKARLVAKGFKQRYGIDYEDTFSPVVKAATIRLVLSIAMSQGWSLRQLDVQNAFLHGYLDEEVYMRQPPGFEDARQPHFLCKLDKALYGLKQAPRAWYSRLSKKLQELGFSSSKADTSLFFYNKGHHKMFVLVYVDDIIVASSSSPAVNALLKDLEKDFALKDLGDLHYFLGIEVKRTPQTLLLSQERYTTELLERVNMTSCKPVSTPLSTAEKLSVEIGDELGPSDVTQYRSIVGALQYLTLTRPDISYSVNKVCQFLQTPTTAHWSAVKRILRYLKGTLDLGLKIVKSSSNLVSAFSDADWAGSVDDRRSTGGFADRRSTGGFAVFFGDNLISWSARKQATVSRSSTEAEYKALANAAAEIIWVRKLLTELGILHPNAARLWCDNLGATYMTANPVFHARTKHIEVDYHFVREQVAQKLLDIHFVSSQDQVADGFTKPISLQQLIGFRHNLNLVC

SEQ ID NO: 118179 - protein, 55 aa, Oryza sativa
  Clone ID: PAT_MRT4530_21516C.1.pep
STVEFLFLPRILKKGPCVQYSVPCLLSVFEVTPLRMIPCAHPCLGVLAQFIGPLT

SEQ ID NO: 118180 - protein, 85 aa, Oryza sativa
  unsure (1)..(85): unsure at all Xaa locations
  Clone ID: PAT_MRT4530_21517C.1.pep
NSLSKRGYIGSYHYEKDAKYRPFSALLPEGQNPKMLYVKLVLIILMCGLPSSAFSTPHXIHHNDDHHTRVRKKTLQIHGFIRRFF

SEQ ID NO: 118181 - protein, 144 aa, Oryza sativa
  unsure (1)..(144): unsure at all Xaa locations
  Clone ID: PAT_MRT4530_21518C.1.pep
MDELIQLAESMRQAASLLGDDDPSDESXPRRPSTFLNAVALGNGASNLHASSGGSRPRRPHAGSAPVDEAVGKLKSVLDNGEGDLDEAVVDASPPRLPPPCRLVLLPPRHRPCRLVLPCSRHHVAGRPGVLLPTRPGSCPRGEV

SEQ ID NO: 118182 - protein, 473 aa, Oryza sativa
  Clone ID: PAT_MRT4530_21519C.1.pep
MSLRPGRAHPLAASPLHTPLPARPRPQLRLSTSTSCAAMKSYRLSELSDAEVGGLKARPRIDFSSIFGTVNPIVEDVRMRGDAAVKDYTVKFDKVALDDVVVRVSDLPDVELDPAVKEAFDVAYDNIYAFHVSQKLPEKTVENMKGVRCKRITRCIGSVGLYVPGGTAVLPSTALMLAVPAQIAGCKTVVLATPPSRDGSICKEVLYCAKKAGVTHVLKAGGAQAISAMAWGTVSCPKVEKIFGPGNQYVTAAKMILQNSEAMVSIDMPAGPSEVLVIADKYANPVHVAADLLSQAEHGPDSQVVLVVAGDGVDLGAIEAEVSKQCSALPRGEFASKALGHSFTVFAKDMVEAISFSNMYAPEHLIINVKDAEQWEDLVENAGSVFLGQWTPESVGDYASGTNHVLPTYGYARMYSGVSLNSFLKYITVQSLSEEGLRSLGPHVAKMAEVEGLEAHRRAVTLRLQDIEATVTV

SEQ ID NO: 118183 - protein, 92 aa, Oryza sativa
  Clone ID: PAT_MRT4530_2151C.1.pep
MAPSASLTTTTLSDMLNQDCRRDAQGHGTFLPWRSVPQKPPHPEVPQLKRRWSSWRVDSHEEATLGGNEASTLKGVSGHSGGAADWFFDRPR

SEQ ID NO: 118184 - protein, 49 aa, Oryza sativa
  Clone ID: PAT_MRT4530_21520C.1.pep
PSDVQPRRACGWFECECECSSSLPLNFYLMDPTVRVQSSIGRLELICQL

SEQ ID NO: 118185 - protein, 118 aa, Oryza sativa
  Clone ID: PAT_MRT4530_21521C.1.pep
RFPPKWALGNASRPPVRRYLARPWGEYSRTLIMKSDIPPFVDKAGSLPWSGDFGLKTFWYPEYGNKGAGPPPPGRVNWPGYKKVFTKKGAPKFPVQNFLPPEPWIKPPGPPVKYGMWG

SEQ ID NO: 118186 - protein, 413 aa, Oryza sativa
  Clone ID: PAT_MRT4530_21522C.1.pep
MCVVRIFKLGLLLVTKLRIFSLFIIVVATSSAPDSSREVVAAYQFHDPKNLHGNIHARENSQHEHAVDKLCGSSSQYFLPQQRFSVSSCGRNDSSLALQKSGDNHVACQSGQPPLAVHTELQHDTSIVISSGEEKVLFDLNVPAESIDMESTITSNSFRDKLVKNDGSEETVTDHSFSKRNGVHAETSIEERTVGEHHISVSKDGNTTFFQESINNEIDKAQSSDLISVSSKHLIAETPHVDNIVCPELRASPDGASSPQETLIGNCDKMVCIAAETLVSIFSSSACTTDCPGTDSQTAAEDVNDEPQHSLDSYEEIVLNVEEIRDDGESIPVIPPDKDGPSCGIKLRRGRGLRNFLREIMPRLVSLSRHEICDDLHAIGYEPRKTRSRKTFGAQGSSSTRGRPPKHRPTARK

SEQ ID NO: 118187 - protein, 64 aa, Oryza sativa
  unsure (1)..(64): unsure at all Xaa locations
  Clone ID: PAT_MRT4530_21523C.1.pep
FFFFFFFFFKYKISRFILSWFTLTLREHLRXESIQSYDXIGLXPIVVNAKXRAFFVKKSNKAVR

SEQ ID NO: 118188 - protein, 191 aa, Oryza sativa
  Clone ID: PAT_MRT4530_21524C.1.pep
EAAAAVRSLEWEVLLATNSLGSLVVDGADYDGGIDTFFLDDADDVLFGQLAAEHEPPAAKGARAAAKAAVESLPTVVVDAARGDTQCAVCKDGMEAGERARRLPCAHLYHDGCILPWLAIRNTCPLCRHELPTDDPEYENWKARRAAAGGNGDGDRYGIIRQSCRRAQEEKDDIQQGICPTITDEEAETAK

SEQ ID NO: 118189 - protein, 158 aa, Oryza sativa
  unsure (1)..(158): unsure at all Xaa locations
  Clone ID: PAT_MRT4530_21525C.1.pep
MALVQNYRKPDVFLIMTINPKWDEITCELEPGQTPQDHPDLVVYGKCRNNYLREFNATTSQGKDSYPLYRRRNDGKCKGVRGHPLDNRWDVPYNPYLLWMYNSHMNVETRISVMFLIRKTQAGRCLQCIARLTGSMSGLEISFIXDFPMWFTWQTAAE

SEQ ID NO: 118190 - protein, 146 aa, Oryza sativa
  Clone ID: PAT_MRT4530_21526C.1.pep
MEVRRRAPLPPPPGRVQAGDALPLPIRHTNLIFSALFAASLAYLMRRWREKIRSSTPLHVVGLAEMLAIFGLVASLIYLLSFFGIAFVQSIVSSNDDEEEDFLVGPRRGSSAGIRTNKTLGGNRDIIQKGPSSLPHFAKETLKSLC

SEQ ID NO: 118191 - protein, 498 aa, Oryza sativa
  Clone ID: PAT_MRT4530_21527C.1.pep
MPADAAAKGMKLERYASGAGAMLLLRRAASGKVVSASSHLLFRATVLATMALVFLFTFHYPSLLSRSFTLSSGAGAGEGGAAAHASHRSLLMSSSSASASAASVYGGAAWEKEVRRSAKPRKDGGIAVLVTGAAGFVGTHCSLALRARGDGVLGLDNFNAYYDPELKRARQRLLAGRGVLVLDADINDALLLEKLFDLVPFTHVLHLAAQAGVRYAMEAPQTYVASNVAGLVTVLEVAAKHADPQPAIVWASSSSVYGLNTDAPFSEEHRTDRPASLYAATKKAGEAIAHTYNHIYGLSITGLRFFTVYGPWGRPDMAYFFFAKSIVSGEPITLFRAADGADARRDFTYIDDVVKGCLGALDTSGKSTGSSKSGKKSGPAPLRVYNLGNTSPVPVTRMVAILEKLLGKKANKRIVAMPSNGDVPFTHANVTHAAHDFGYRPTTSLDAGLRHFVDWFADYYKLKLDVPKIAAKVAGAGKPSSSSASKKKKKAAAMSASS

SEQ ID NO: 118192 - protein, 154 aa, Oryza sativa
  Clone ID: PAT_MRT4530_21528C.1.pep
MDVNEEAMAAHKRAFLDFLDQDVGKGVYMQAVRDMVQNKRHRLIIGMDDLRNHSLDLARRVIRSPAEYMQPASDAVTEVARNLDPKFLKEGQRVLVGFSGPFGFHRVTPRDLMSSFIGTMVCVEGIVTKCSLVRPKVVKSVHYCPATGGTLSRE

SEQ ID NO: 118193 - protein, 602 aa, Oryza sativa
  Clone ID: PAT_MRT4530_21529C.1.pep
MWPLLLRAAVVYAALLAAGEADGSHDVLDIFGTRSESDYYRNAFQGKQGQAVPLPRGGGLRREQQELGAAGPGGSGLSKAPPRSAPSKVALDSLKLPVDTSAGFAGGWNLVSENSGVSAMHLVVMQHGKAIMFDTCTTGRSLMRLPPGRCRPDPRSKQPGAMDCWAHAVEFDYNTGALRSLKIVTDTWCSSGAFDADGNMVQTGGFFEGDKSVRYGTQLVLPDGSFIVIGGRRAFSYEFVPAAGRANARATPLRLLRDTTDDVENNLYPFVNLLPDGTLFIFANDRSIVFNYRTGQVVRELPILPGGSRNYPASAMSTLLPLDLRKGAGLSAEVIICGGATKNAFKLGETSTFPPALRDCARINPSKPGARWALDQMPSGRVMGDVLILPTGDLLMLNGAAKGCSGWGFGRQALLSPVLYSPYLRRGKRFRVLNPSNIPRMYHSTSALLPDATVLVAGSNTNSAYNFSGVDFPTEVRVERFTPPYLSPQLSPNRPAIDAASVPGDGMRYGARFTFRFTTPAQGVGQGDFKVTMYAPPFTTHGYSMNQRLLILPVTAFAAQGQRHTVTVDAPPKPELAPPGYYMVYVVAKGVPSKAAWVKMHK

SEQ ID NO: 118194 - protein, 150 aa, Oryza sativa
  unsure (1)..(150): unsure at all Xaa locations
  Clone ID: PAT_MRT4530_2152C.1.pep
YSQEKKQPRHASTTTPAMRAKTRTKDLXSDASNKGRSKAFAHNYFTPPKKVSCHTPAATTFRKPSTRGHHGXASLLVGRQEGAXTSPPPPMRSSSIHAVGLDGERMREDNGSPLXPHTSLLDVAIFCRQRRYRKRTMSRIGPIEEPQHSP

SEQ ID NO: 118195 - protein, 269 aa, Oryza sativa
  unsure (1)..(269): unsure at all Xaa locations
  Clone ID: PAT_MRT4530_21530C.1.pep
PRPVYAALLAAGEADGSHDVLDIFGTRSESDYYRNAFQGKQGQAVPLPRGGGLRREQQELGAAGPGGSGLSKAPPRSAPSKVALDSLKLPVDTSAGFAGGWNLVSENSGVSAMHLVVMQHGKAIMFDTCTTGRSLMRLPPGRCRPDPRSKQPGAMDCWAHAVEFDYNTGALRSLKIVTDTWCSSGAFDADGNMVQTGGFFEGDKSVRYLSACGTCDWKXEFPKSLADGRWYGTQLVLPDGSFIVIGGRRAXSYEVVPAAAGKRQARLCV

SEQ ID NO: 118196 - protein, 194 aa, Oryza sativa
  unsure (1)..(194): unsure at all Xaa locations
  Clone ID: PAT_MRT4530_21531C.1.pep
GVAPGWGTRWWWYRGGLGTGGGGLAPVRAAAAEAERGSGEGTTPQQWGKGACVARLADATHRQQEGRDGRWPPPGAPLPPPVAVEPHSRRPAIEFFTRLQREETGIRYSSLPPVRQRVLPPLPPAAPTSSPPPXALSPRHLPPVIAPRAATPLVRPPPXPPAVAPPTARRRSALRPPPAAAHTSCRKCRHDDSG

SEQ ID NO: 118197 - protein, 140 aa, Oryza sativa
  unsure (1)..(140): unsure at all Xaa locations
  Clone ID: PAT_MRT4530_21532C.1.pep
KHWNSWTVTTSIHRGTAPWLHLHAQARTLKTCTRSSVPTATTXANAVPNEQSAAXSSAACSWPXRPRGGPGPPWRSTRAXPQRAAVQRRQPPHPQPPERTEQPPPPXAPPPSLATAIFLFLLSPAGTSGAPASSAAAAAR

SEQ ID NO: 118198 - protein, 333 aa, Oryza sativa
  Clone ID: PAT_MRT4530_21533C.1.pep
MMGGFLSRVLLLAFGYAYPAYECYKTVELNKPEIEQLIFWCQYWILVALMTVMERFGDFTISWLPFYSEAKLMFFIYLWYPKTKGTTYIYGTFFRPYISQHENEIDRNLLELRARATDVVVLYFQKAATVGQNTFFDVLKYVASQSPSQRSSQQPSQEPQQPKQQQAPVQQQPTQKQAPTVLRRSASIAARQAAMAQQSQDAKTVPSSPKIKRQASTKAAPVASTKLTGAAAPSTPKSDADAPKKNEAAPASLQVATPATKADVPASEPSAPLPEAEEADKMAIDEADDAVEGTEEGDPVPGETVEERPMEETIRVTRSKLRRRTASEDPAGN

SEQ ID NO: 118199 - protein, 113 aa, Oryza sativa
  Clone ID: PAT_MRT4530_21534C.1.pep
RVGVAESETAAQADAREQTVATGWTGLAETDPDQASHTAAFSQPQVVPTPEHQQHGPQVLPPWCVGRKWAPTGPGVAVPRRGIPCAVAPRHAAPSGYGLVDLRRWTAWAAAAG

SEQ ID NO: 118200 - protein, 97 aa, Oryza sativa
  Clone ID: PAT_MRT4530_21535C.1.pep
RSPDPARRRRHSASTAPLRLSSAVPPLSRLLVCLSTPLSPRPVLSCIGRPRPPPSAPSPTAALLAVPGRDRCRRPRPRSSLRSCCRGSHRREPPPPP

SEQ ID NO: 118201 - protein, 55 aa, Oryza sativa
  Clone ID: PAT_MRT4530_21536C.1.pep
YIPAALHCAGLIHSRILSSPSSYGATTGGTTGDYPSTLKPPSKTACWRRSTTGGP

SEQ ID NO: 118202 - protein, 39 aa, Oryza sativa
  Clone ID: PAT_MRT4530_21537C.1.pep
PLLESRRRDNGAPLALVCLYQSNKMLTHTVCAKSEHIFL

SEQ ID NO: 118203 - protein, 84 aa, Oryza sativa
  Clone ID: PAT_MRT4530_21538C.1.pep
ESGGNTPCTTAISFQHSWQSIPAQVKHHVCQMHHHTSVAHSILKPSTHFHQAFPAPCSSKMFSTDNSNWMRPFFEVNLDDYSLM

SEQ ID NO: 118204 - protein, 99 aa, Oryza sativa
  Clone ID: PAT_MRT4530_21539C.1.pep
MQAPGPSLPPDYFLGAHKISPRSGAPPSMPRQRVLDPLFHFAMELEPPVVFGAVEMDITLEPHMRPARHSASRSTGLASRCLRASLPPSGALPFYGTAT

SEQ ID NO: 118205 - protein, 77 aa, Oryza sativa
  unsure (1)..(77): unsure at all Xaa locations
  Clone ID: PAT_MRT4530_2153C.1.pep
HASGWLCGLCSEAVRDEVAKRGGCCGGGGRHLEDAVRDHMFFCGKFCRKNPAFHVADCMRQMLXRRYSDISAPSGAY

SEQ ID NO: 118206 - protein, 258 aa, Oryza sativa
  Clone ID: PAT_MRT4530_21540C.1.pep
MGSIDGHSLQQHQGYSHGGGAGGSNEEEEASPPPGGGSATGSAGRRPRGRPPGSKNKPKPPVVVTRESPNAMRSHVLEIASGADIVEAIAGFSRRRQRGVSVLSGSGAVTNVTLRQPAGTGAAAVALRGRFEILSMSGAFLPAPAPPGATGLAVYLAGGQGQVVGGSVMGELIASGPVMVIAATFGNATYERLPLDQEGEEGAVLSGSEGAAAQMEQQSSGGAVVPPPMYAAVQQTPPHDMFGQWGHAAVARPPPTSF

SEQ ID NO: 118207 - protein, 90 aa, Oryza sativa
  Clone ID: PAT_MRT4530_21541C.1.pep
FFFPWDQFAVSIVNIKENQNACVSLCPPSVKAGIYEYRAQKDLPKISVQLQIQNAMTRKKTRAGTCYRLTHWKLFLAFAFPGFFLSTTRE

SEQ ID NO: 118208 - protein, 433 aa, Oryza sativa
  Clone ID: PAT_MRT4530_21542C.1.pep
MLLRRLLHSSRRLGHRLQTLTPASAATAAAASSSPVSAPLPFRRPLPASSLLWPRLLSTSGRDDDPNKPWAFTPESGDPDPFAAGEGVEAPAGEDPLGLSAAGEDPWAKDFRAEGSEKGDVFEEIFKEEAATAAVASGEKAPGAGADELWTLSGEDEKDPFAEAVLGGGLEGIGGDGAAIDEADAGEDEEEEERKRLERRAREQELMETLKGPNRAFGDLIEASGITEDMIASLILLKDVRGVPGLPPLREIEDETIEKMNATSSRADVERQKQEEIAKARVRQVDEKGRAYGTGKRKCSIARVWIQPGDGKFIVNDKQFDSYFPILDHRADLLRPFTVTKTLGRWDVTCTVKGGGVSGQVGAIRLGISRALQNWEPGLRPNLKAAGYLTRDSRVVERKKPGKAKARKSFQWVKRWFGPADNVSACVLLRDGN

SEQ ID NO: 118209 - protein, 103 aa, Oryza sativa
  unsure (1)..(103): unsure at all Xaa locations
  Clone ID: PAT_MRT4530_21543C.1.pep
MATLSIVKKLAILALRCCXYDXKERPDLAKEAWGVLQAMVNYPDXKCKIPSFFISMSSGSGGRAAMPMPCSPPGLFVPTCNRXAAAANQDGLINPAPACKCAK

SEQ ID NO: 118210 - protein, 34 aa, Oryza sativa
  Clone ID: PAT_MRT4530_21544C.1.pep
MVYHMVMNSGLLIDDSSELVAAMDSMADQHQFYS

SEQ ID NO: 118211 - protein, 137 aa, Oryza sativa
  Clone ID: PAT_MRT4530_21545C.1.pep
GQSRPLLLSPSPLPDHGFHHLYHLRPPLLATSDLALSSTGFASALGSPPPPLQGPADPRPRLHYGRESPERRACHLPRRASLSSPYCRAPRAAFPTVAPLGELPSPFLSPSTASHAVVARRQCHLSPGVAAPLADRP

SEQ ID NO: 118212 - protein, 79 aa, Oryza sativa
  unsure (1)..(79): unsure at all Xaa locations
  Clone ID: PAT_MRT4530_21546C.1.pep
CNRKEHKLYVNFQKCEFMTXVWLGYIVSDEGIKADPTKIEAITSWPIPTSIHDIRTFHGRASFLHFMLLFLMLFLFSYF

SEQ ID NO: 118213 - protein, 108 aa, Oryza sativa
  Clone ID: PAT_MRT4530_21547C.1.pep
IVSIHNAPVLVVYSSGPALVGDRAPAGRELWRVAPDQEGWLLVVDDVANDIRVRRRSLLRPASGMHGQHLGGVCQVHRRPQVHRSLRRTCERSTAARPCGGSMGANKA

SEQ ID NO: 118214 - protein, 132 aa, Oryza sativa
  Clone ID: PAT_MRT4530_21548C.1.pep
VVEAGWVPQVRVLAHAAVGAFLTHCGWGSTVESLRFGGLPLVMLPFIADQGLIARAMADRGLGVEVARDDDGDGSFRGEDVAAAVRRVMAEEEGKVFARNAREMQEALGDGERQDRYVDELAERLRRRRSLS

SEQ ID NO: 118215 - protein, 53 aa, Oryza sativa
  Clone ID: PAT_MRT4530_21549C.1.pep
ITVQSTVSFGITTIMRFSSSFAIFITTIQVVCDIFLLKLLGIRSARTRGRTRG

SEQ ID NO: 118216 - protein, 76 aa, Oryza sativa
  Clone ID: PAT_MRT4530_2154C.1.pep
MEVGGGQIRRPPTSRQPVRQPPTSMPANPLARPPRKSREERRGEEGAVVTVSSVVVIAPPMGGNIEGLLTKEMETE

SEQ ID NO: 118217 - protein, 148 aa, Oryza sativa
  Clone ID: PAT_MRT4530_21550C.1.pep
MGMGRTRCGGAGNGEEVFKSGLLDPGNLLSSWEGDDCCQWNGVWCNNETGHIVELNLPGGSCNILPPWVPLEPGLGGSIGPSLLGLKQLEHLDLSCNNFSGTLPEFLGSLHNLRSLDLSWSTFVGTVPPQLVSGTVGYIKKQDNWANF

SEQ ID NO: 118218 - protein, 315 aa, Oryza sativa
  Clone ID: PAT_MRT4530_21551C.1.pep
MAASRCFLLLLLLLLSPLLASAGEEEEEAVLAMAARLRRPAAASFREGYTQLFGDSNLALHGDGKRVRISLDERTGAGFASQDAYLHGFFSASIKLPPDYAAGVVVAFYMSNGDVYEKTHDELDFEFLGNIKGREWRVQTNVYGNGSTSVGREERFYIDETPIREVQRTKSMGVQFPSKPMSLYATIWDGSSWATSGGRYKVNYKYAPFVAEFSELMLHGCAMDTLTRAPMCTPDIANIHNAVAMSGRQRSAMERFRTKYMTYGYCYDRLRYPTPPSECNVGPEAELFLPTGEARSIDRHGRARRHRRGPADSAF

SEQ ID NO: 118219 - protein, 55 aa, Oryza sativa
  unsure (1)..(55): unsure at all Xaa locations
  Clone ID: PAT_MRT4530_21552C.1.pep
INKVIDCKFPDHQRRAYYELCAXRVFLHRQSAEALSLXVVGVIMETINIAEGIRA

SEQ ID NO: 118220 - protein, 612 aa, Oryza sativa
  Clone ID: PAT_MRT4530_21553C.1.pep
MTPVQAGAAPASPSAAAALGFLLPTCWEIEVTCAAAMILVALYAAYELLAPRPASAAGGSSAAGDDLLLVRDLDGADKYKGGSSGPSAYVVKLELLAAKNLIAANLNGTSDPYALITCGEEKRFSSMVPGSRNPMWGEEFNFFVDSLPVKINVTIYDWDIVWKSTVLGSVIVPVESEGQSGPVWYTLDSTSGQVCLHIKAIKVHESSSRALNSSAEAGARRRISLDKQGPTVVHQKPSHLQTIFGLPPDEVVEHSYSCALERSFLYHGRMYVSSWHICFHSNVFSKQIKVMLPLRDIDEIRRSQHAVINPAITIFLRMGAGGHGVPPLGSPDGRVRYKFASFWNRNHTFRALQRAVKNFHTMIEAEKQERAQSALRAHSSSRKSSMKEINVPEDCADLTGQLQPFVKEEVLVTVFNGSFPCTAEEFFNTLLSDDSSYITEFRTARKDKDINLGQWHHADEYDGQVRELNCKSICHSPMCPPYSAMTEWQHMVLSADKTDLVFETVQQVHDVPFGSFFEVHCRWSVKTTSSDSCSLNISAGAHFKKWCIMQSKIKSGAVDEYKKEVQEMLEFAESYMRKVRTSNQDNGTPTEQDNGAVTEQENVAPDNTPNDE

SEQ ID NO: 118221 - protein, 72 aa, Oryza sativa
  Clone ID: PAT_MRT4530_21554C.1.pep
NVTKQFWQDSLSQDHREIKRVRSKARKNVAASLGYEVELMKSEIQKDCRLGLNRQSVKRTTHKGVHFRGTTG

SEQ ID NO: 118222 - protein, 189 aa, Oryza sativa
  unsure (1)..(189): unsure at all Xaa locations
  Clone ID: PAT_MRT4530_21555C.1.pep
LQERITTXTKKGSITSVQAIYVPADDLTDPAPATTFAHLDATTVLSRQISELGIYPAVDPLDSTSRMLSPHVLGEDHYNTARGVQKVLQNYKNLQDIIAILGMDELSEDDKLTVARARKIQRFLSQPFHVAEVFTGAPGKYVELKESVQSFQGVLDGKYDDLPEQSFYMVGGIDEVIAKAEKIAKESAS

SEQ ID NO: 118223 - protein, 93 aa, Oryza sativa
  unsure (1)..(93): unsure at all Xaa locations
  Clone ID: PAT_MRT4530_21556C.1.pep
GHFFFGTIFPQKGFSGGGPKRGGEIPFPPIFNGGPKFKFKFFFWFGFFKGRGFPKFFFXXGKKKKKKKKKKKKKKKKKKKKKKKKKKKKKKKK

SEQ ID NO: 118224 - protein, 73 aa, Oryza sativa
  Clone ID: PAT_MRT4530_21557C.1.pep
ANRAWCFSSHPFCAMAWIIPHLCTLQLASHSPRLIPKSGYALLSRADAVSAWPSSGCHSAMNSRLLVLISYVH

SEQ ID NO: 118225 - protein, 345 aa, Oryza sativa
  unsure (1)..(345): unsure at all Xaa locations
  Clone ID: PAT_MRT4530_21558C.1.pep
EAYQSPEGCNGGVLAHNGRLWWXILTLDPFAAGEFHLRHVALPEGHGARMDNSDDKHRCVKVSEGKLRYVEIDGFPDTPAVTMTTLIDLDGAVWNMDYRVGLDEIWADDGYKLASRADAGQDGMIFAVNMCASATKSRVLHFEKFLVGAGVDSLEKYQNSRFVFAWKLLQPLPLRLRSEMDEHQSGNFKIQDIKDCTAVTSAEAARQFFTAQLEDIRMKKGTRKEKGTRQKNDAAAAKEERAIEVGASSSVEAVAAQSHGMLLRSSILPRPARRAPGRIARHLRPSSSVTFANRDCSAPTAKSIAFSTFVCAYFHFLKVQTAVRAPELLLRIRPGTVALVLVATD

SEQ ID NO: 118226 - protein, 94 aa, Oryza sativa
  unsure (1)..(94): unsure at all Xaa locations
  Clone ID: PAT_MRT4530_21559C.1.pep
MTVVMVGMVGNSLQPSLGLHLNRPAKTXIQRRRGWFGRTWGHPNLAQFQLAASSVVLLRRLVNFGPVCHVSSEFLTHLFISLVPDIVRLIYHLR

SEQ ID NO: 118227 - protein, 69 aa, Oryza sativa
  Clone ID: PAT_MRT4530_2155C.1.pep
MRATISRRRSQLIKYAQHINTYRGDEKTGCLVETFRRLWASLCIIVVVMLIIFPLRRVLLLLHKNEDLF

SEQ ID NO: 118228 - protein, 56 aa, Oryza sativa
  Clone ID: PAT_MRT4530_21560C.1.pep
MGPMRNYKPKPVYSSSIRVMTILETRVEVDKMESNSLIDNQGLRFRDGLPFRILAE

SEQ ID NO: 118229 - protein, 72 aa, Oryza sativa
  Clone ID: PAT_MRT4530_21561C.1.pep
MVMLDLHVIGGIQLGRTHEHSGGAWHSVQTASFLMCTCHSSGRGQYIRHPLIATIDYLPSASILGRGGRYPG

SEQ ID NO: 118230 - protein, 118 aa, Oryza sativa
  Clone ID: PAT_MRT4530_21562C.1.pep
LIVTVYALAKRTIDGEWFLMTCFKGAHGGCLVTNASYDVHSGILYCQNHLWQLLKKSGCYNNLMKPDFVGDQNTRESKDAVVEPAKDDLGTGEADKEAEEALPEQVAEAVVEDHGALM

SEQ ID NO: 118231 - protein, 271 aa, Oryza sativa
  unsure (1)..(271): unsure at all Xaa locations
  Clone ID: PAT_MRT4530_21563C.1.pep
RGGHAKISCEIFLVIIYKSEMSKRLMDRQWMYADRXSKKFIEGVHYFXLRVAEANKRNGFICCLCNKCKNQKXYSASRTIHFHLFESGFMPSYNYWTSHGEQGVEMEEDEAEDENIPDWAQYAGFEGNQTGEVDRDVGDNNASDDLGQMLQNAKEDCESEKEARKLEQMLEDHRTSLYPGCDDKAFGDLLKLVKNILLEGNKLSKTTYEAKKIVCPLGLEVQKIHACPNDCILYRGEESENLEACPVCKALRYKIRREDPGEVDGQPTKKR

SEQ ID NO: 118232 - protein, 94 aa, Oryza sativa
  unsure (1)..(94): unsure at all Xaa locations
  Clone ID: PAT_MRT4530_21564C.1.pep
GAVNLTVGGNSTVVVRSPAPFPGSSATVLGAVTAVPYNLSVLAVGGLIVPSGLDVAASDSRPAGGVNINHVPXNDRQSLPADRKGNVLRFNVLS

SEQ ID NO: 118233 - protein, 238 aa, Oryza sativa
  Clone ID: PAT_MRT4530_21565C.1.pep
MLARRWSPLCHAFSPLLCLLPLSLAAGPPSANLLSSPPNPSIAVASRWTSSFSLGIDFEGDGDESHLTDNGNGGEEQKRYEALDAPSFSLDIDGDEEHHWEEQWNLKELVLGNKYHRNPDAIMQKMDRQWMYADRRSKEFIEGVHYFLRVAEANKRNGFICCPCNKWFMPSYNCWTSHGEQGVEIEEDEVEDENIPDWAQYAGFEGNQTGEVDRDAGDNNAADDLCNTPETTKTSGCY

SEQ ID NO: 118234 - protein, 933 aa, Oryza sativa
  Clone ID: PAT_MRT4530_21566C.1.pep
MQRDMAKEKEEKKLKAKAKAKEAARLQAQAASDGPKKSEKKQRKKAVEDENPEDFIDPDTPHGQKKFLASQMAKQYSPAAVEKSIFWGRSCGSYFEVCTRYYVLPPPNVTGALHIGHALTVAIEDAIIRWRRMSGYNALWVPGVDHAGIATQVVVEKKLMREKKLTRHDIGREELVSEVLKWKDEYGGTILNQLRRLGASLDWSREVDYLDIKEETMLKVPGYNTTVQFGVLISFAYPLEEGLGEIIVATTRIETMLGDTTISVHPEDNRYKHLHGRYAIHPFNGRKLKIICDAELVDPTFGTGAVKITPAHDPNDFEVGKRRSLEFINIFTDDGKINNYGGAQFEGMPRFTARVAVIEALKAKGLYKETKKNEMCLGVCSRTNDVVEPMIKPQWFVNCNTMAKAGIDAVRSKRIEIIPQQYEQDWYRWLANIRDWCVSRQLWWGHRVPAWYVVLEDDQENILGSDNDRWVVARNESEANLEAHQKYPGKKFELHQDPDVLDTWFSSGLFPLTVLGWPDDTADVKAFYPGSVLETGHDILFFWVARMVMMGMQLGGDVPFQKVYLHPMIRDAHGCKMSKSLGNVIDPVDVINGIPLEGLLKRLEEGNLDPNELNIASDGKKKDFPDGIAECGTDALRFALVSYTSQSDKINLDIKRVVGYRQWCNKLWNAIRFAMGKLGDHYTPPATISVTIMPPICKWILSVLNKAIGKSVTSLEAYKFSDATSAIYSWWQYQLCDVFIEAIKPYFFNDSQELESARAASRDALWVCLDTGLRLLHPFMPCVTEELWQRLPQPKDSCQKDSIMVSEYPSLVKEWADDKLENQIDIALDTVNKLRSLKPPTDTNESCCEQSLSVYLQLQGALNAEVELEKLRKKREEIQKLQHALSQKMEASGYKEKAPHNVQEDMRKLTSFLEQLEIISEAEKKLDAKTGKN

SEQ ID NO: 118235 - protein, 542 aa, Oryza sativa
  unsure (1)..(542): unsure at all Xaa locations
  Clone ID: PAT_MRT4530_21567C.1.pep
MASAQAAATPVSSGLSATAVALLRIHALRRNDTKSCSDPLVEKSSLMDRQWMYADRWSKKFIDGVHYFLRVAEANKHKGFICCPCNKCKNQKXYSASRTIHFHLFESGFMPSYNCWTSHSEQGVEMEEDEVEDENIPDWAQYAGFEENQTDEVDRDADDSDAADDLGKMLKDAKEDCESKKETHKLERMLEDHRTSLYPGCEQRHKKLDTTLEFLXWKAKNGVSDKAFGDLLKLVKNIFPEGNKLLETTYEAKKIVYPLRLEVQKIHACPNDCILYRGEEYENLEACPVCKALRYKIRRDDPGEVDGQPTKKRIPAKVIWYFPIIPRLRRLFRNKGNATMMRWHAEERQQDGMLRHPADSSQWRNIDRTFKDFRKDARNIRFGLSTDGMNPFGEMSSGHSTWPITMCIYNLPPWLCMKRKYIMMPIIIQGLKQPGNDIDVYLRPLVEDLKLLWKKGVLIWDEDKREEFNLRALLFVTINDWYALSNLSGQSNKVWDLGEKSMGKLPHIKFQLSEPIERCNPLGAPLKVGVPHPEPLKEAWRG

SEQ ID NO: 118236 - protein, 74 aa, Oryza sativa
  unsure (1)..(74): unsure at all Xaa locations
  Clone ID: PAT_MRT4530_21568C.1.pep
ISSIDHQKHPIXQTMXLQLQSRVLKLRRVLRNLSPSSGGGDVXSKVGGVIHLEEMPARFVERAVEHVVVVVIHX

SEQ ID NO: 118237 - protein, 768 aa, Oryza sativa
  Clone ID: PAT_MRT4530_21569C.1.pep
MSAIRGRGARCGPCGVGGGGASARGVSGVVAGEMVKKKGKYSPGASGSGSGSGGGNAGGGPRPGGRETVVWSEKMNEYLIDALLHQQAIGNRGEGRFHSAAFDSIISGVAERFGVAIDRSNIKNRLKSIKENFHECENLFQNQSGFKWSAMNKKFYADPTVWREYIERKPEARKWINKPIDHYDRLLELFGKDRERCLASGSPKSPPAKKARRDPPKEKPQRTPTNGLVSPIVKSLKDMESQRTPTNVLVSPIIIKSSKEMVNENEVPSEAVTEINIAEEQDLSEKFTSENGAMPVEGNSCGTGMPYAPENWPCPGDQWSWKVGNRASATGHWLDRYLTPPSRFRDATGKKTSFTSRLKVEEFIKTEFPDMDPNTFFSMFIWKIPAKGHCIQRGGGEVRRVFCPYARQADPAGPCKARNNLCKLEREGFIESSPAQDCDLCCKMPDFCRECCCVFCRRVVDYSFGGYSYIKCEAVLEENKICGHIGHLDCALRTFMAGTVGGCIDLDMQYCCRRCDNKTNLMLHVEKFLEICQSLQSRDDIEPILNTGLCLVRGSRQTRAKSLESIMRSAMAKLKCGVDLAEVWKMEDNGINSTPSAEVSPATGGVTVLGIQQAPEEDAPPGFPYYVDLADNDLQRAVENLPAYITEDQHTLSVRFEDSIDHALKELKRSQEAEYKLAEQKLYSQKDHVLSLYRQLDSERSVLADPMPLADDDGSLYSTLITNVMKRVDQVKSEEEKLKVMLGIADGFGKTPSGVIQEHFGLPADTAN

SEQ ID NO: 118238 - protein, 187 aa, Oryza sativa
  Clone ID: PAT_MRT4530_2156C.1.pep
MAAAFAQESSHAVVYRASNSKRYTTRTFGRAYRNEGHKQRHEPEASSDGRRENISESRGIELTSFAKDGLCRRVVRLKSARRKPTKGMGFAKYRTLPGEGPAGRHAFQRLRQGLGRVTWPIRSPYEQKTLYAHKDIPIIRATMAFAAQAINALPMFAYKPSSAVEKDGVGGAALYTVYHVGRKRTRK

SEQ ID NO: 118239 - protein, 497 aa, Oryza sativa
  unsure (1)..(497): unsure at all Xaa locations
  Clone ID: PAT_MRT4530_21570C.1.pep
MAPIGVLTALDQARTQYYHFKAIVIAGMGLFTDSYDLFCIAPVMKIVGRVYYSDGGARPGVTPPAVVSATVGVALLGAVIGNVVFGALGDRVGRRRVYGACLLLMVCSSVGSGFSVCRTRRCALASLCFFRFLLGVGVGGDYPLSATIMSEFANRRTRGAFIAAVFSMQGFGILASSAVTMAVAAAFDHYTGYPAPLDTPECADLAWRIILMAGAVPAALTYYWRMSMPETARYTALVERDVVKATNDIGRVLADLDLGAVAEEXGGGGVEPASAAAAPFEAFNVAKFQAVIAVASTXPGYFVAVLLIDRVGRRCLQMAGFLLMAVFLFALAGPYDGYWRDHGAHAGYIVLYSLTFFSANLGPNTTTFILPAELFPARFRSTCHGLSGAAGKLGALVGSIGFLWASQQKDGAAAGHLPGIGMMYALFVLGGICLLGLALTYVFTPETMMRSLEENESDRAQTQVGDGGSDTEAAKSPASMASSHLSMSPILPARVSV

SEQ ID NO: 118240 - protein, 1008 aa, Oryza sativa
  Clone ID: PAT_MRT4530_21571C.1.pep
MSSVTPAADAQPLDEKELERKLKKDQKAKEKEEKRLKAKAKEAARLQAQAASDGPKKSEKKQRKKAVEDENPEDFIDPDTPHGQKKFLASQMAKQYSPTAVEKSWYSWWESSGYFGADAASSKPPFVIVLPPPNVTGALHIGHALTVAIEDSMIRWRRMSGYNTLWVPGVDHAGIATQVVVEKKLMRERNLTRHDIGREEFVSEVLKWKDEYGGTILNQLRRLGASLDWSREVDYLEIKEETMLKVPGYNTTVQFGVLISFAYPLEEGSGEIIVATTRIETMLGDTAIAVHPEDGRYKHLHGRYAIHPFNGRKLKIICDAELVDPTFGTGAVKITPAHDPNDFEVGKRHNLEFINIFTDDGKINNNGGAQFVGIPRFTARVAVIEALKAKGLYKETKKNEMSLGVCSRTNDVVEPMIKPQWFVNCNTMAQAGIDAVRSKRIEIIPQQYEQDWYRWLANIRDWCISRQLWWGHRVPAWYVILEDDQEKILGSANGRWIVARNESEANLEAQQKYPGKKFELHQDPDVLDTWFSSGLFPLTVLGWPDDTADLKAFYPGSVLETGHDIIFFWVARMVMMGMQLGGDVPFEKVYLHPMIRDAHGRKMSKSLGNVIDPVDVINGISLDGLLKRLKEGNLDPNELNIATEGKKKDFPDGIAECGTDALRFALVSYTSQSDKINLDIKRVVGYRQWCNKLWNAIRFAMGKLGNHYTPPATISVTTMPPICKWILSVLNKAIGKTVTSLEAYKFSDATSAIYSWWQYQLCDVFIEAIKPYFFNDSQEFESARAASRDALWVCLDTGLRLLHPFMPYVTEELWQRLPQPKDSCRKDSIMVSEYPSVVKEWTDDKLENEIDIALDTINKLRSLKPPSDTNERRPAFALCRGQEITATIQCYQSLVVSLSSTSSLKILTENDETPPDCATAVVNKDLSVYLQLQGALNAEVELEKLRKKREEIQKLQHALSQKMEASGYKEKAPQNVQEEDMRKLTSFFEQLEIISEAEKKLDAKTGNN

SEQ ID NO: 118241 - protein, 144 aa, Oryza sativa
  Clone ID: PAT_MRT4530_21572C.1.pep
MVIVEEYTERDPKNKFILNTIISEFANRRTRGAFIAAVFSMQGFGILVSSAVTMAVAAAFDHYAGHPAPLDTPECADLAWRIILMAGAVPAALTYYWRMPMPETARYTALVERDVVKATNDIGRVLADLDLAAVAEEEVARRRR

SEQ ID NO: 118242 - protein, 582 aa, Oryza sativa
  Clone ID: PAT_MRT4530_21573C.1.pep
MAPRIRVLAALDQARTQYYHFKAIVIAGMGLFTDSYDLFCISPVMKIFGRVYYAPSGSVDGSGSGPGVTPPAVVSATVGVALLGAVAGNVVFGALGDRVGRRRVYGACLLLMVCSSVGSGLSVCRTRRCALASLCFFRFLLGVGVGGDYPLSATIMSEFANRRTRGAFIAAVFSMQGFGILVSSAVTMAVAAAFDHYTGYPAPLDTPECADLAWRIILMAGAVPAALTYYWRMSMPETARYTALVERDVVKATNDIGRVLADLDLAAVAEEEVAAAALSPPPVTTPPPPRPSYGLFSRRFVRQHGRDLFACAAAWFLLDIPYYSSTLFQSQIYRPWFPPAAKVNAFQEAFNVAKFQAVIAVASTIPGYFAAMLLIERAGRRRLQMAGFLLMAVFLFALAGPYDGYWRDHAKTAGYIVLYSLTFFSANLGPNTTTFILPAELFPARFRSTCHGLSGAAGKLGALVGSIGFLWASQQKDGAAAGHLPGIGMMYALFVLGGICLLGLALTYAFTPETMTRSLEENESSVQAQSQVGDGGSDAGNGSDGLRFHELNVLMEAATKSPVSMASSHLSMSPILPHRMSL

SEQ ID NO: 118243 - protein, 209 aa, Oryza sativa
  Clone ID: PAT_MRT4530_21574C.1.pep
MAARRHYGGGAAEREEMEGNGSRGARGGGHAARGDETARGAAAATGRVRRRGAAMGQRRGAGRRDGCGDATAGGTRRETTATRGDGDGDIGAARQRRGNGDGNGSAAAARGSERRWDARGDGTVARRRRRAVTAHSSGAGLGGAAWHRGGEATTATARQWRRDGARRDGTATRWRRATRRRCDGTGLGAAGRAARGAEEWGWARGEGKR

SEQ ID NO: 118244 - protein, 640 aa, Oryza sativa
  Clone ID: PAT_MRT4530_21575C.1.pep
MARGGGAAGVSMAHHLGIALVVLVFAAMAQVARGGGGGHDYGMALSKSILYFEAQRSGVLPGSQRIAWRANSGLADGKANGVDLVGGYYDAGDNVKFGLPMAFTVTMMAWSVIEYGEEMAAAGELGHAVEAIKWGTDYFAKAHPEPNVLYAEVGDGDSDHNCWQRPEDMTTSRQAYRLDPQNPGSDLAGETAAAMAAASLVFRSSNPGYADQLLQHSKQLFDFADKYRGRYDNSITVARNYYGSFSGYGDELLWASAWLYQASDDRRYLDYLANNADALGGTGWSINQFGWDVKYPGVQILAAKFLLQGKAGEHAGVLQGYRRKADFFACSCLGKDAADNVGRTPGGMLYHQRWNNIQFVTSASFLLAVYSDHLAGGAVRCSGGGGAVAGAAELLAFAKSQVDYILGSNPRGTSYMVGYGAVYPRQAHHRGSSIASIRASPSFVSCREGYASWYGRRGGNPNLLDGAVVGGPDEHDDFADERNNYEQTEAATYNNAPLMGILARLAAGHGARARGRLGQSLQHGIAANHTSLPHGANHQHASPVEIEQKATASWEKDGRTYHRYAVTVSNRSPAGGKTVEELHIGIGKLYGPVWGLEKAARYGYVLPSWTPSLPAGESAAFVYVHAAPPADVWVTGYKLV

SEQ ID NO: 118245 - protein, 249 aa, Oryza sativa
  unsure (1)..(249): unsure at all Xaa locations
  Clone ID: PAT_MRT4530_21576C.1.pep
MTVLSTIHCDPKDSFPPLSRYGFLRIGSPTAATATAAAATTAHGAAHWGGGTGARTRRHDSTRAAARRRGGGGAGRGRAKGGGRGEGRRDGDAGREVGARGARRRDGCGDATAGGTRRETTATRGDGDGDIGAARQRRGDGDGNGSAAAARGSERRWDARGDGTVARRRRRARRHGARGSGVARGARRRRRRLGSGDETVRGAMGRRRGGDGRRDGDATAXGARGGRARGARGRGGGWARGEVGEKGKG

SEQ ID NO: 118246 - protein, 91 aa, Oryza sativa
  Clone ID: PAT_MRT4530_21577C.1.pep
MQVNECAAYIYATTCCDRQDDVSLFRNTTHRHRRLLHTQDNTFIHPREHPAAAELARLQHGYPENFWEGRNKERHTDAIWKPPGRATRYPI

SEQ ID NO: 118247 - protein, 185 aa, Oryza sativa
  unsure (1)..(185): unsure at all Xaa locations
  Clone ID: PAT_MRT4530_21578C.1.pep
MVFRDSLKLLPDSLSSLGQSLCPELGSKGEVDHTSVVMDNFASRKRELVEKQDILGGIMXDQNIYWSLYELYITTRMMTLSFLALTIFRKDYYDEMSTPIAIPHRTADEFLHRGDYGGHADVYKXENFFYYDVRSLYPFIMKSSPMPIGAAKWDGNLQGEELYGFLEAYVDCPETMNKPFLPYRS

SEQ ID NO: 118248 - protein, 109 aa, Oryza sativa
  Clone ID: PAT_MRT4530_21579C.1.pep
PRGWIGSYPAARNNPIGMIPLANSPLFAPKLRIQSSKMKKKKKRKTKTSCRRGRTGGGGWSARTGCRPHRRYGPILPAAPTTTTTTSASRRRLEEERERGREREKALFF

SEQ ID NO: 118249 - protein, 120 aa, Oryza sativa
  Clone ID: PAT_MRT4530_2157C.1.pep
ASTTNDKGKGLHIEDDAGETDNPKDAVDSVTKQISGIAISESLVVATSSTDATDNSKSESSAPDIDKKIRALKKKIRLAEAQVQGDPENLKPEQLEKMKKIEGWKEELKLLENKSSPAAS

SEQ ID NO: 118250 - protein, 158 aa, Oryza sativa
  unsure (1)..(158): unsure at all Xaa locations
  Clone ID: PAT_MRT4530_21580C.1.pep
WEQESRCGLLPLPRGPSHHRQGAVVAATGPRRPPPPPPVTIATEVDPSPPPPPPSSTPPSPSIGTAPSPRSSSLSTAGSRSSCPXQPPRPSTTCAIASLGPARSSSTPSTPYPRPNPAGSLPSPXTSGLLPRFGLQPRRSSSSVVAFGHCHFLWIRSC

SEQ ID NO: 118251 - protein, 86 aa, Oryza sativa
  Clone ID: PAT_MRT4530_21581C.1.pep
SWTRGSVATLSSPPPASASPPPRDARDPRRAPPPPPPPAAAAHATRLPPCRRGRGGGAAPAPPPPPRRSERLHLASWWRAKESGGG

SEQ ID NO: 118252 - protein, 49 aa, Oryza sativa
  Clone ID: PAT_MRT4530_21582C.1.pep
SVIEIRVSRVHRDTKCTISAPVKAWSLGGSHLLLTLQVFLHQSCPRVHV

SEQ ID NO: 118253 - protein, 162 aa, Oryza sativa
  Clone ID: PAT_MRT4530_21583C.1.pep
MGGEGVRTDDDGEEDGGAASSGRWPKEASSERVRRWRQKQQAWSTRAGGVGGGKLQARGWAALESPLCRRRLLLPPIGAALIPQSPSFATHHRRRLSHQRRCLPPPISVVVFLPPSVVAANAPRSLRGSMSSVGLNLPRSSLFLFIHIQGRASQFDPATDKV

SEQ ID NO: 118254 - protein, 98 aa, Oryza sativa
  Clone ID: PAT_MRT4530_21584C.1.pep
IFGLVGAYAVYTWRHRRFLGHGKESLEHIGRVVILNMGMGLLTRGIDNWGHLGGLLGGMAMAWFLGPAWQYQYVSKDGRTVFKDNAPILQLSNGKWLR

SEQ ID NO: 118255 - protein, 195 aa, Oryza sativa
  unsure (1)..(195): unsure at all Xaa locations
  Clone ID: PAT_MRT4530_21585C.1.pep
NQHSPLFNQIRFSHDHTLIELLNAMLDIARLSKKWWGEAILXCYILNRISIKNKEVTPFEEWEEKRLILLXYWRAWGCLAKVDVPIVKKLKLGPRTVVCVFPSYAIYSMGXVNSGVTDMHVGIIFXSRDVTSFENESPVKDERCIYISSQELIIFPESFLLIEHNEQTYVENPPTVNNAPSPVHSLWAFSSTFPH

SEQ ID NO: 118256 - protein, 171 aa, Oryza sativa
  Clone ID: PAT_MRT4530_21586C.1.pep
MELWIVKYIPREIDLCKQSETKWQAPPSGWAKINVDGAFVSQTSKGSVGIVIRDHECNVLLSAWSVMRYCTSAEEVEATACRDVMVLIKLANEWIKMPLILETDCANVSSVLKATEEDRSQLWNIFQEARLALALSHKYQIVSVPIRPRYGVPRPQGVCLSCWLWIVIMLT

SEQ ID NO: 118257 - protein, 593 aa, Oryza sativa
  Clone ID: PAT_MRT4530_21587C.1.pep
MAAAAAALLAFVAVAGALVAQATDPYVFFDWDVSFITASPLGLPQKVIAINKQFPGPVMNLTTNYNVVVNVLNSLDEPLLITWDGIQQRKNCWQDGVLGTTCPIPPGWNWTYNFQVKDQIGSFFYFPPLSLQRAAGGFGGITVNNRAVISVPFDTPDGDITLFIGDWYKKSHTDLRKMLDDGKELGMPDGVLMNGKGPYRYNDSLVPAGIEHETIKVEPGKTYRFRVHNVGISTSLNFRIQNHNLALVETEGSYTMKQNFTNLDIHVGQSYSFLITMDQNASSDYYIVASARFVNESLWTKVTGVAILQYSNSKGKASGPLPDPPNDEYDKTFSMNQARSIRMNVSTGAARPNPQGSFHYGSINVSQVYKLRNEPPVTINGKKRTTLSGISFSPPDTPMRLADLYDKKGVYTLDFPTMPIDGPPVMKTSVINSTYKNFLEIVFQNNDTKVQTYHIDGYAFWVVGMDYGEWTENSRGTYNKWDGVSRCTTQVFPGAWTAVMLSLDSPGFWNVRTENLDTWYLGQETYIRVVDPDGGYNVTEMVAPDNMLYCGLLKDKQKAQKPHGSSSSSSSAASPNRYWLAVVVSLVAAVFVQ

SEQ ID NO: 118258 - protein, 68 aa, Oryza sativa
  Clone ID: PAT_MRT4530_21588C.1.pep
MARAVASSVQRAGPWGVAFKKQIVPEPAAASLHEETEGGRVFLASRSRATRPPPIVHGEGRGSRQGGG

SEQ ID NO: 118259 - protein, 55 aa, Oryza sativa
  Clone ID: PAT_MRT4530_21589C.1.pep
KLILHPPHTRSRSLSASARHQSFPSSLPCVAAMWSTTPTPPCKHTSSILGVCTGL

SEQ ID NO: 118260 - protein, 335 aa, Oryza sativa
  Clone ID: PAT_MRT4530_2158C.1.pep
MAPTSSTEEVKHLTLHHLLKRQHRLKPAAVVWRWPTSVVPGGGAGRPPVPDEQLAADDVDGLGGTWPPRSYTCAFCRREFRSAQALGGHMNVHRRDRAKMRGHGLHGAAGQQLGAAEAPAAAAAARTEYAVALYPILNSGAGGAAVRIPHGDVLLSAPVALAAARRGHDHRCIDVGDDENDKKIDLELRLGILMTIKRRDDRQAVKQTSEAVAGTSRKRSSGRGVTTKFGYISIGDEDKNKAESKVEIDLRTEQESAGVRIGYDQDRLGPSQTGGQPIRLDIDVDLDYMRYLPLYETSSGLIPAFLTERGAPHRETAQAPLCRFGRGPWVRAAEK

SEQ ID NO: 118261 - protein, 354 aa, Oryza sativa
  unsure (1)..(354): unsure at all Xaa locations
  Clone ID: PAT_MRT4530_21590C.1.pep
CRNSARGLFGYLTVELVDIRRCAIVTLTKLIPTVQVGTHVSVLVHHLKLVLDGNNDDLRKDAAEALCCLAHALGEDFTIFVSSIHKLLVKHHMRYRKWDEIENRLLRREPLISENLSVQKYTQCPPEVISDPLDDFGGVPSEEADETQRQPRSHQVNDXRLRSAGEASQRSTREDWAEWMRHFSIALLKESPSPALRTCARLAQLQPSVGRELFAAGFASCWAQMNETSQEQLVRSLKTAFSSQNIPPEILATLLNLAEFMEHDEKPLPIDTRLLGALAEKCRAFAKALHYKEMEFEAVCSKKMGANPVTVVESLIHINNQLHQHEAAIGILTYSQQHLEVQLKESWYEKLHRW

SEQ ID NO: 118262 - protein, 71 aa, Oryza sativa
  Clone ID: PAT_MRT4530_21591C.1.pep
MGRGSLVGAACFLCFSPFVWVRWTGWHLEALQEEESVSVQRRGRVENSSREGKGRVMPCSAYVWGEGKIRC

SEQ ID NO: 118263 - protein, 122 aa, Oryza sativa
  unsure (1)..(122): unsure at all Xaa locations
  Clone ID: PAT_MRT4530_21592C.1.pep
FFXVLXXLVVASAPXALXXWGSWXFXALGALFVLGWVLPARGGGXXXGGAFVSPPPAFASLGPLSCGGGLCLASAGGAGAFSWPCGVAFXGCFCLFSSGXWGXXCGLPLRVXVVXCLRXRGS

SEQ ID NO: 118264 - protein, 129 aa, Oryza sativa
  Clone ID: PAT_MRT4530_21593C.1.pep
MARQDLSDSNTFYSKKRFLTDQPISSIQRYLPIYLRVYCIHISHDPKDKRLTSGGVMVDECGMTTIDLNNIRYSDEPFILANDVTQVFYVKDMCSKPKKGKGLDKPKCHMVLPRKKEDKTDEDYDKFDG

SEQ ID NO: 118265 - protein, 64 aa, Oryza sativa
  Clone ID: PAT_MRT4530_21594C.1.pep
AGPFGVIWTGKPVLFCVWVQWAGLLGGNQWSGRVQCIKEKWPSQKKKKKKKKKEKKKKKKKTKK

SEQ ID NO: 118266 - protein, 90 aa, Oryza sativa
  Clone ID: PAT_MRT4530_21595C.1.pep
EQWVDTSHYNHTSHLLIKRFNVKVTHAHQFHNKLITEMLISSNILMLFKIGRRMNFNSFPLCIVRTFDLLLLLNLIFEVFLYLQLYHSSP

SEQ ID NO: 118267 - protein, 415 aa, Oryza sativa
  Clone ID: PAT_MRT4530_21596C.1.pep
LPIRVSSRFQPDQTGWHARISSRFGSAQELSRSPKPPSSLPRASLVCTRWRRLLSSAAFLRRFRARHRRPPLLGLFKEDSVYPIFIPTLDSPDRIPPARFSWRVPGGSGEDYHQLFGCRHGRVLHYSRRRRLLMVWDPLTGDRRAVDIPALFHRWDMVVYHGSVRCVDGDGCYSNPFEVAVVGTDTSGTVAFICVYSSKTGNWGNVVSAPISPGDYMSFSSILDGDFLYWLLGNHGCPILQFNLVKQTATLVNAPPDLRTNSYGGFHIAPAEDGGGLVILAVTHFSLNVWKGKTNRDGIAGWVLEKTIELDRLLSFGTGPETWAPVILCFAEEHDVVFLSTHVGFFMVNMQSMQFKNIPQILKGGLYYPFSSFYTKEAAELLPPCDMSKKPKVPFAGALPDIEEYGSNIGEISCY

SEQ ID NO: 118268 - protein, 182 aa, Oryza sativa
  Clone ID: PAT_MRT4530_21597C.1.pep
YFLHLRPTAERPNRCQGRRVSRAARRGGGNPLPTPISTASALPTPSAVIITPSPPSSTTVLVATPTSPPASPATMATCSRMHTSSSSSQSPLSSHHRPSPSSATSSTPPPSSPSSISTPSRTMLSTLSPSFSALSNLLVVLEPRLRRPTRHPPTSTASSPWAAARRAVPSPWVEKIGPPTWR

SEQ ID NO: 118269 - protein, 310 aa, Oryza sativa
  Clone ID: PAT_MRT4530_21598C.1.pep
MDAEMAMGESFAYYWETQRYLESEELDSMYLPTQDDSNYESSSPDGSHSSSAPAPAAVGGDAAAAVAGSGGGMTTMMMGGGGGGGDDAGGANKNILMERDRRRKLNEKLYALRSVVPNITKMDKASIIKDAIEYIQRLQAEEQQMLREVAALESAAAASAAPAAANPFAGLGADEEHEYGHHHPSSSSERTKKVKRALSVSSISDALLAAAAPAPPVEIQELRVSEVGDRVLVVSVTCSKRRDAMARVCRALEELRLRVITANITSVAGCLMHTLFVEVDHMDSVQMKQMVEAALSQLVATGSPLSSMSY

SEQ ID NO: 118270 - protein, 58 aa, Oryza sativa
  unsure (1)..(58): unsure at all Xaa locations
  Clone ID: PAT_MRT4530_21599C.1.pep
IPPQHTIDQTQQQPIQXTPPRQQVVQPVQSTLPIQQVVQPVQQTPPRRQVLQPIQQTP

SEQ ID NO: 118271 - protein, 55 aa, Oryza sativa
  Clone ID: PAT_MRT4530_2159C.1.pep
ARGESIDLTGPNPPPSPSPTCRAYTCSVPRSPSTRSETQRRRRRAAGAAHHCARS

SEQ ID NO: 118272 - protein, 46 aa, Oryza sativa
  Clone ID: PAT_MRT4530_215C.1.pep
NGRAPTCFFEKNILNYLREHGKQVNQVYSIEILSVVILHAWHVTVP

SEQ ID NO: 118273 - protein, 100 aa, Oryza sativa
  unsure (1)..(100): unsure at all Xaa locations
  Clone ID: PAT_MRT4530_21600C.1.pep
PRNGPFWGARVAGAIVQRXNLFGAVPLPTWQTXNGGEGWGGGRRPPCCRPPPWGGASHSGALPXSHLSIALPRRQGDGAREAGAVQLHDDASHSDVPKRI

SEQ ID NO: 118274 - protein, 135 aa, Oryza sativa
  unsure (1)..(135): unsure at all Xaa locations
  Clone ID: PAT_MRT4530_21601C.1.pep
LLSKVHHRSLNFXRCVIPVPKLANRPFKSSNLFDCVIPIPKLTGHSFRSSNLFSYVTLVPKLGFKYHLGQIGRDRGDTTEQVGGPKRVICKFRDXDDTVEQTIQMCLHKTTLKKSSILGKEKIVPWGTEIKTPTP

SEQ ID NO: 118275 - protein, 175 aa, Oryza sativa
  Clone ID: PAT_MRT4530_21602C.1.pep
MGPRMRLCECDDAVGRKMWTKREEFGRCGRPWGAMWRSSRRYCYRERLEHVSEEELDVRHCSLGCEWWQQPAKGGGWGMREAAGLEGGNRDGDRLGKAGLDVKVAPRTQGWSKATWRGVTPTVAMPPQMRQAELALLLASRASMSLEPRAIVACRTTKHHPSPTPRRKRRRPNFC

SEQ ID NO: 118276 - protein, 142 aa, Oryza sativa
  unsure (1)..(142): unsure at all Xaa locations
  Clone ID: PAT_MRT4530_21603C.1.pep
NSLFQLYXXTRRPRKTLNLRLPPRPIDLWMASLASSKGRVIATSFVGRVLTGKAASPRRFVSASTYDKNVEEHVLPAVVPDHXICNDXSPXKYFCPHPTTGMILPXAVDAKAAAAVGATKADANGGAFVLDQKVLVPPPQDV

SEQ ID NO: 118277 - protein, 411 aa, Oryza sativa
  unsure (1)..(411): unsure at all Xaa locations
  Clone ID: PAT_MRT4530_21604C.1.pep
ARGFSSSTDAVVIVGAGIAGLAVALGLHRWETEGXGVKCTVLESSPELRASGFAIATWRNALQALDALGVGDKIRKCHLHLQELHVFSSFTGEMAHATSLNEQGKRCRGPNEMLCVRRDWLLRALEEELPEGTIRYSSKIVEIEEDGDAKILHLADGAILRAKVVIGCDGVNSVVAKWLGLAKPSYSGRLATRGLACYPGGHGFDPKFKMFFGHGFRLGVIPCNDTDVYWFFTWSPSEHDDDALAKNKKFMSLXHVEQAGVPRRMEVIERSDAKHVLTAPLRFRPPLSLLLASIRKGNVCVAGDALHPMTPDLGQGGCAALEDGVVLARCLGDAILGGGGGGAESERIEAGLREYARIRRWRSAELIGTAYVVGFMQESSNAVISFLRDNWLARALVRKLLKMADYYCGKL

SEQ ID NO: 118278 - protein, 265 aa, Oryza sativa
  Clone ID: PAT_MRT4530_21605C.1.pep
MLACASLARFSRLARPLCAAGSAPRFLQGSVNQNSIHSLVMKGAQGASNNSAKHKKRKSAVQRWRPISTEAAAPKADLNEMSGPVSKQVEENSASDGTTNVVIEVSTYNASLPENKLATEDTMEDASFNKDIDRSNLSEKCSSSVQVDAPLMRFVKGKGGTMQKQIEDETGVKIIFPSSKEETCVVLEAKTTEDIRKASEKIAKVLEEAVKSPILDYSHFISLPLAIHPSLVEKLNHFQCSILGTSSNVDSDKGEDLSEGLWMKP

SEQ ID NO: 118279 - protein, 397 aa, Oryza sativa
  Clone ID: PAT_MRT4530_21606C.1.pep
MAPTVLQQKEAGEEDVVVVVVGAGIAGLAVALGLHRKGVKCRVLESSPELRASGFAIATWRNALQALDALGVGDKIRKCHLHLQELQVFSSSTGEMSHTTSLNVQGKRGPNEMLCVRRDWLLRALEEELPNGTIRYSSKIVEIEEDGDAKILHLADGAILRAKVLIGCDGVNSVVAKWLGLPKPSYSGRLATRGLACYPGGHGFDPKFKMFFGHGFRLGCRLSLAFGALPHHHRAIVAPSPLDPPASARAPHSFPVASTRLSLSFATHPLLNPPALVLALTPGPSCHRSSSSLSRRALPLPLLARRYRCSVRVQLSSSLPFFMRNHRSLPLHTGDAGTTVPSLYVRGLGGSGGEQVVVAAVGGGPRVTGAGATQGCASPSFFAVAVGSSWPRGGGTK

SEQ ID NO: 118280 - protein, 749 aa, Oryza sativa
  unsure (1)..(749): unsure at all Xaa locations
  Clone ID: PAT_MRT4530_21607C.1.pep
MSAPTPRVSRSPRHQSRSPPLRRGRRRPGDAWHLGPVRRVVKEVGGSANYSILTKTNYSDWSLLMRAMLQVRGLWEAVDTGDVNFQEDRMALEAVLKVVPADLLPVLSVKETAKDAWDAIKTMRVGVDRVRKSKAQELRKQFNAIEFKEGESVEEFSVRLSGLVNNLAVLGIQLEESKKLTGRLRNAEERRPKKKSGDEGDKLYITEEQWAARAKERQSGEGSSRKKAGNNRRHRDGRKKTEGTADGERGARYTRDQGRDKCKNCGRLGHWAKDCCQPKKQVAAHVAQGEEEDDELALLMAHAVELAPPPPSLPPSTEPLNLVEPKVFTHLHCDVDAGVWHLDTGATNHMTGVHDIFSELDTVVRGKVCFGDGSVVAIEGQGKIIFECRNSEHRALIGVYYIPKLNANLVSLRQLDENGCDICIFHGVCTIRDAARQLLARVRCTRIRLYLIKITVARPVCLSARTQEAAWLWHARFGHLHFDALRRLTQQDMVRGLPQIDQVEQLCDCCVISKQRRSPFPGQSLFREEDRLELIHGDLCGPISPATPGGKKHFLLLVDDASCYMWLTLLQNKGEAAAAIKHFQARSEAESGCHLKLLHPDNGGEFTSAEFASYCTESGVKRQLTPPYSPQQNGVVERRNQTILAMAQCLLRAKSVPACYWGEAVMTVVFLLNHAPTKCLVDKTPYEAWLGRKPAVGHLRTFGCLVYXKDVQPHITKLQERGKPMVFLGYVEGTKAYKVFDPKSGRVQV

SEQ ID NO: 118281 - protein, 2166 aa, Oryza sativa
  Clone ID: PAT_MRT4530_21608C.1.pep
MSAAQGMAYKLRTDAAPTGAGRRARRSHSSVAAPYRAARLVQGGVSIEGGLVGGCQLTEERVAARPPRAAARDAEPVRPLSTLPESSIGLYDPSRERDSCGVGFVAELSGDYKRATVNDALEMLERMAHRGACGCEKNTGDGAGILVALPHNFFREVTKDAGFELPQPGEYAVGMVFLPIDEKRRERSKAEFQKVAESLGHVILGWRRVPTDNSDLGESALQTEPVIEQVFLTKSSSSEADFEQQLYILRRLSILSIRAALNLRRGGKRDFYMCSLSSRTIVYKGQLKPCQLKGYYYADLGHENFTSYMALVHSRFSTNTFPSWDRAQPMRVLGHNGEINTLKGNKNWMKAREGLLECEKLGLTKDQFSKILPIVDATSSDSGAFDGVLELLIRGGRSLPEAVMMMIPEAWQNDVNMEPEKKALYEFLSALMEPWDGPALISFTDGRYLGATLDRNGLRPGRFYVTHSGRVVMGSEVGVVDVPSKDVLRKGRLNPGMMLLVDFENHTVVDDEALKAQYSKAHPYGEWLKRQKIYLKDIVESVPETERVAPGISGSLTQKNEKKEHAGVNGIVTPLKAFGYTVEALEMLLLPMAKDGVEALGSMGNDTPLAVMSNREKLTFEYFKQMFAQVTNPPIDPIREKIVTSMECMIGPEGDLLETTEKQCNRLALEGPLVSIDEMEAIKKMNYRGWRSKVLDITYPKKSGRKGLEETLDRICTEARGAIKKGYTVLVLSDRGFSSDRVAVSSLLAVGAVHQHLVANLERTRVGLVESAEPREVHHFCTLVGFGADAVCPYLAIEAIWCLQNDGKIPPNGDGKPYSKEELVKKYFYASNYGMMKVLAKMGISTLASYKGAQIFEALGLSSEVIRKCFDGTPSRIEGATFEMLARDALRLHELAFPSRAPPPGSADAKALPNPGDYHWRKNGEVHLNDPLAMAKLQEAARVNSRAAYKEYSRRIQELNKTCNLRGMLKFKDTADMISVDEVEPASEIVKRFVTGAMSYGSISLEAHTALAMAMNKLGGKSNTGEGGEQPSRMEPLANGSMNPKRSAIKQVASGRFGVSSYYLTNADELQIKMAQGAKPGEGGELPGHKVIGDIAVTRHSTAGVGLISPPPHHDIYSIEDLAQLIHDLKNSNPRARISVKLVSEAGVGVVASGVVKGHADHVLISGHDGGTGASRWTGIKNAGLPWELGLAETHQTLVANGLRGRAILQTDGQLKTGKDVAVACLLGAEEFGFSTAPLITLGCIMMRKCHTNTCPVGIATQDPVLREKFAGEPEHVINFFFMLAEELREIMSQLGFRTITEMVGRSDMLEVDPEVVKSNEKLENIDLSLILKPAAEIRPGAAQYCVEKQDHGLDMALDNKLIALSKAALEKEVRVFIETPIQNTNRAVGTMLSHEVTKRYHMKGLPAGTIHVKLTGSAGQSLGAFLCPGITLELEGDSNDYVGKGLSGGKIVVYPPRDSTFIPEDNIVIGNVALYGATIGEAYFNGMAAERFCVRNSGAQAVVEGIGDHGCEYMTGGTVVILGKTGRNFAAGMSGGIAYVYDIDGKFSVRCNHELVDLYHVEEEEDITTLKMMIEQHRLNTGSVVARDILSNFDTLLPKFVKVFPRDYKRVLDNMKAEKAAAKLAKEPKISNGVSVTTKKVQPEQSTNRPTRVSNAKKYRGFISYERESISYRDPNERVKDWKEVAIESVPGPLLNTQSARCMDCGTPFCHQESSGAGCPLGNKIPEFNELVHQNRWREALDRLLETNNFPEFTGRVCPAPCEGSCVLGIIENPVSIKSIECAIIDKGFEEGWMVPRPPLQRTGKKVAIIGSGPAGLAAADQLNKMGHFVTVFERADRIGGLMMYGVPNMKTDKIEIVQRRVNLMAEEGITFVVNANVGSDPLYSIERLRSENDAVILACGATKPRDLGIPGRELSGVHFAMEFLHANTKSLLDSNLEDGRYISAKGKKVVVIGGGDTGTDCIGTSIRHGCTSIVNLELLTKPPSKRAADNPWPQWPRIFRVDYGHQEASSKFGNDPRTYEVLTKRFIGDENGNVKALEVVRVKWEKVDGRFQFKEIEGSNETIEADLVLLAMGFLGPEATIAEKLGLEKDNRSNFKAQFGNFATSVDGIFAAGDCRRGQSLVVWAITEGRQAAAAVDKYLSRNEQDAAEDITPSGAGFVQPVAA

SEQ ID NO: 118282 - protein, 133 aa, Oryza sativa
  Clone ID: PAT_MRT4530_21609C.1.pep
SPFWTLPAPRFVYFSQGRAPVQVVTPNGKPVFTGEFFWGPLLFVPPPFVVVKKAQKKGWVSFAFKPTPYFLVTPLAGKGSFFRVFPTVVLAKAFRFSKKRAPGLQPTQGDGLGAFPPPQTKGSPGVFNGGESF

SEQ ID NO: 118283 - protein, 107 aa, Oryza sativa
  Clone ID: PAT_MRT4530_2160C.1.pep
GFFLGVRVVLTGSVIGFGISSMFGLVVVLLPGSLLCVSLCSSCFHVGFFLHSFVCGSCSGCFFVLSICFSCFVLVVFFVLFVFVGGICLGVWPCIFLKRLPKKKKKK

SEQ ID NO: 118284 - protein, 687 aa, Oryza sativa
  unsure (1)..(687): unsure at all Xaa locations
  Clone ID: PAT_MRT4530_21610C.1.pep
MPTLVPFKRRLSSPPGRAAAAASSGPCGGALEDGGAARIWKTAVAGRRLCGGAGKTAVRRRPRPPMSDEDGSSGRVVATWSGNGALRLPRRRGRELPGGSLRLSLAAQLRAPRRRRVPSDASFTRAISRLALDVFPRNIQFDQVIKVSPINPEEKRVGGGSSFVMRLEAQLVAAVAQELGLLDQEYHRLKQRMEETNYFSWGVSGDNEMREYLFWEMAPRINATLDSKRYLLVVENLYKPITTSAFTTELRLPPANAWSGSEWVVSATSREVCSKSKSEGDDVYESFSGADIMVLILFALHQSAKDISKAVGQEDDVEHWHRVALRKLEHVELRDLDALEELDLSATAIKELPAEIPNLPQLRRLLLMEDSRLFYSFNINTRRLVEYGEFFQDFYVQIAQCKTNIRRLEDEQDMMADKLTELANKKSPYGDVYRRYMAKEFSVVAIAPPIRQTKRHVEMSATNRYPHGLYSLLQVAKSISLIDDIYVSCLTKLSSFDKLEDCKLRSCHHMKHVLEYAYSMGQSLQNVRVSQLQSLIHFYKPLEYNDTSNFDSLKHLHLEYCPRLERIVPRESALPSLTTLDILFCYNLKTIFYQHPCEQPINYQLPILQRMRXQELPLLQHLRDDVNAAISAPAWKELHVRGCWSLRRLPLLRQEHSSQAVEXSYKSKLPLPFASFNERATVMSYLR

SEQ ID NO: 118285 - protein, 110 aa, Oryza sativa
  unsure (1)..(110): unsure at all Xaa locations
  Clone ID: PAT_MRT4530_21611C.1.pep
PTRPTLTMVVLCTPDAAGXDLVKPVTGAGRVLFPRVARDGFVAHRASGPETPSDMSDKMSESTHKAKEAYSEDTASGHXPVTWHHVYELSEVSSHTRDKMKETCDPIEDY

SEQ ID NO: 118286 - protein, 256 aa, Oryza sativa
  Clone ID: PAT_MRT4530_21612C.1.pep
MNSGEPPASSSLGNAGEEEEEDDFYWDAEAEAELQAIEAAYAAAKRRRLPDWPSPNPVTASASASASGGCSPAPPWAPSPPAFRGNVKARYQPVMFNGSIVYCRTPSKVEKATRDILCKIETMKASGQVSLGFDLEWRPFPRRVQVGICIDNDARKMFNDYDVHVQPLMDLSNLANAKLGFPPKRWSLASLTEMVTCRELPKPSNIRMGNWEAYVLSKQQLQYAATDAYISWHLYEVLQSLPDNNVEVEKETITAA

SEQ ID NO: 118287 - protein, 78 aa, Oryza sativa
  Clone ID: PAT_MRT4530_21613C.1.pep
MQQLASINQNILINQSEDGSVTGHRGEGGSVAADLGQGADDDGSGGSGLLASGVWIRHRDRGDDSGGPWAGQSRRRRD

SEQ ID NO: 118288 - protein, 191 aa, Oryza sativa
  Clone ID: PAT_MRT4530_21614C.1.pep
MLTAAMHMLDSSTSSSPWLPPDLMPPPPPPPPAAATLHHHFRAAAAAPGRRRIAKRRPRPSRRLPTTYISADPANFRRMVHQVTGADDLPPPPPSLSLQQTTELLLPAVHAAPAGSPGAAGALMLPTLDTSAFLLGRRAEPAAAAPPCDESVALVRGGAGNYGSNNNSISSSSSSGNCGGGFPTLDSWDLL

SEQ ID NO: 118289 - protein, 778 aa, Oryza sativa
  Clone ID: PAT_MRT4530_21615C.1.pep
MATSSLLFLLVLSSFSTASAAFTKPRQVYVVYLGEHAGAKVEEEILAGHHGLLLSVKGSEEEARASLLYSYKHSLNGFAALLSEEEATALSARTEVVSAFPSNGRWSPHTTRSWEFVGLEEGVRGPDDTGRLPPGDKAGGEDVIVGVLDSGIWPESRSFGDEGLGPVPARWKGVCQGGDSFSPSSCNRKIIGARYYVKAYEARYGAVNTTNAYRSPRDHDGHGTHTASTVAGRTVPGVAALGGFAPGTASGGAPLARVAVYKVCWPIPGPNPNIENTCFEADMLAAIDDAVGDGVDVMSVSIGSTGKPLPFAEDGIAVGALHAAMRGVVLVCSGGNSGPKPATVSNLAPWMLTVAASSIDRAFISPIKLGNGMVIMGQTVTPYQLPGNKPYPLVYAADAVVPGTPANVSNQCLPKSLAPEKVRGKIVVCLRGTGLRVEKGLEVKLAGGAAIILGNPPAFGGEVPVDAHVLPGTAVSSVDVNAIIRYINSSSSPTAVLDPSRTVVDVKPSPVMAQFSSRGPNVNEPNILKPDVTAPGLNILAAWSEASSPTKLDGDNRVVKYNIMSGTSMSCPHVSATAVLLKSAHPGWSSAAIRSAIMTTATTSNAEGGPMMDADGTVAGPIDYGSGHIRPKHALDPGLVYDASYQDYLLFACASGGAQLDHSLPCPATPPPPYQLNHPSLAIHGLNGSVTVQRTVTNVGQGSARYSVAVVEPMGVSVKVSPRSLSFARTGEKKSFRIKIEATKGRGGWRVNGQFVAGSYTWSDGVHVVRSPLVVLVA

SEQ ID NO: 118290 - protein, 73 aa, Oryza sativa
  unsure (1)..(73): unsure at all Xaa locations
  Clone ID: PAT_MRT4530_21616C.1.pep
AVLSSAGLGAMGFGLPAACGASVANPGVTVVDIDGDGSFLMNIQEXALSGIENLPXKVCVNNQHLVWLCAMED

SEQ ID NO: 118291 - protein, 407 aa, Oryza sativa
  Clone ID: PAT_MRT4530_21617C.1.pep
MARNVAQADASLKAGKWQRNKYVGVSLVGKTLAIMGFGKVGSEVARRAKGLGMDIISHDPYAPVDRARAIGVDLVSFDEAISTADFISLHMPLTPSTAKLFDDETFANMKKGMSQAALDVFTEEPPPKDSKLVHHEHVTVTPHLGASTSEAQEGVALEIAEAVLGALKGELAATAVNAPMVPAEVLSELSPYVILAEKLGRLVVQLVAGGSGIKGVKIGYSSSRDPDDLDTRVLRAMVTKGIIEPISSAFVNIVNADYVAKQRGLRISEERILLDGSPEIPIDSIQVHLANVESKFAGALSDEGDIRVEGEVKDGKPHLTLVGPFSVDVSLEGNLILCRQVDQPGIIGKVGSILGKMNVNVNFMSVGRTAPGKQAIMAIGVDEEPEKEALKLIGDIPSVEEFVFIKL

SEQ ID NO: 118292 - protein, 186 aa, Oryza sativa
  Clone ID: PAT_MRT4530_21618C.1.pep
MAAAAALTVLPRAAGVLRLSQHGRSASRLLCAAAGDGEASPAPRAGRLVLYTKPGCCLCDGLKEKLQAAFLLAGTPYSLASLELQASRLDHVRGSCALSPLGGFILRSWGLCFDQERDITTNPDWEQMYQYEIPVLAKVLPDGSEEKLPRLSPRLSVELVQKKVFSAFDHFESAAMRMPMDNGWHM

SEQ ID NO: 118293 - protein, 70 aa, Oryza sativa
  Clone ID: PAT_MRT4530_21619C.1.pep
KVEGALNNLARGFLFFTPGVTFPKFLEFSKNYFAFGDKEMPIWEKNFSIFKRPPYSLTIVKMDLPLVINC

SEQ ID NO: 118294 - protein, 252 aa, Oryza sativa
  Clone ID: PAT_MRT4530_2161C.1.pep
FLCSTTGEASPQMSTYSSSSSSASATYLRGNGDSILTPVASASSSREGNVVAVEATPPRSASATYLRGSGDSILVPPASAMASSAKPGGRDGDVVVAVAETTRPRPRASARSASATCSRGSGESRSTPVAPTSSLYPAGRRGDNAGGATVEAPPRASARSASASAMYLRCSGESSFAPVAPTSSLRSTSGKRGDIGAVANGEAPPQMSTSSSSSTPILPSAAWCCRGGGGGGDGESDAERAASRVLPSGAIS

SEQ ID NO: 118295 - protein, 140 aa, Oryza sativa
  Clone ID: PAT_MRT4530_21620C.1.pep
MAAAAALTVLPRAAGVLRLSQHGRSASRLLCAAAGDGEASPAPRAGRLVLYTKPGCCLCDGLKEKLQAAFLLAGTPYSLASLELQERDITTNPDWEQMYQYEIPVLAKVLPDGSEEKLPRLSPRLSVELVQKKVFSAFDQ

SEQ ID NO: 118296 - protein, 52 aa, Oryza sativa
  Clone ID: PAT_MRT4530_21621C.1.pep
IIYNHIWQRFYITNTSPNNIYTNHNTTFTLTQKNTNSYKNQLISSPIKQIHN

SEQ ID NO: 118297 - protein, 477 aa, Oryza sativa
  Clone ID: PAT_MRT4530_21622C.1.pep
MEKPAASVEEPLLVGAGEKKGESAAAAELKRLLRLAGPLVASGVLRNVVQMVSVMFVGHLGELPLAGASLATSLANVTGFSLLFGMASALDTLCGQAYGARQHHLLGVYKQRAMLVLAVAAVPIALVWASAGEILLLFGQDPAIAAEAGAYARWLIPSLVPFVPLVCHIRFLQAQSAVLPVMASCGVTAASHVAVCWALVRKAGMGSRGAALANAVSYGVNLTIMSLYVRLSRSCEKTWTGFSMEAFRELRQYAELAIPAAMMVCLEWWSFEFLVMLSGLLPNPKLETSVLSICLNTGALLVMVPIGLSTAISTRVWNELGAGNPQAAKLATRVVICMAMTEGSVVAFTMILLRNSWGHMYSDEAEVVTYIARMIPVLAISFFIDGMHSALSGVLTGCGKQKIGARVNLGAFYLAGIPMAVFLAFVLHLNGMGLWLGIVCGSLSKLILLFWITMSINWEKESTRAKELVFSSSLPVA

SEQ ID NO: 118298 - protein, 42 aa, Oryza sativa
  Clone ID: PAT_MRT4530_21623C.1.pep
SLYLEHNILSIYWIYILTTSIYKTLGAQGNVQSRKSMSEQIP

SEQ ID NO: 118299 - protein, 406 aa, Oryza sativa
  unsure (1)..(406): unsure at all Xaa locations
  Clone ID: PAT_MRT4530_21624C.1.pep
GGGKKPFFFRGKTPGGGKKKKPRGXPPPGGPPPPKKKKKTPPPXFXGFFFPGGXXPPPPKNFXKKKRGGPLFFLGEKKKKXPPKKKGGGGGGGFXGXKKKKKKPPPXKNFGGFKKXPKXGGPGGPXKGGPPKKKGVFGAPGGKKNPRGGXFGXPQKGAPGXKFXPQKXGPXPKTPPXPGGXGGPXFFSRGPPKFWGPQNPXKKXXGXXWGKRXPQXFXQKPQNXPPPFXFFGEKGGAXPFWGGPPPKRGLGEIXKKPPPFFXXXFGGKKFGAPKFXPLGKKXGFPQXKKXGGGKXRGXGFPPPKPFXAXPFWVWGNXKKTLFXXFPPPXXKKXPGPXKRKKGGEKKFSPKKPFFRPFPKGGGGKGFTNGKNFFYGKKPPQIGAKVKTAPFFFPGKKGGAQKAPGKK

SEQ ID NO: 118300 - protein, 201 aa, Oryza sativa
  Clone ID: PAT_MRT4530_21625C.1.pep
MAARFFLSLSSPLPQPSLRQLPQQPAAGTSNGDTQRRRGQRRRGRGQRRERRGSGVGGGNGKARGQWQQRRGGGVGSGNGEARGRRRQRRGPGTATTMLEDGSIHTQRGSPPLPPRSGQRGGEEGEVAAAAPGGGGRRWRRRRPPPPTAAAPLRSSPNPRSARAYLCADDELGYRVGVKEKIGVKPGEMFLDLESEAGRGP

SEQ ID NO: 118301 - protein, 85 aa, Oryza sativa
  Clone ID: PAT_MRT4530_21626C.1.pep
HFYILNKLYVLPFEVLSSSLYHHIKVRSCKSLFCFFIMLIVRHSRRTEEPRYFQLVKLISATNVNHRSICCLSNIKHPSVFSFLP

SEQ ID NO: 118302 - protein, 55 aa, Oryza sativa
  Clone ID: PAT_MRT4530_21627C.1.pep
SKRFDALEERVIRLQRSTLVRSELRRHIYIAVKKMYKNRHLAPIAANTRIRSPAA

SEQ ID NO: 118303 - protein, 192 aa, Oryza sativa
  Clone ID: PAT_MRT4530_21628C.1.pep
MATLTMQPIGPLPSTKQEGTSRGEKPAEGGADLSDIDSGWVVLGKSDIVPADLAAQSLRSSPKTIPTWARWVIGGVLHTVVPFYERARYVEDETARNVETAAEVVEQIAEVTEKLASNVADHLPENGCLQKVVEKIEYIAEVVDEDAEKVEAITEKIENFSDKIDAKVEPIFTEIEKEFEDSTSNDGVNANI

SEQ ID NO: 118304 - protein, 224 aa, Oryza sativa
  Clone ID: PAT_MRT4530_21629C.1.pep
MASSSFLLLATLLAMASWQGMASDPSPLQDFCVADMHSPVLVNGFACLNPKDVNADHFFKAAMLDTPRKTNKVGSNVTLINVMQIPGLNTLGISIARIDYAPLGQNPPHTHPRATEILTVLEGTLYVGFVTSNPDNKFFSKVLNKGDVFVFPVGLIHFQFNPNPYKPAVAIAALSSQNPGAITIANAVFGSKPPISDDVLAKAFQVEKGTIDWLQAQFWENNHY

SEQ ID NO: 118305 - protein, 71 aa, Oryza sativa
  Clone ID: PAT_MRT4530_2162C.1.pep
MSTADNANGVDDARKIAEAGEEKADPELLLASDDDANGERREDDGKQDVAEVGPDFVIVVMVMVVVMMVSH

SEQ ID NO: 118306 - protein, 192 aa, Oryza sativa
  Clone ID: PAT_MRT4530_21630C.1.pep
MATPPLPPPPRARCVVRLKLPPAWTPEEDARLQRLAKENGFRRWSRVARSMPRRSARSCRDRWRHHLARDVYHRPFTARDDDELLRLHYRLGDRWKEIGRAVYGRTSRIMKHRWRELRRSGFPLAATARKVQALDMVESEVEESDQSLPPPELQRSLADALASSFGYCSLANEHAMDPLAGSLSLGFACMAV

SEQ ID NO: 118307 - protein, 188 aa, Oryza sativa
  Clone ID: PAT_MRT4530_21631C.1.pep
MATLTMQPIGPLPSTKQEGTRQVNSLVRFVLTEIESKNKMGETRFRRGEKPAEGGADLSDIDSGARWVIGGVLHTVVPFYERARYVEDETARNVETAAEVVEQIAEVTEKLASNVADHLPENGCLQKVVEKIEYIAEVVDEDAEKVEAITEKIENFSDKIDAKVEPIFTEIEKEFEDSTSNDGVNANI

SEQ ID NO: 118308 - protein, 158 aa, Oryza sativa
  Clone ID: PAT_MRT4530_21632C.1.pep
MEDTHDNQHTPTRSHNIQPYVSQDTPPDIDFRDRHSYSPTVYLDTVRRYESTISDLARHGFEEEDYHVVDYESDLQTDMIKSTGTLIHLKASFGPALELSRSPRPRSPSSASPGTVKEKIQKLGLTDVHEANVVLIDLEKLMNLEFLSTLKAVIGPIF

SEQ ID NO: 118309 - protein, 81 aa, Oryza sativa
  unsure (1)..(81): unsure at all Xaa locations
  Clone ID: PAT_MRT4530_21633C.1.pep
VGSRRHPFLARSDLRDGMMGTAHDSARESTDTXSESTLRSMARGLGAKERTNQKAHETKDASKEYAYYANDAASDATGRAM

SEQ ID NO: 118310 - protein, 42 aa, Oryza sativa
  Clone ID: PAT_MRT4530_21634C.1.pep
IFVFYSKTLKFFRSILIITKTKIRRQFNNLFAKGIFFHLVWG

SEQ ID NO: 118311 - protein, 114 aa, Oryza sativa
  Clone ID: PAT_MRT4530_21635C.1.pep
MRRAQLGAMRRRARLGAERLVVAHLRRDNAHVATALGLTTHTQGLLAVDAENAVLRTQAAELAARLASLNDIVSPHRLATEAAMAETNKKKKIYLPLGAIFVLGQFHVFSVSLN

SEQ ID NO: 118312 - protein, 69 aa, Oryza sativa
  unsure (1)..(69): unsure at all Xaa locations
  Clone ID: PAT_MRT4530_21636C.1.pep
GGPWLGSCACAEGGVQGFPLFCPPPFFFFFFFFFFFFFFFFFXLFFIVTCPXRVALVSFQIQTINSVKN

SEQ ID NO: 118313 - protein, 234 aa, Oryza sativa
  Clone ID: PAT_MRT4530_21637C.1.pep
MTALLRHGKPSAVPLAVDTHMYVTVGLGVSLCQPEQLLCNRSAPPVFSSSMNNASFVVPKNTSLLEAHFRREPAGVYTRDFPDTPPVVFDYTGDESDNATMQFTTKSTKVKTLRYNETVEMVLQNTRLIAKESHPMHIHGFNFFILAQGFGNYDKRRAERRFNLVDPQERNTIAVPTGGWAVIRFVADNPGMWYMHCHFDAHISLGLAMVLEVLDGPTPETSVPPPPADLPRCS

SEQ ID NO: 118314 - protein, 115 aa, Oryza sativa
  Clone ID: PAT_MRT4530_21638C.1.pep
MDLEGRANDGPPWPTSQEGAPHRGAAQTSSEWWTPRRPTNRAGGGHMASGAVAPARPRRSNVRRGRRIDHTRMGGDAGNATEGDGESSICLAKAAAYGTPPRSQIRTRLEQEKCG

SEQ ID NO: 118315 - protein, 125 aa, Oryza sativa
  Clone ID: PAT_MRT4530_21639C.1.pep
MVGVDPNALSMSPARGEGTSAMICRSSARFAVAPCRSCRMLQRQLVGGGDDAHVRQLVGTTTTTRWLDGRGDYDMKRCPEVVAAIGIADRCAGGLHMQAHLNTSCRVETIGKEAAGRRLERGSQR

SEQ ID NO: 118316 - protein, 55 aa, Oryza sativa
  Clone ID: PAT_MRT4530_2163C.1.pep
LVSALSIQACRGLNQLILYHHCAEYRRTSRDLLIRVQYESLQNAIMARRSSHSQR

SEQ ID NO: 118317 - protein, 52 aa, Oryza sativa
  Clone ID: PAT_MRT4530_21640C.1.pep
MTSLSSTRRCRPPPARHASHLHGCISEATAAGGGHEVIGDLVWSGSAAEGEQ

SEQ ID NO: 118318 - protein, 405 aa, Oryza sativa
  Clone ID: PAT_MRT4530_21641C.1.pep
MPPSMAVAAAAAAPRSLLFPVSPSPSQPRRVPALARAGRSQRRHAALARPARRHLDDAMSAGFVRSLNAPPDEDGARSGGRYDPRPGDFAVGVVVSGTEARLDVAVGADRLATLLAKELLPLYRADLPAFAEAAPPRPGSVGAVASPAAGEGDRKPGERGGGRTLVPPGTVVFAEVLGRTLSGRPLLSARRLFRRLAWHRARQGLRAFLPKFELMDRINTFTDLKNKVGCSIRVCITRLDEETNDLIISEKKAWEMTYLKEGTLLQGIVHKIFPYGAQVRIAGTNRSGLLHISNISRGRVLSVSDILKIDEEFTEYSVTLSISDLESTPGLFLSEKARVFSEAEEMAERYREQLPADSKNAKLDADLPGGTIPFDDEATLYANWKWFKFLEDGKLGAVTTEHNGS

SEQ ID NO: 118319 - protein, 121 aa, Oryza sativa
  unsure (1)..(121): unsure at all Xaa locations
  Clone ID: PAT_MRT4530_21642C.1.pep
GGGGGQNRETRGKPTEGRGQKTDGGERTNAQNKQDNAHGGGGGHEKNAKRAENXXGDQAXPAAQTGAAPPGRSPGPPEASXPXRGPTRAAPARAATPRAAPKQGPSPSTAATPPSAPPPPP

SEQ ID NO: 118320 - protein, 164 aa, Oryza sativa
  Clone ID: PAT_MRT4530_21643C.1.pep
MSLVAYDASSDEEDAGGEPPAAAAASPAPVPSSFGPRPRPPSPSTSVGAAPQPPPHSQNISSTSSSNISLPTPSLDLPDVADLFSSPSLPSRGSTSMMDSTSRKRESNGSAFQDPRSKFPRVQSGQSRGARIAAGNTLVPPQLSGRSNVVTEDMTKLFVARRKE

SEQ ID NO: 118321 - protein, 151 aa, Oryza sativa
  unsure (1)..(151): unsure at all Xaa locations
  Clone ID: PAT_MRT4530_21644C.1.pep
TALGVEHVLVELFVECVQGDHVLGHRWVVAAGGGRHGPVGRTRRGGAGSSSGGPAAGTWRRPGESPPTPRRRTAPAGTPASRRRPPRPSGGGSIGRAPPPVVPRRSPSAPPAXREPDXARCTPPPPPPPRRSPTPRRRLPPPPRCCCRARP

SEQ ID NO: 118322 - protein, 888 aa, Oryza sativa
  Clone ID: PAT_MRT4530_21645C.1.pep
MSLVAYDASSDEEDAGGEPPAAAAASPAPVPSSFGPRPRPPSPSTSVGAAPQPPPHSQNISSTSSSNISLPTPSLDLPDVADLFSSPSLPSRGSTSMMDSTSRKRESNGSAFQDPRSKFPRVQSGQSRGARIAAGNTLVPPQLSGRSSWRINGEAKELNPRALQRLVHLSKTKGGIPFSGRDFCWLFLFQTIGWNFPRGSRDTQKYYSMHMMTSASGCAKLDYLSSQEPGDESQINAIDIVDRLLVEDDIETYQQISIDQTTRAKSASTLGSDIAQCLAKRARCSSPLKKAGNFDWVDTPTVDDCRTSIISMENTVDRANNQVKHGGCGSSTRAWPILECIDEDLGTNCLKKTEPFCGTDDLYQEYDIGPNTQMAAEAMEALFNASTVSYDVKENERPEDSVVKNMTKGTKVDKTCAVHSPIQKRKVNFLRHRSGVATEYKQIKVDDTVRENGESSVSHTNTSQTRKYTKQMAGKAKRNISSGITQRDIDHEVSEVITRSGTNDSNIPLSLDTDALIHPKRRRTYIFTSGSSKIEFIEAIKPTALRAKTTEVKQLSTANTVSVSDQDTTSGLRMSQHSSFADHEASAGSSYFNPLAETFTVGLEKQSIPEKKGHDSSLMPSVPLRELNGAGPQARTRTSETPKRVLKSPGSRELANLFRNEVSPVLQSSRRRRKHMSTVRVLLSQSMGNETLNDQTKILIHFGLSVATTISEATHFVAEKFARTRNMLEAIATGIPVVTPAWLECCREARSFIDEKRYILRDIKKEKELGFSMPVSLSRACKKPLLEGRRVLITPNAKPSKELLKSLVVTAHGKVLERNAMSKMKNRSLMGAFVISCEQDYKICVPFIKNGFEVFESELVLNGIVTQKLEFERYALSRQIVALSFPME

SEQ ID NO: 118323 - protein, 63 aa, Oryza sativa
  Clone ID: PAT_MRT4530_21646C.1.pep
TRGLGLYRGHAFFFFFFGRTAAIMNDSITGRAQIEDVLKKVESNRARMEERGLECTADTERKG

SEQ ID NO: 118324 - protein, 107 aa, Oryza sativa
  Clone ID: PAT_MRT4530_21647C.1.pep
MEHGRRGEEPGRETGWEVVDAPAADTCRSGYPVWAGPFFWAVSTNRRLTSDILQESGIPVPRIQFLCTQQLASKRTNLFSENRSTRRDPFKNTPSDSKYSNDETYRL

SEQ ID NO: 118325 - protein, 115 aa, Oryza sativa
  Clone ID: PAT_MRT4530_21648C.1.pep
QGNPVATGKLPPGFEPPTAGPGRLSSGRCPHRVTPRLQPQRSGRQVDRLVAPQEAGSMGRKATMHTALTLRLHRLHMCNGDATQLGNHKLQQQHSTAQHLCTARTALQGGGLLAR

SEQ ID NO: 118326 - protein, 140 aa, Oryza sativa
  Clone ID: PAT_MRT4530_21649C.1.pep
CPTSHVAVKFSELVAKTELSSGKALEKEAKFCKNGELGMVKEDSSRTPKVVETFCECRPLGRYAARYIRQTVAVGVGKNAEKKAPTGPQVAKAPPKKKRASFKRWFASFQLRDLVIVCVKFCPRPALSFHGPIRSASNVP

SEQ ID NO: 118327 - protein, 88 aa, Oryza sativa
  unsure (1)..(88): unsure at all Xaa locations
  Clone ID: PAT_MRT4530_2164C.1.pep
WPEFLAGFMEDTVVFVAPVFSSLFLFMPATTPSXLVLLPSFGHLQTRPWSVSVVEEKCSSVFGVQFVCSQGSXVSPVLQVSCVRVNLS

SEQ ID NO: 118328 - protein, 139 aa, Oryza sativa
  unsure (1)..(139): unsure at all Xaa locations
  Clone ID: PAT_MRT4530_21650C.1.pep
LPPTLPSFLRSSQFFRSSESEEQQIARNPAAANPPLPRLASPLIQAPAPADPPHRAPRVSTAHPSAPGGRRGATAARFGACMXPPKRNMRISYSRDFMISVGETDRCKKLPQGFDASLLSDLQEMSAGVLDRNKGYYTT

SEQ ID NO: 118329 - protein, 115 aa, Oryza sativa
  Clone ID: PAT_MRT4530_21651C.1.pep
LEMEISQYTIIERDGIVIACAALIHYPAEKMAEMACVAVHPDYRDSARGDILLEAIKRRAYKLNIEKLFVLTTQTIQWFQERGFVQIQPTDLPVEKQRHYNYQRMSKVLMLALDN

SEQ ID NO: 118330 - protein, 78 aa, Oryza sativa
  unsure (1)..(78): unsure at all Xaa locations
  Clone ID: PAT_MRT4530_21652C.1.pep
MAATIVSXKARXIFDSRGNPTVEVDVCCSXGTFARAAVPSGASTGVYXALELRDGGSNYFGKGVSKAVXNXNPVXCPS

SEQ ID NO: 118331 - protein, 234 aa, Oryza sativa
  Clone ID: PAT_MRT4530_21653C.1.pep
MRQEGADVRGSHKIKKTTADVEGGGEWINALPEEVLQHVMSFLPAKQAVRTCVLARRWRHLWKSMPALRSIHARIMKVELHEHNDNFFSSQAASYLPALDELPSMEALWMKFCYIDGEKISSQSLKELTMIDCIFFRQFRISAPSLVRLEITDCVGKAPVLEIMPSLVKAFIRFRDSRDICGKEEFGGSCTNASCDNCGANGVDSGDCVLLKGISMAKSLELVAEPGAYMYSVN

SEQ ID NO: 118332 - protein, 41 aa, Oryza sativa
  Clone ID: PAT_MRT4530_21654C.1.pep
MGTFNPGFAVPWIMHDWGDDECVKILKNCKKAIPSRDAGGK

SEQ ID NO: 118333 - protein, 50 aa, Oryza sativa
  Clone ID: PAT_MRT4530_21655C.1.pep
EVFDFLVDIVPRDDAKDADAAAAAAAAGIHGPAHGVAATDPLAYYYVPQQ

SEQ ID NO: 118334 - protein, 320 aa, Oryza sativa
  Clone ID: PAT_MRT4530_21656C.1.pep
MDSSSAEILIDLGGFRLYKDGHADRAGGMESVPAGYDDETGVTSKDVVIDAVTGVSARLYLPPCIQPATDDDGKKLPILLFFHAGYFVVGSASWPPVHRYTNSVVASARVVAVAVNYRLAPEHLLPTAYDDSWAALSWAVSGADPWLSAHGDTGRVFLSGASAGGNIAHNMTIAVGVRGLDAVVPAPRIEGTILLHPSFCGETRMEVEPEEFWGGVKKRWAVIFPGANGGLDDPRMNPMAAGAPSLTKLACERMLVCSAGFDPRRTRDRAYYDAVKASGWGREVDWFESEGEGHHFFVDKPGSHEASKLMERVAAFIAGH

SEQ ID NO: 118335 - protein, 82 aa, Oryza sativa
  Clone ID: PAT_MRT4530_21657C.1.pep
MVGGDMCHHPRPARQDHRAGVAFSTPPPLLRSIEQRGREVGAGKGEELALHRPSTPSRRSARRLLCSTPLVTRSGLLLAGER

SEQ ID NO: 118336 - protein, 374 aa, Oryza sativa
  Clone ID: PAT_MRT4530_21658C.1.pep
MSQVGSVPVDDTSADAAAAPEEEKKKKKMAGAIFDTQLIIREPVTGTGAASHRTTTTGFPFSVSLSLAAPPGISHVHLHPMAAPHTLKHGLSSLLAADAHHLLLCVVVPVKTRYYSYDHPEEFFVYTAASALTPTLTRLPAFPDGRQRSSGDIGILTHGGGGFTVSSLQMWMVGEGTITVKELEEGTAIIEEFAKLTLLHCSGGDRDNNNSSSNSWVVKKLALPPFDSDYGGHSGLISKWSSQIAFSHGGKVYWASYNIGLIFCDVLESLPKLHLIKFPFPESEIQLLFHVKTDNCGPTASFRTVGVSDGKIKFVDVDKCRSRPSAIVIRAVDPANATDGMGCSHDVLDANGLRGATFLSRNPVCISGYQSILW

SEQ ID NO: 118337 - protein, 332 aa, Oryza sativa
  unsure (1)..(332): unsure at all Xaa locations
  Clone ID: PAT_MRT4530_21659C.1.pep
MSAVERKTACVTGGSGYIASALIKMLLQKGYAVKTTVRNPDDMEKNSHFKELQALGPLKIFRADLEEEGSFDEAVAGCDYAFLVAAPMNLKSQNPEKEIVQGGVEGTLNVMRSCARAGTVKRVILTSSTAAVSSLRPLEGAGHVLDESSWSDIEYLRSMEKLSPAYSISKVLSEKEATKFAEENGLSLVTLCPVVAVGASPAVRVDTSVPACLSLITGEERHREGVRXSMPMVHIEDVCRAEIFVAEEESASGRYICGSLNTTVTEIAGFLAAKYPQYNVRCDFEEHHPKKPTISLSSAKLIGEGFEFKYKNLDEMYDDLVAYGKALGLIPN

SEQ ID NO: 118338 - protein, 95 aa, Oryza sativa
  Clone ID: PAT_MRT4530_2165C.1.pep
PFKGVFLKKGPKFFWGKLAPLETLVYFPVFPPPALFFSFPRQGPLFFPMRFFFFFLPGGFFRLGGPFFSKKGPLFFFPRVLAPFFKFFGPPLFWG

SEQ ID NO: 118339 - protein, 63 aa, Oryza sativa
  Clone ID: PAT_MRT4530_21660C.1.pep
PIVRFMSHFDILLTEDRVEIFPLNLHSHMYRCSTIVVRNNLFLNGEFRLCLSQKNIKLRAVIP

SEQ ID NO: 118340 - protein, 343 aa, Oryza sativa
  unsure (1)..(343): unsure at all Xaa locations
  Clone ID: PAT_MRT4530_21661C.1.pep
MSAVERKTACVTGGSGYIASALIKMLLEKGYAVKTTVRDPDDMEKNSHFKEMQALGPLKIFRADLEEEGSFDEAVAGCDYAFLVAAPMNLKSQNPEKELLEAGVQGTLNVLRSCVKAGTVKRVILTSSAAAVSGQPLQGDGNGSSHVLDESSWSDLDYLRSXQRDISWAYSISKVLSEKEATKFAEENGLSLVTLCPVVAVGASPAVRVDTSVPACLSLITGEEEMMNILKGIEKASGWSMPMVHIEDVCRAEIFVAEEESASGRYICGSLNTTVTEIAGFLAAKYPQYNVMRXIEEHHPEKPTISLSSAKLIGEGFEFKYKNLDEMYDDLVAYGKALGLIPN

SEQ ID NO: 118341 - protein, 346 aa, Oryza sativa
  Clone ID: PAT_MRT4530_21662C.1.pep
MSSEVERKTVCVTGGNGYVASLLVKMLLEKGYAVQTSVRDPNNPEKVSHFKDMEKLGPLKVFRANLEDEGSFDEAVAGCHYAFLVAAPVYDKSHKSDDLEKEIVQGGVEGTLNVMRSCARAGTVKRVILTSSTAAVSSLRPLEGAGHVLDESSWSDIEYLRSMEKLSPTQAYSISKVLSEKEATKFAEENGLSLVTLCPVVAVGASPAVRVDTSVPACLSLITGDEEMMNILKGIEKASGWSMPMVHIEDVCRAEIFVAEEESASGRYICGSLNTTVTEIAGFLAAKYPQYNVRCDCIEEHHPEKPTISLSSAKLIGEGFEFKYKNLDEMYDDLVAYGKALGLIPN

SEQ ID NO: 118342 - protein, 316 aa, Oryza sativa
  Clone ID: PAT_MRT4530_21663C.1.pep
MSAVERKTACVTGGSGYIASALIKMLLQKGYAVKTTVRNPDDMEKNSHFKELQALGPLKIFRADLEEEGSFDEAVAGCDYAFLVAAPMNLKSQNPEKELLEAGVQGTLNVLRSCVKAGTVKRVILTSSAAAVSGQPLQGDGNGSSHVLDESSWSDLDYLRSTNGISPAQAYAIAKVLSEKEASKLAEENGISLVAVCPVATVGASPAPVANESVANVLSLLSGNEEINTLRMIDQYSGGLKLVHVDDLCRAEIFLAEKASPSPSGRLGGGLPEKPTILLSSEKLTSEGFEFMYKTVDEMYDDAFVEYGMALGILHY

SEQ ID NO: 118343 - protein, 164 aa, Oryza sativa
  unsure (1)..(164): unsure at all Xaa locations
  Clone ID: PAT_MRT4530_21664C.1.pep
WTTGHAIDILARNTTLXEVVXDYRHXXXHGXGXXXNLHXXPXLIXXKPSAXNVPLXXSMTVXDXPGYYEDGSFGXWLENVXILXEXNXXFXFGXXGXXXFEXITWTPXPHKTDAHPLLTPXXIXWVNAYHSDCQKILQPYLNXXEXECXRXYTYCELSITWLTL

SEQ ID NO: 118344 - protein, 661 aa, Oryza sativa
  Clone ID: PAT_MRT4530_21665C.1.pep
MDTPLLLLLPFLAACLLAPRHAAEAAVTSCAPRRCGNVTIAYPFWLPDSSPPPSSSSAPCGPAAFQVNCDNGSRASLARSFRSGYKILGVSYANRTVVVANDNVQTDASGCPVPKIDVSASLTLAPFTASPANSQLVFLFNCTSSSRPPPAGFVNVTCPGAKAVVRLDTSYNNTAARVVAGGCDYAAVPVVGVPGASPTDYPQLLRGGYMLEWRAPAGDCMACNASGGQCGYDADTEAFACICSDGSSRPGICGWLELTKGNAKKSGNKVILIVSLSICATGLVLLACIAIVYKCRRRMQNRFSFLNAMDGASRTDTAKVEKLLQSYGSLAPRRFRYSELKKITKSFSQRLGEGGYGTVFSGTLADRRAVAVKFLHHFKPNGEEFLNEVVSIGGTSHVNIVFLLGFCLEGSKRALVYEYMPNGSLDKDVLGWKVLQEIAVGVARGLEYLHDGCNTRIIHFDIKPHNVLLDEGFRPKIADFGMAKLCNPKESILSMADTRGTIGFIAPEVFSRGFGDISTKSDVYSYGMLLLEMVGGGSNVKAYAEKGASGTFFPLWVYDHLLEDGGVLQSVAAAAAATAGGGAGSPGGEEIARKMALIGLWCIQTVPANRPSMGKVLEMLERSVHELAMPPRPYHSNSSSPSRPSSYPSSASDFTQRSVSC

SEQ ID NO: 118345 - protein, 46 aa, Oryza sativa
  Clone ID: PAT_MRT4530_21666C.1.pep
SGSPGLQDLSDGLERIREDKLLSELHPSFTSHHGDLELLYALKTQG

SEQ ID NO: 118346 - protein, 685 aa, Oryza sativa
  Clone ID: PAT_MRT4530_21667C.1.pep
MDTPLLLLLPFLAACLLAPRHAAEAAVTSCAPRRCGNVTIAYPFWLPDSSPPPSSSSAPCGPAAFQVNCDNGSRASLARSFRSGYKILGVSYANRTVVVANDNVQTDASGCPVPKIDVSASLTLAPFTASPANSQLVFLFNCTSSSRPPPAGFVNVTCPGAKAVVRLDTSYNNTAARVVAGGCDYAAVPVVGVPGASPTDYPQLLRGGYMLEWRAPAGDCMACNASGGQCGYDADTEAFACICSDGSSRPGICGWLELTKGNAKKSGNKVILIVSLSICATGLVLLACIAIVYKCRRRMQNRFSFLNAMDGASRTDTAKVEKLLQSYGSLAPRRFRYSELKKITKSFSQRLGEGGYGTVFSGTLADGRAVAVKFLHHSKPNGEEFLNEVVSIGRTSHVNIVSLLGFCLEGSKRALVYEYMPNGSLDKYIYSTSAAAAAEAEEAEATASPDRDVLGWKVLQEIAVGVARGLEYLHDGCNTRIIHFDIKPHNVLLDEGFRPKIADFGMAKLCNPKESILSMADTRGTIGFIAPEVFSRGFGDISTKSDVYSYGMLLLEMVGGGSNVKAYAEKGASGTFFPLWVYDHLLEDGGVLQSVAAAAAATAGGGAGSPGGEEIARKMALIGLWCIQTVPANRPSMGKVLEMLERSVHELAMPPRPYHSNSSSPSRPSSYPSSASDFTQRSVSC

SEQ ID NO: 118347 - protein, 111 aa, Oryza sativa
  Clone ID: PAT_MRT4530_21668C.1.pep
FGVWEIRKGRLAMFSMLGFFVRAFVSGLGPLGGLLGLVGGFVFFPVFVFFFFLVSGFFFWALCFAGVFLCWMVLWPACLLFFVFFRWFLFSSFLFEERKKKKKNIKPPLMF

SEQ ID NO: 118348 - protein, 114 aa, Oryza sativa
  unsure (1)..(114): unsure at all Xaa locations
  Clone ID: PAT_MRT4530_21669C.1.pep
PPPPNFLTPAPPFFPSTPPQFPRFSFYPGHHPSPPRGSGPVFPPPLGRCRPPSXXPPSPPFGGISSRRKRPPWRSKRGPLPPFPRGSPGPTILPSPRAPPPGVRPLPPWCFIYI

SEQ ID NO: 118349 - protein, 69 aa, Oryza sativa
  Clone ID: PAT_MRT4530_2166C.1.pep
MTQQFSQKSELYSFGSVMLELLSRRLPLAKGRFIDREFRMAIDASNYDYYGLQCIIDLAIDDATICYRV

SEQ ID NO: 118350 - protein, 415 aa, Oryza sativa
  Clone ID: PAT_MRT4530_21670C.1.pep
MARTARLLAAEDPPPPPAAAAERPRPAAAGSGLRSLSSAASGLWDRLSVLGAGVSKLEKALGDHFPEGARYFGLENFGNTCYCNSVLQALYHCIPFREQLLEYYATYKNTEDSEDNLLTCLADLFSQITLAKKRTGVLAPKRFVQRVRKQNELFRSYMHQDAHEFWNFLVNDIIDILEEDCRTANSSPETTPEEVSNGAANALANGARERPLVTLVHRTFQGILTNETKCLMCDTITAKDETFFDLSIDVEQNSSLTSCLKSFFSTEILNGEDKFFCDKCSSLQEAHKRMKIKKAPHVLVIHLKRFKYVEQLSRHKKLSYRVVYPLELKLGSMSEDADCEYSLFAVVVHVGSSPNHGHYVSQIKSHGNWLSFDDDTVQISEESTLQTFYGSSREHCGGNTDHGYILFYERLGGKS

SEQ ID NO: 118351 - protein, 29 aa, Oryza sativa
  Clone ID: PAT_MRT4530_21671C.1.pep
HNHSLPLYNARGVNETRDCPYGAIYLELT

SEQ ID NO: 118352 - protein, 67 aa, Oryza sativa
  unsure (1)..(67): unsure at all Xaa locations
  Clone ID: PAT_MRT4530_21672C.1.pep
FFFFFFHXRQFFCIXXCLPKPSIRPILLLLYXLSLKEHDLIXIRRVHKEKTMQXLVYANXTRXVNKY

SEQ ID NO: 118353 - protein, 33 aa, Oryza sativa
  Clone ID: PAT_MRT4530_21673C.1.pep
LKHKSTTFHVTTTLFHYTTLKTHHVHTCSDAIF

SEQ ID NO: 118354 - protein, 111 aa, Oryza sativa
  Clone ID: PAT_MRT4530_21674C.1.pep
APAGRPPAGPRQGEASVPGPRHQAGGAASHDTGAGVLGRPHTARGRLRQLVRSGGARDGTGRCESARRGPAANRLLLGFYHARYIPAIMNKEHDVSRPAGTFYAAHSLPKG

SEQ ID NO: 118355 - protein, 98 aa, Oryza sativa
  Clone ID: PAT_MRT4530_21675C.1.pep
GWLGSPNRRVGSGRVSDRSHWWWTEKASSTLNSGDDFLSFGVGVGVGRPGEPCPKVVYRGPTTTGSLPPTVGGRRGAPYPCCVFFYSSWVSVLNISLN

SEQ ID NO: 118356 - protein, 220 aa, Oryza sativa
  unsure (1)..(220): unsure at all Xaa locations
  Clone ID: PAT_MRT4530_21676C.1.pep
CRRWRRRGRPVHKRGGTGSRRXSGKAGGGRSSRRRGQLCDVEGGDGDIGWCSGTAEGAAGGGAVTATPLFTXRGRVFGGFPAKRRXCRRRGCTCEAEGGDSAXGRGGTSGWRRPAPGKEKEAAGRGGAATGELGKRKKRENGRRGSHFIGAGWEERGTAVEMAAGGHGRWPGMARPFRVNKSTNQGRIRGELKRKERGLIPPNQFWNPMFESRGFVGGIG

SEQ ID NO: 118357 - protein, 41 aa, Oryza sativa
  Clone ID: PAT_MRT4530_21677C.1.pep
ISYPMLVRYRSRYLYPLGMHVSLTSCLGMRVSLHRSKLLCS

SEQ ID NO: 118358 - protein, 43 aa, Oryza sativa
  Clone ID: PAT_MRT4530_21678C.1.pep
MGYFIANKRTISLYLRRYTWHLSNIYCHLELSVPCLRERSQQS

SEQ ID NO: 118359 - protein, 803 aa, Oryza sativa
  Clone ID: PAT_MRT4530_21679C.1.pep
MQMPNDNLDITQRSILSNASCLDHAEEITSYDTDGYDDRTISFGSSCSTIPASYPYISPLQRNHLISDTRDCTWTALMQESLEASNSNNGLNEDCSDLTFSNTEFSGGNKMQNQVVWDNGCLTSPSFTSNFLPFPGDAESAFTSASTVCNLQNFVDLPHDMNNNEQDKPSSELRAPQQKGATRSHICQHRDEMHSAEWGTYPGNEDSDLMPAAQDKQNKVLHAQFNSSVINIDGSAGSGMEKLHGLYECEEQMEIDSLLNSFSAPSDAFSQSYEIFQKSESFVGLDKKVKLEESVSATCFSNTVPCMQSGAPESAISDGSSCHQQYNSTSQVTDLFYTSASQWATTSSSVLPLPFCGSNPVSCLGANGEDHLLTDDHTLLHEQRRAVCGTSYDLTDNVANPVLEFTNILDGQSSLNKTYISHDGLVATNGVWKGHRDVMENHPLGVYSSSHARHPQMELPMTCTSHVLLPPPNLSNNPNSSFVRGTELKKAELMGAYSTTENYLDLDNSERKGIICPKSSEQNVAENICNKAAEYQCNDYSQIVCNQQTVLLPLNKASHFGGLPTKKFDGKLVSRQKKRKRATSLLSWHAQVMSGCSKTHHTRKPELDWAHATRRLVEKVDAENMKTKNSTFVSQAQKRLAFTTKLMQYILPVLPDRLLAANAIDSCETIVYRTSRLALPDAFNPAISSVSDANNFIPTESMPQNQTSTSEKEDDKLVPEVLETFTMRAERATTFQDLATETRDLERWSILHHFIKLHKYSRLHEDDVSNIRPKPCRSTIRKHAGPDQVSVDFLNSVRCRLLN

SEQ ID NO: 118360 - protein, 1500 aa, Oryza sativa
  Clone ID: PAT_MRT4530_2167C.1.pep
MGAIVDKSINTGNAPYVFKINEVVHHRIGTLVPSRGSPPKFAQLYIYDAENEIQNRLNIFENDGDNVDKADPEILAALSSMFDAENALVQNFRYAKERLSEHGDQQITLRLLGCNAKDDVQYNLPTSGEIAGIIVGEFSAKEYKFDVLVYDKNHGLHQISPLHPSYMALQYPLLFPYGERGFHLGIKYNNYDGVGRKYVTMPEYYRYMMHYRLNEPNPLTCYGRLSDQIDVDIFSTIEANRLQFFIDHRKELRGESVDGIVDAIDKGVTDGDSIGKRVILPASFIGGRRYMVMNYQDAMAICHVYGSPDLFVTYTCNSKWQDIAEAIRFEPGQQPSDRADIIVRVFNMKVNEFITDIREGRTFGKVLAGYELVSEFMMHGPCGDANKSCPCMKNDKCSKNYPKDFQDETIIDEAAFTIYRQRNDGRCIIKNGIPLDNRSVVPYNMKLLKKYEAHINVEWCNKSNLIKYLFKYITKGQDRAKIYFETTAKTTNASPNHDLAPRDEILEYMDARFLSTCEALHRLFEFDIHYRVPLVERLVVHLPGKNYVRYEKGSDLRAVLESPAAKRSMLTEWFEANKKYSKAHSLTYCEFPKEWSWESSSRVWRQRTPAAKIGRIYYVHPTAGELYYLRMLLMIVKGAQSYVDVRTFNNIVYATFREACEARGLLEGDNEWYLLFDEAIVSASSQQLRQLFVTILLYCSVNDVRSLFDKYWLYMTDDIHSKLKKALDNPNCIIPPDHLLNLLLHELANVFANSGGNIKDFNLPHPSSVPHIPGTMLAELLIEIALIIWDEALMTHRRCFEALDRTLRDILSETCPLNSIIPFGGKPVVLGGDFRQILPVVPKGSRSAIINASVTNSDLWKHVTILTMNINMRLLNPMLPENEKKDMDDFSQWVFAVGDGTLPMIAKEDAKIYSSCDTISKCSEQIPDFDLLYPPEFLNSIDATNFPTHRLILKEAVVVMLLQNLNQSIGLCNSSIFHMAHVLISQLSFGDSNKRILARVSRLWNFTDLNNHTKIFHTDLVLLDEMGTSIHAQIYPPITEKMKPLLKEEKVYYIDSFTVRAANRTYRPVANNLMILFSKWTTLEEHINVPPHFPGITFSLTPFEDVPSLVEKNSFYVVGAVTTIRPKSRNAESLKRTLQIRDASNSTLPVTLWGERATSFDANDIYNAGQTQAQVVVFVGTLVKDYRGLGLTLTGSSPCKWYINLNIPEVAELNESFSTNFQPIKWVDEPATGYNQDVPEEKSIAEILNINPHKHKGTCFIVNVTVRRICNEYSWWYKVVLISGDDDANATFILFGRIAQRLLRRPIESLIEENPPNSEYIPSEITSLIGSNFPWNVSFTRDTVMRSQECLQVNSIISAGASNQPLLLMSPDASQVTSAIVSASSSSSVQTAPTPNETSNESQQPIQPRQTISTPTKFTIAQGTQDTPTSKSSSSTPTKKSIVSVSHMQSSKTKPKTDDKPKTDTKAEENISHDKSSIVVLPDTAENMRKAYTYSNTSGC

SEQ ID NO: 118361 - protein, 123 aa, Oryza sativa
  Clone ID: PAT_MRT4530_21680C.1.pep
PTRPAIDSCETIVYRTSRLALPDAFNPAISSVSDANNFIPTESMPQNQTSTSEKEDDKLVPEVLETFTMRFDELQNSFSRAERATTFQDLATETRDLERWSILHHFIKLHKYSRLHEDDVSNI

SEQ ID NO: 118362 - protein, 123 aa, Oryza sativa
  unsure (1)..(123): unsure at all Xaa locations
  Clone ID: PAT_MRT4530_21681C.1.pep
QFWLIFASKQLEDGRTLADYNIQKESTLHLELRLKGGMQIFDKTVTGKTITLEDESSDTIDNVKAKIQDTEGIPPDQQRLIFDGKHLEDGHTLADYNIQKESTLXHLVLKVRCGMQIFVKNLT

SEQ ID NO: 118363 - protein, 336 aa, Oryza sativa
  Clone ID: PAT_MRT4530_21682C.1.pep
MMGIQRICIVLGMLFILVREGGAVTFTFVNRCTGTVWPGILSNAGSARMDPTGFELPPGAARAVPAPTGWSGRLWARTGCTQDGTGKVVCATGDCGSGTLECAGRGAAPPATLAEFTLDGGGRNDFYDVSLVDGYNLPLLVEPSGALGATATTCAAAGCAADLNARCPAELRAVGGAACRSACDAFGKPEFCCSGAYANPNTCRPTAYSQVFKSACPRSYSYAYDDPTSTFTCAGGRDYTITFCPVATPSLKSAGGTTTPTTTVPGVTTDAPPDMARPIGSQGGGGGGGAGQGVMLGDNSWLASLAMGDASSSRRASRLALLAAPLALLTLHLPRL

SEQ ID NO: 118364 - protein, 111 aa, Oryza sativa
  Clone ID: PAT_MRT4530_21683C.1.pep
VMRKQARSNHERSKFSVNRSIQHHFVGTIANSMQRSKLCFILLHLFFFSVHGSTSSNCFSILKEGRCYNIPGEQNMYGFIESVVSFIMTREECWLKRSNTHHPQLLHMDIP

SEQ ID NO: 118365 - protein, 539 aa, Oryza sativa
  Clone ID: PAT_MRT4530_21684C.1.pep
MAMPCRLHGDILLLLLGAVAVAVAHPAANEFCAAVGGGSGGCGVGGGGGGDGRRILIRGGTVVNAHRVEEADVYVEDGVIVAVRPNIPVGDDHVKVIDATGKYVMPGGIDPHTHLEMEFMGTVTIDDFFSGHAAALAGGTTMHIDFVIPVNGNLTAGLESYKQKAEKSAMDYGFHMAITKWNDDVSREMETMVKEHGINSFKFFMAYKGSLMVTDDLLLQGLQKCKSLGALAMVHAENGDAVAEGQQRMIDLGITGPEGHALSRPPVLEGEATARAIRLAKFVNTPLYVVHVMSIDAMDEIAKAKREGQRVIGEPVVSGLVLDDSWLWDPDFMIASKYVMSPPIREAGHNKALQVALSSGILQLVGTDHCTFNSTQKAFGSDDFRKIPNGVNGIEERMHIIWDSMVETGRISVSDYVRVTSTECAKIFNIYPRKGAILEGSDADIIILNPERSFVMGAHTHHSRSNTNVYEGRKGKGMVEVTISRGRVVWEDGILNVVPGSGRYVRTPPYSYLFDGIEKSDAAYRASLRAPVKRGKAAA

SEQ ID NO: 118366 - protein, 98 aa, Oryza sativa
  Clone ID: PAT_MRT4530_21685C.1.pep
MMKNPLHINLLIYSEIATSIYPALTNSTDLLVAVGDQPGTPKVFNEMQIMNWNELELERKRTFVLECAIPHSEACHAMCPTTNGSEACHTTTWDGVAK

SEQ ID NO: 118367 - protein, 94 aa, Oryza sativa
  unsure (1)..(94): unsure at all Xaa locations
  Clone ID: PAT_MRT4530_21686C.1.pep
VVTLKKKAGAWHTVGMGSMPLNNIAVHKSIPSFLXRLQITLKRVGVNNIPGILQVSLWKGDVNIHSPYXIVHASIGAYSWVVRGTPQSNKLHTP

SEQ ID NO: 118368 - protein, 73 aa, Oryza sativa
  unsure (1)..(73): unsure at all Xaa locations
  Clone ID: PAT_MRT4530_21687C.1.pep
TPGNLPGGAGVPQKPFFRGGGGPPPQKVWGNWGPPFRALXKKKKKKKKKKKKKKKKKKKKKKKKKKKKKKKKK

SEQ ID NO: 118369 - protein, 41 aa, Oryza sativa
  Clone ID: PAT_MRT4530_21688C.1.pep
MADLDQRRFPGSSSSGSGGGRSGSINQVLGVSVSLILQLTR

SEQ ID NO: 118370 - protein, 174 aa, Oryza sativa
  Clone ID: PAT_MRT4530_21689C.1.pep
MANSGGTAVDGGGATRRRRGMAVAEDGGGAPLRRKEESELSWGWGSSAVDVLWLAQCSMVLIDDFRVRTYRDRIGNFFYYLKIVKTTDTYEIRIGAYPILIHIRYEYVAWEAYPGIGSICSSKINNPRIDVSIAKAQHNNVSYGCSRIISVSPKSKYYHQLTKSRAYQSREHIK

SEQ ID NO: 118371 - protein, 151 aa, Oryza sativa
  Clone ID: PAT_MRT4530_2168C.1.pep
MQGTRFIVNVTVRRICNEYSCWYKVVLIAGDDDANATFILFGRIAQRLLRRPIESLIEENPPNSEYIPSEITSLIGSNFAWNVSFTRDTVMRSQECLQVNSIISSGASNQPLLLMSPDASSSLSLREHRTPQLANQILQHLPRNALLSQCL

SEQ ID NO: 118372 - protein, 194 aa, Oryza sativa
  Clone ID: PAT_MRT4530_21690C.1.pep
MASDPTELRCSSPESSGDAGAEDPAAVDAAEESGGEGGSGHIAAGTEAAPPRPPEPEPEKVARHGVLPLLGKPYFTCIMCKSHVQPPFQVVVPRSFAPLLPSRTTPATLSWRGRSWGMRFTGGRLIQRLEAGWRGFAVDNDLRLGDGCVFELLVGGGGEQERVEFRVQVLRAEIPARIRGRAGGYTSATPIVID

SEQ ID NO: 118373 - protein, 65 aa, Oryza sativa
  Clone ID: PAT_MRT4530_21691C.1.pep
GPPQELLGLPCGPGKKKGLGVGPQFGPRQINGGPEAHQGLIGVGGIWGHRVRGLWVGKNGFSPPK

SEQ ID NO: 118374 - protein, 55 aa, Oryza sativa
  Clone ID: PAT_MRT4530_21692C.1.pep
IWLLDIALMPGRSSWSYFGASRRADGFYPHCGVATSACNPVCMSEQVSIKLGPDR

SEQ ID NO: 118375 - protein, 167 aa, Oryza sativa
  Clone ID: PAT_MRT4530_21693C.1.pep
MAAVSIGPALLGYQRYATNIAEEPQPRTDSLKSFFGFLTCIYVHRSLFVIINHSNCLVPKLMKTSDDDERMNLTEEEEAALKVRHQEWMNKFNREYKDEAEKAYRFEIFKSTVRFAEKFNAEQVKEHGYCKCILGTTQFADLTLEEFGHWVDGRTDTFGPPKVTKFD

SEQ ID NO: 118376 - protein, 105 aa, Oryza sativa
  Clone ID: PAT_MRT4530_21694C.1.pep
MMLFGALAASFALSFFLITIFICPRALRIACRRRDRPLVMEQEQQQPTLPRFGLDTATITRLPSFIYVTPQSGTAVQRHLTGACRGKNGANRFLRNRDLSTSPRT

SEQ ID NO: 118377 - protein, 471 aa, Oryza sativa
  Clone ID: PAT_MRT4530_21695C.1.pep
AALTRSSSVRSAIRRLGSSRAFSASAAAAPRRDARGAAAAAVAVAAGSGLGIWLLPPSPRPLADSGQAGNEVAAFGDVAEEEEREEKRRFLFGDSYRRRVFFNYEKRIRTRSPPEKIFEYFASIRNPEGEVYMLPADLMRAVVPVFPPSESKIVREGSLRGERNPGELHCAPSEFFMLFDTNGDGLISFAEYIFFVTLLSIPESSFNIAFKMFDLDHSGEIDKEEFKKVMALMRSYHRQGAAHRDGLRFGLKVGQSVENGGLVEYFFGKDGNEQLRYDKFSNFLKQLHDEIVRLEFSHYDVKSSKTISVKDFALSMVASADMNHINKLLDRVDDFDDYPDLKDLRITFEEFKAFADLRRKLEPFAMAIFSYGKVNGLLTKQDLKRAATHVCEVDLTDKVVDVIFLVFDANRDGSLSADEFLRALQRRESDIRQPASSDCDLVLGSENDHPLEFCKHDFAVNSLAYQSYRNM

SEQ ID NO: 118378 - protein, 189 aa, Oryza sativa
  Clone ID: PAT_MRT4530_21696C.1.pep
MALPPQAYFVPAAPPPPFQEATAALAAGDDATAALAVFELERILEEAAAAGGGGGNGSPSSGSDGCCYGLQGVAPAAEEERRRRRMVSNRESARRSRMRKQRQLSELWAQVEHLRGANRRLLDELNRALRGCADVRRENSRLRDEKAELAGKLQLLLPRQPAPEKNAADDQSSCSSEPCKNSTTTTAAE

SEQ ID NO: 118379 - protein, 84 aa, Oryza sativa
  Clone ID: PAT_MRT4530_21697C.1.pep
LMTPKSHYHPSHRFSKPWQNVAPGGENMLAGGPRPLHGSGHKDPCALLLTRLEPILERPGWSQPCLVHCRDGGYHEVLKEEDHL

SEQ ID NO: 118380 - protein, 929 aa, Oryza sativa
  Clone ID: PAT_MRT4530_21698C.1.pep
MDRQWMYADRRSKEFIDSVHYFLRVAGANRHKGFICCPYKQGVEMEEDEVEDDNILDFAQYVGFERNQTGEEERDADGCEQGHKKLDTTLEFLQWKAKNGVSDKTFVDLLKLVKNILPEGNKLPETTYEAKKIVCPLRLEVQKIHACPNDCIIYRGEEYENLIVCKALRYKIRRDDPGEVNEQLTKKRILTKVMWYFPIILWLRRLFRNKVNARMMRWHAEERQQDGMLRHPADGSQWRNIDRKFKDFGKDARNTRFGLSPKQPGNDIDVYLTPLVEDLKLLWKKEGVPVWDEDKQEEFNLRALLFVTINDWPALSNLSGQSNKGYKACTHCMDETKSMYLKHCRKVLYMGHRRFLAANHPVRKKGKHFEHKADHRTKPKHRSGKTVFAMVKDLKVVFGKGPKVESTLEARNDLKHMEQRGDLHLEPKEKGSHYLSPASYTLSKVEKESMFEYLESIKVPSGHSTNIKRIISTKEKKFTNLKSHDCHVLMTQLLPVVIRGILPDNVRATITKLCAFMNAISQKVIDPDRLEALQNDVVQCLVSFELIFPPSFFNIMTHLLCHLVKEISILGPVYLHNMFPFERYMGVLKKYVRNCARPEASIAKGYGTEEVIEFCVEFIEDLRPIRVPESRHEGRLRGKGTLGRKAIMTVDNNLFRKAHFTVLQQSSLVAPYIEEHLALVRARNIGKSDAWNTRHHIDTFPAWLRQHLMGNETINQQLAFLARGPSGLIATFQGYEINGYTFYTRAQDMKSTNQNSVVRIDAIGYDGTTGTYYGAIEDIWELDYGPLKVPLFRCQWVRLTGGGVMIDDSGMTTVDLNKVGYSDEPFVLANDVTQVFYVKDMSSKGKKGRGPDEPKRHVVLPGKRKIVGVEDKTNEDYDQLDGQPPFMVTIDPSILLSNEYTPYSRSDHKEGTIVRRKYVRSTVIADVLP

SEQ ID NO: 118381 - protein, 467 aa, Oryza sativa
  Clone ID: PAT_MRT4530_21699C.1.pep
MRGRRRRAREADPVPEPFTIDDEVSHLTRIRSEPSQKTLGAFYAGRKRGISTFGLLSGRESGRSGAGGFSRADCAYAARKHLPTKGPWCVDDMTSEAYVSQFSSDGSLLVAGFRGSRIRIYDADNGWKVHKDISCRSLQWTVSDIALSPDQQLLAYSSLSPTVHIVNVQSSAKESQANVTEIHDGLEFSNDDDDEYSFGIFSVKFSKDGQEIVVGNSDRSINVYDLRANKVSVRIRAHAADVNAVTFADESGNLLYSGSDDNLCKVWDRRCLAREKPAGVLTGHLDGITFIDSRGDGRYFISNCKDQTIKLWDVRKMSASIKGRQPRFFDWDYRWMSFPLEARHCKHPNDQSLATYRGHSVLRTLIRCYFSPVYSTGQRYIYTGSSDEYVYIYDVVTGDIVEKLSWHGSIIRDCTWHPYNLTIVSSSWDGYLARWEASGDEDDLSVLTENEQRTSPYRQSYTRHLLL

SEQ ID NO: 118382 - protein, 70 aa, Oryza sativa
  Clone ID: PAT_MRT4530_2169C.1.pep
FIASQKGWTDSVSQNFLPAHNCFQLLNYCHISIFYKPFSFFILKAYPSEWRQDVLEFMPNLTQTKVPICR

SEQ ID NO: 118383 - protein, 173 aa, Oryza sativa
  unsure (1)..(173): unsure at all Xaa locations
  Clone ID: PAT_MRT4530_216C.1.pep
GRHASVLARGRQAAGAQLLWARGGGRDAAAATGGGGRRGGGGGRHPPXARSGGRGGGFGGPTAADRWQEGRRRWSDGPAAAPSPPPDLAEGEVAVAGRXGGRWQRQLPWQRQXGGGALVLSIRRWRGGDEGKPPPRSDLVLMNLMGTSKVPVLEPAPLTLGDQCRLLGDGESQ

SEQ ID NO: 118384 - protein, 967 aa, Oryza sativa
  Clone ID: PAT_MRT4530_21700C.1.pep
MEVAVREIAMYWFENQRASRIISRTPMEVAVWEIATYWFENQRASTIISRTPMEVAVREIATYWFENQRASRIISPTPMKVAVQEIATYWFEKQRASRIISRTPMDVAVRVIATYWFDNQRASRIIYRTPMEFCGARDCYVLMDRQWMYADRQSKEFIDGVHYFLRVAEANRHKGFICCPCNKCKNQKEYSASRTIHFHLFESGFIPSYNCWTSHGEQGVEMEEDEVEDDNISDFAQYSGFEGNQTGEEEMDADGYDVADDLGQMLQDAKEDCESEKGAHKLDRMLEDHRTSLYPGCEQGHKKLDTTLEFLQWKAKNGVSDKAFGDLLKLVKNILPEGNQLSETTYEAKKIVCPLGLEIQKIHACSNDCILYRGEEYENLEACPICKALRYKIRRDDPGEVDEQLTKKRIPAKVMWYFPIIPRLRRLFRNKGNARMMRWHAKERQQDGMLRHPADGPKQPGNDIDVYLRPLVEDLKLLWKKEGVPVWDEDKQEEFNSNKGYKVCTHCMDETESTYLKHCRKVVYMGHRRFLAANHPVRKKGKHFEHTVDHRTKPKHRSGKTVFAMVKDLKVVLGKGPSSQPIESEDGVYGKSKDTLEARNDLKHMEQRSNLHPEPKEKGSHYLSPASYTLSKAEKDSMFECLESIKVSSGYSTNIKRIISTKEKKFTNIKSHDYHVLMTQLLPVVIRGILPDNVRATITKLCAFMNAISQKVIDPDRLEALQNNVVQCLVSFELIFPPSFFNIMTHLLCHLVKEIGILDPVYLHNMFPFEWYMGVLKKYIRNRARPEGYEINGYTFYTRAQDMKSTNQNSVVRIDAMGHDGTTGTYYGAIEDIWELDYGPLKVPLFRCLWARLTGGGVPIDDSGMTTVDLNKFFTSRTCLAKEKKGKGPDEPKRHVVLPGKRKIVGVENKTDEDYDQFDGQPPFTVTIDPSILLTNEDTPYSRSDHKEGTIVRRKYVRSTVTADVLP

SEQ ID NO: 118385 - protein, 1045 aa, Oryza sativa
  Clone ID: PAT_MRT4530_21701C.1.pep
MDRQWMYADRRSKEFIDGVHYFLRVAEANRTIHFHLFESGFMPSYNCWTSHGEQGVEMEEDEVEDDNIPDFAQYVGFEENQTGEEEIAADGNDVADDLGQMLQDAREDCESEKEAHKLDKMLENHRTSLYPGCEQGHKKLDTTLEFLQWKAKNGVSDKAFGDLLKPVKNILPGGNKLPETTYEAKKIVCPLGLEVHKIHACPNDCILYHGEEYENLKACPFCKALRYKIRRDDPEEVDGQLTKKRIPAKVMWYFPIIPRLRRLFRNKGNARMLRWHAEERQQDRMLRHPADGSQWRNIDRKFKEFGKDTRNVRFGLSTDGMNPFGEMSSGHSTWPVTMCIYNLPPWLCMKRKYIMMPIIIQGPKQPGNDIDVYLRPLVEDLKQLWKKEGVPVWDEDKQEEFNLRALLFVTINDWPALSNLFGQSNKGYKACTHCMDETETNHPVRKKGKHFEHKAHHRTKPKYRSGKTVFAMVKDLKVVFGKGPGSQPIESEDGHATMWKKNSIFWELPYWEFLDIRHAIDVMHLTKNLCVNLLGFLGVYGKSKDTLEARNDLKHMEQRGDLHPEPKEKGSHYLSPASYTLSKAEKGSMFECLESIKVPSGYSTNIKRIISTKEKKFTNLKSHDCHVLMTQLVPVVIRGILPDNVRATITKLCAFMNAISQKVIDPDRLEALQNEVVQCLILILGPVYLHNMFPFERYMGVLKKYVHNHARPEASIAKGYGTEEVIEFCVEFIEDLRPIGVPESRHEGRLRGKGTLGRKAIMMGYEINGYTFYTRAQDMKSTNQNSVVRVDAMGHDGTTAMYYGAIEDIWELDYGPLKVPLFRCQWVRLTGGGVMIDDSGMTTVDLNKVGYSDEPFVFANDVTQVFFVKDMSSKGKKGRGSDEPKRQVVLPGKRKIIGVEDKTDEDYDQLDGQPPFTVTIDPSILLSNEDTPYSRSDHKEGTIVRRKNTYCAKQKQGTNLCGYYVCEYCHCLADQIITTRELDFIRTRDNLTTHKEFIAAVQEQLMGFINEEILDPKGEFYYDGNTIHWSLASELAASTTTTSKS

SEQ ID NO: 118386 - protein, 833 aa, Oryza sativa
  Clone ID: PAT_MRT4530_21702C.1.pep
MGLGGGGRPVEVSLEGLRSLAVTSRPRQNLPWFGKVSGIDKWRMDRQWMYADRRSKEFIDGVHYFLKVAEASRQRGFICCPCNKCKNQKEYSASRTIHFHLFESGFIPSYNYWTSHGEQGVEMEEDEVEDDNIPDFAQYVGFEGNQTGEEEIAADGNDVADDLDVGGPQNFVVPRLRAGAQKVGYHSGVVAMEGKKWVSDKAFGDLLKLVKNILPGGNKLPETTYEAKKIVCPLGLEVHKIHACPNDCILYRGEEYENLEACPVCKALRYKIRRDDPGEVDGQLTKKRIPAKVMWYFPIIPRLRRLFRNKGNARMLRWHAEERQQDGMLRHPADGSQWRNIDRKFKEFGKDARNIRFGLSTDGMNPFGEMSSGHSTWPVTMCIYTLPPWLCMKRKYIMMPIIIQGPKQPGNDIDVYLRPLVEDLKQLWKKEGVPVWDEDKQEEFNLRALLFVTINDWPALSNLSGQSNKGYKACTHCMDETESMYLKHCRKVVYMGHRRFLAANHPVRKKGKHFEHKADHRTKPKHRSGKTVFAMVKDLKVVFGKGPGSQHIESEDGHAAMWKKNSIFWELPYWEFLDVRHAIDVMHLTKNLCVNLLGFLGVYGKSKDTLEARNDLKHMEQRGDLHPEPKEKGDSKGPTAEGFRYWIHRPSESKRRNARPISTRNRGQSRPSPEGAALQDVHTVAIQHRACTVNVYDSMDKKESTFDKVFELIDRAWYRFRHLVRGKWRERLRRKFKFPCAKQKQGTNLYGYYVCEYCHCLADQIITTRELDFIRMRDNLTTHKEFIAAVQEQLMGFINEEILDPKGEFYYDGNTIYRSLASELAASTTTSKS

SEQ ID NO: 118387 - protein, 774 aa, Oryza sativa
  Clone ID: PAT_MRT4530_21703C.1.pep
MEEDEVEDDNIPDFAQYVGFEGNQTGEEERDADGNDVVDDLGQILQDAKEDRESEKGAHKLDKMLEDHRTSLYPGCEQGHKKLDTTLEFLQWRQKMVNKGNARMMRWHAEERQQDGMLRHPADGSQWRNIDRKFKDFAKDARNIRFGLSTDGMNPFGEMSSGHSTWPITMCIYNLPPWLCMKRKYIMMPIIIQGPKQPGNDIDVYLRPLVEDLKLLWKKEGVPVWDDDKQEEFNLRALLFVTINDWPALSNLSGQFNKGYKACTHCMDETEITYLKHCRKVVYMGHHRFLAANHPVRKKGKHFEHKADHRTKPKHRSGKTMFAMVKDLKVVFRKGPGSQPIESEDGHAAMWKKNSIFWELPYWEFLDVRHAIDVMHLTKNLCVNLLGLLGVYGKSKDTLEARNDLKHMEQRGDLHPEPKEKGSHYLSPASYTLSKAEKEIVIRGILPNNVRATITKLCAFMNAISQKVIDPDRLEALQNDVVQCLVSFELIFPPSFFNIMTHLLCHLVKEISILGPVYLHKMFPFERYMGVLKKYVRNRARPEASIAKGRGDHLGNEMINQQLAFLARGPSGSIATFQGYEINGYTFYTRAQDMKSTNQNSVVRIDAIGHDGTTGTYYGAIEDIWELDYGPLKVPLFRCQWDRLTGGGVMIDDSEMTTVDLNKVGYSDEHFVLTNDVTQVFYVKDMSSKGKKGRGPDEPKRHVVLPGKRKIVGVDGKTDEDYDQFDGQPPFTVTIDPSILLSNEDTPYSRSDHKEGTIVRRKYVRSTVTADVLP

SEQ ID NO: 118388 - protein, 201 aa, Oryza sativa
  Clone ID: PAT_MRT4530_21704C.1.pep
IFRKRLNGHYGVAAFVISNTLSSIPYLLLNAVVHGAIAYYLTGLQGKIEHFVYFALVLCACTMLVEALMMIVATIVPDFLMGIITGAGIQGIMMLTSGFFQIPNNLPKIVWKYPMYYISFHKYALQGFYKNEFSGLVFQSNLGGQETVSGEKVIVELFQVETGHSRWVDLAVLCGMIVIYRLLFVVIIKVIDVVKPMLLGL

SEQ ID NO: 118389 - protein, 1071 aa, Oryza sativa
  Clone ID: PAT_MRT4530_21705C.1.pep
MKRPRTTLKSFYAPATPQSNLDPNPPQTAGTGGSNTQQAAAVVEAAIGETGARASNIQVQHAPSTCEAAPSIVETVGSNIPQPEQEPHNSETVELNPADIVADPGLRKPIEQFHIDIRDAVRREYLSRGPCQPIGHKYPQKLMGNRQRSFHDSWFKMHNWLEYSIAKDAAFCFYCYLFKQPRPDNFGVDAFTSKGFTNWKHATGSFNEHVGKVDSFHNRARKHCEDFKNQRQSVSYKMDSGSKKLEQQYYGRITMILGVVRFLLLQALAFRGHDESHGSSNKGNFLEMIEWYKEKDKDAQKLLGNSPGNHLLTSPKIQKHLCKACANKTTKAILKDIGERNFAILVDESRDASIKEQMAVILRYINSKGQVIERFLGVEHVPDTTSVALKIALDAMIVSHGLSMHKVRGQGYDGASNMRGEFHGLQRRVLDENPYAFYIHCFAHQLQLVVVSVAKCCSPVSDFFNYTPMIVNTVNGSCKRHDQLAQEHHDNLVSSLETGEIFSGRGKNQATNLARPGDTRWGSHHKTLCRLQHMWKAVLEVLENICEDNPTTKITATGLLKQMESFEFVLIMHLMIRLLGKTNDLSQCLQKKDQNIIRAIGLIGTTLQKINHIRQHGWQELFEETKTFCLKYNIIVPDMSDTTTTRGRSRGRGGQLITYQHHFNNEIFNVVHDQLIVELNNRFAERSTQLLRCIACLDPRNSFANFDEDKLIELARMYAADFSPYDCIVLKDQLETFIADVRADPHFLSCSDLGNLAMKMVQSDRHTVFPLVYRLIELALILPVATATVERAFSAMNIIKTELRNKMADEWLNHRVVCYIERDIFASIDNDKILTHFQELRTRKMKLPLPSAGTYVQVKRSNGRLGVYKEFSNEVSMLMLEADPQNATSIYNLHKDAKDKLNKSSMKDAKSLTQTYTSNTSLVAILIATITFAAAFTLPGGYSSDAGNLGFPIMARKFVFQSFLIADTLAMCSSLVVAFICIIARWEDLQFLLHYRSFTKKLMWFAYMATTVAFATGLYTVLAPRLLWLAIGICLLSVLLPAITKVIGEWPVLKLRFRLGKTYNSDLLDMV

SEQ ID NO: 118390 - protein, 852 aa, Oryza sativa
  Clone ID: PAT_MRT4530_21706C.1.pep
MATQPGRTSLGGSHRTGSGMSAATTLAGLAFVAPPPPPPLPIPSWSSTPHPLPHRRCRPSPPLLLAELHAPANTTMDRQWMYADRRSKEFIDGVHYFLRVTKANRHKGFICCPCNKCKNQKEYSASRTIHFHLFESGFMPSYNCWTSHGEQGVEMEEDEVEDDNIPDFAHDKAFGDLLKLIKNIVSEGNKLPETTYEAKKIVCPLGLEVQKIHACPNDCILYRGEEYENLEACPICKALRYKIRRDDPGEVDGQLTKKRIPAKVMWYFLIRPRLRRLFRNKGNARMMRWHAEERQQDGMLRHPADGSQWRNIDRKFKEFGKDARNIRNLSGQSNKGYKACAHCMDETESTYLKHCRKVVYMGHRRFLVANHPVRKKGKHFERKADHRTKPKHRSGKTVFAMVKDLKVVFGKGSGSQPIESEDGVYGKSKDTLEARNDLKHMEQRGNLHLEPKEKGSHYLSPASYTLSKAEKEKISILGPVYLRNMFPFERYMGVLKKYVRNRARPEASIAKGYGIEEVIEFCVEFIEYLRPIGVPESCHEGRLRGKGTLGRKAIMMVDNNLFRKAHFTVLQQSSLVSPYIDEHLALVRARNIGKFDAWITRHHIDTFPVWLRQHLMGNETINQQLAFLARGPSGSIATFQGYEINGYTFYTRAQDMKSTNQNSVVRIDAMGHDGTTGTYYGAIEDIWELDYGPLKVPLFRCQWVRLTGGGVMIDDSGMTTVDLNKVGYSDEPFVLANDITQVFYVKDMSSKGKKGRGPDEPKRHVVLPGKRKIVGVENKTDEDYDQLDGQPPFTVTIDPSILLSNEDTPYSRSDHKEGTIVRRKYVRSTVTADQLLFGICELRTIIRGFNNF

SEQ ID NO: 118391 - protein, 909 aa, Oryza sativa
  unsure (1)..(909): unsure at all Xaa locations
  Clone ID: PAT_MRT4530_21707C.1.pep
EVEDDNILDFAQYIGFEGNQTGXKEDCESEKGAHKLDKMLEDHRTSLYPGCEQGHKKLDTTLEFLQWKEKNGVSDKAFGDLLKLVKNILPEGNKLPETTYEAKKIVCPLGLEVQKIHTCPNDCILYRGEEYENLEACPVCKALRYKIRRDDPGERREFLLRNKGNARMIRWHAEERQQDGMLRHPADDSQWRNIDRKFKDFGKDARNIRFGLSFKQPGNDIDVYLRPLVEDLKLLWKKKGVPMWDEDKQEEFNLLALLFVTINDWPALSNLSGQSNKGYKACIHCMDETESTYLKHCRKVVYMCHRRFLAANHPVRKKGKHFEHKADHRTKPKHRSRKTVFDMVKDLKVMFEKGPGSQPIESEDGVYGKSKDTLEARNDLKHMEQRGDLHPEPKEKGSHYLSPASYTLSKAEKESMFECLESIKVLSRYSTNIKRIISTKEKKFTNLKSHDCHVLMTQLLPIVIRGILPDNVRATITKLCAFMNAISQKVIDPDRLEALQNDVLQCLVSFELIFPPSFFNIMTHLLCHLVKEISILGPVYLHNMFPFERYMGVMKKYVRNRSRLEASIAKGYGTEEVIEFCVEFIEDLRLIRVPESRHKGRLRGKGTLGRKAIMTVDNNLFRKAHFTVLQQSSLVAPYIEENLALVRTRIIGKSDAWITRHHIDTFPGYEINGYTFYTRAQDMKSTNQNSVVRIDAMGYDGTTGTYYGAIEDIWELDYGPLKVPLFRCQWVRLTSGGIMIDDSGMTTVDLNKVGYSDEPFVLANDVTQVFYVKDMSSKGKKGRGPDEPKRHVVLPGKRKIVGVEDKTDEDYDQLDGQPPFTVTIDPSILLSNKDTPYSRSDHKEGTIVRRKMEIQRARRRRVSDTGFIDPRKVNVAMLDQYPQETEDNLVHLLEARHYKTFILLPYHTE

SEQ ID NO: 118392 - protein, 459 aa, Oryza sativa
  Clone ID: PAT_MRT4530_21708C.1.pep
MEEDEVEDDNIPDFAQYVGFEGNQTGEEERDADGNNVADNLGQMLQDAKEDCESEKGAHKLDKMLEDHRTSLYPGCDEKAFGDLLKLVKNILPEGNKLPETTYEAKKIVCPLGLEVQKIHACPNDCILYRSEEYEKLEACPVCKALQYKIRRDNLGEVDGQLTKKRIPAKVMWYFPIIPRLRHLFKNKGNARMMRWHAEERQQDGMLRHPADGSQWRNIDRKFKDFGKDTRNIRFGLSTDGMNPFGEMSSGHSTWNIGKSDAWIIRHHIDTFPVWLRQHLMGNESINQQLAFLARGSSGSIATFQGYEINGYTFYTRAQDIKSTNQNSAVRVDAMGHDGTTGTYYGAIEDIWELDYGPLKVPLFRCQWVRLTGEGVMIDDSGMTTVDLNKVGYSDEPFVLANDVTQVFHVKDMSSKGKKGRGPDEPKRHVVLPGKRKIVGVEDKTERITISWMGNPLSR

SEQ ID NO: 118393 - protein, 82 aa, Oryza sativa
  Clone ID: PAT_MRT4530_21709C.1.pep
VLSMAHVHTLTHTKKNVSSPLLGRMDGWIRWWPRERWWWWSRRRRRCRSRVVSRCLVLARLAHHACNGHGDTRGMESTDTLS

SEQ ID NO: 118394 - protein, 865 aa, Oryza sativa
  Clone ID: PAT_MRT4530_2170C.1.pep
MRWVSTSSDEKKARSPADGEEAPSPRRRGEGLQTKSDVQELLEILGSLILCMILYGICVPLFHMAHVLISQLSFGDSNKRILARVSRLWNFADLNDDTKIFHTDLVLLDEMGTSIHAQIYPPITKNMKPLLKGRKDIMGVITEVGAVTTIRPKSRNAESLKRTLQIRDASNSTLPVTLWGERATSFDVDEIYNASQTQAQVVVFVGTLMKDYRGLGLTLTGSSPCKWYINLNIPKVAELNERYKVVLIAGDDDANATFILFGRIAQRLLRRPIESLIEENPPNSEYIPSEITSLIGSNFAWNVSFTRDTVMMSQECLQVNSIISSGASNQPLLLMSPDASQVTSATVSVSSSSSVQIAPTPSETSNESQQPIQPRQTISTPTKFTITQGTQGTPTSKSNSSTPTKKNIVVSVSRMQSSRTKPKTDDKPKTDTKAEENTSHDKSSIVVLPDTTENKGKGQTAEEAKQATPSFPTDTQAKKGALITPRGMPTPTTTPPVAKKLFKDGAQQKGNDSADVVVPRTDVESKAKVHPLVQGDDEIKGEQPNTDAPLGDSDSLSAASNDNKRVSREDIELVQNLIERCLQLYMNRGEVVRTLSTRARIEPGFTTLVWQKLEEENSEFFRAYYIRLKLKKQINLFNHLLEHQYHLMKYPVPQQVPLTPTQNGIRPMPVNNLPMGYPVLQQPGIPAPVQPHVNSISCGPPGCHVVNGIPAPGGYNPIRMSSGNGMTENEVPGTAHAGAMSSEMAVSPSSAMSSNHVSFTPDISGMDVDASTVNATFGDDLGNGGPLQIGPNGGDSSSLGQQIWDFSLSDLSADLTNLGDLAALENYSGNPFLPSDSDIFESPDDDIVEYFADAINGPSQSDEEK

SEQ ID NO: 118395 - protein, 1023 aa, Oryza sativa
  unsure (1)..(1023): unsure at all Xaa locations
  Clone ID: PAT_MRT4530_21710C.1.pep
MDRQWMYADRQSKEFIDGVHYFLRVAEANMQKGFICCPCDKCKNQKEYSASRTIHFHLFKSGFMPSYNCWTSHGEQGVKMEEDEVEDDNIPHFAQYAGFEGNQTGEEERDADGNNVTDDLGQMLQDAKEDCESEKGAHKLDKMLEDHRTSLYPGCEQGHKKLDTTLEFLQWKAQNGVSDKAFGDLLKLVKNILPEGNKLPETTYEAKKIVCPLGLEVQKIHACPNDCILYRGEDYENLEACPVCKALRYKIRRDDPGEVDGQLTKKRIPAKVMWYFPIIPRLRRLFRNKGNARMMRWHAEERQQDGMLRHPTDGLQWRNIDRKFKDFGKDTRNIRFGLSTDGMNPFGEMSSGHSTWPVTMCIYNLPPWLCMKRKYIMMPIIIQGPKQPGNDIDVYLRPLVEDLKLLWKKEGVPVWDEDKXEEFNLXALLFATINDWPALSNLSGQSNKGYKACTHCMDETESTYLKHCRKVVYMGHRRFLAANHPVRKKGKHFEHKADHRTKPKYRSGKTVFAMVKDLKVVFGKGPGSQPIESEDGHAAMWKKNSIFWELPYWKFLDVRHAIDMMHLTKNLCVNLLGFLGVYGKSKDTLEARNDLKHMEQHGDLHPEPKEKESHYLSPASYTLSKAEKESMFECLESIKVPSRYSTNIKRIISTKEKKFANLKSHDCHVLMTQLLPVVIXIDPDRLEALQNDVVQCLVSFELIFPPSFFNIMTHLLCHLVKEIGILGTVYLHNMFPFERYMGVLKRYVRNRARPEACIANGYGTEEVIEFCVEFIEDLRPIGVPESRHEGRLRGKGSLGRKAIMMVDNNLFCKAHFTVLQQSSLVAPYIEEHLALVRARNIGKSDAWVTRXINQQLAFLARGPSGLIAAFQGYEINGYTFYTRAQEMKSMNQNSAVRIDAMGHDGTTGTYYGAIEDIWELDYGPLKVPLFRCQWVRLTGGDITIDDSGXTTVDFNKVGYSDEPFVLANDVTQVFYVKDMSSKGKKGKGPDEPKRHVVLPVHSRLLHQHLDVFPSRLLLRRHRA

SEQ ID NO: 118396 - protein, 1366 aa, Oryza sativa
  unsure (1)..(1366): unsure at all Xaa locations
  Clone ID: PAT_MRT4530_21711C.1.pep
MDRQWMYADRRSKEFIDGAHYFLRVAEANRQRGFICCPCNKCKNQKEYSASRTIHFHLFESGFRPSYNCWTSHGEQGVEMEEDEVEDDNIPDFAQYVGFGGNQTGEEERDADGCEQGHKKLDTTLEFLQWKAKNGVSDKAFGDLLKLVKNILPEGNKLPETTYKAKKIVCPLGLEVQKIHACLNDCILYRGEEYENLEACPVCKALRYKIRRDDPREVDGQLTKKRIPAKVMWYFPIIPRLRRLFRNKGNARMMRWHAEERQQDGMLRHPADGSQWRNIDRKFKEFGKDARNIRFGPKQPGNDIDVYLRPLVEDLKLLWKKEGVVYMGHHRFLAANHPVRKKGKHFEHKVDHRTKPKHRSGKTVFAMVKDLKVVFGKGPGSQPIESEDGHTAMWKKNSIFWELPYWEFLNVRHAIDVMHLTKNLCVNILGFLGVYGKSXKIHWKHHMKQRGDLHPEPKEKGSHYLRPASYTLSKAEKESMFECLESIKVPSGYSTNIKRIISTKEKKFTNLKSHDCHVLMTQLLPVVIRGILPDNVRATITKLCAFMNAISQKVIDPDRLEALQNDVVQCLVSFELIFPPSFFNIMTHLLCHLVKEISILGPVYLHNMFPFERYMGVLKKYVCNRAHPETSIAKGYGTEEVIEFSVEFIEDHRPIGVPESRHEGRLREKGTLGRKAIMTVDNNLFRKAHFTVLQQSSLVAPYIEEHLALVHARNIDQWVHILHESQNSAVRVDAMGHDGTTGTYYGAIEDIWELDYGPLKVPLFRCQWVRLTGGGVMIDDSGMTTVDLNKMADCDEEHILYDTIAEGSSQYWNEEEGNEDPNQYLNEEGNVERDAEGNQEGHVKRDVEGNQEEEASGNIHPSRGYRGQSEKVDSEENGRXQFQSFKGDLYQKYILKGQTPNFDTFPKLRDHWDEFVAYKTGEQGQAMMERNKENAAKKKYHHHLGSGGYTVAMPKWEEMEASLLERADGSLVFGDQIREAAHRLTDAVEASSQGTFRPDREKNELSLALQTPEHPGRTRGKGVIPWKIGFKEGIHTYRSQMRSKRDTEAKIADLEFRVSSYKLSMQEEVARKVDERMAAHRSHDPKLTIPPAMVSPSGNHSSCASTGQVASGMAIPTDPSGTXTAGRFQQDTPRSKLSWSKVRTRTSSWITLEEMLLFRHLPXSRAPQAPPPAPTRATKKAKVDATKNKDPGYDCTQEELEAYVASEVKRQFKPRSPEKKIPIDPSVRNFFRGMSAPAKEAIKLSDYERTLKKASSGKSKPVPQLGEQPNQEIEPLVTGKDFGIQEFINDTGLTTDQLLGDAPIEKAEVKYMYELGKPLVKPELLQSLPTQIYKFHQLYMEMSATGREMIGARVRDTDFLQGDDIL

SEQ ID NO: 118397 - protein, 378 aa, Oryza sativa
  unsure (1)..(378): unsure at all Xaa locations
  Clone ID: PAT_MRT4530_21712C.1.pep
RCHATKAHHHKWTKSPHKLISVMCMMATAAQCPHLHAHRNEFHVSSFSACPKGRIHDNSVNKKAYFNRQQNGHQELHLVDXHSTMSLTAMNTILHLLVDLFFPLQPTMILAMSTTLKEEKRMLSSSIGLRRLFXKASPHLPLFTPKSEVSASGKSLKKANVVKGQWTLEEDRKLVKLVEQFGLRKWSHIAQILPGRVGKQCRERWHNHLRPNIKKDTWSEEEDIVLIQTHKEVGNKWAEIAKHLPGRTENSIKNHWNATKRRQFARRRSRASSKNPKSGTLLQNYIKSLGIGPIKSSVRQAPPESTAVSSSSPASTQKLAEVNGKIRPDSNPSNQMVTQGILTMDENSYIQTNSCEELLVSTYDDLCLDMCDHLFETK

SEQ ID NO: 118398 - protein, 94 aa, Oryza sativa
  Clone ID: PAT_MRT4530_21713C.1.pep
MGTGKEVPSLAVTPTVASQGGTEENEERKGRGKEERGKGVGGATTAAPPSPVAATRADVAGEHSLGAAVAVDVLVQPANVILLSTLSMAAASTC

SEQ ID NO: 118399 - protein, 301 aa, Oryza sativa
  Clone ID: PAT_MRT4530_21714C.1.pep
MSESEVSVINQLEEEETRLELPPGFRFHPTDEEVVTHYLTRKAQDRSFSCVVIADVNLNNCEPWDLPSKAKMGEKEWFFFCHKDRKYPTGMRTNRATASGYWKATGKDKEIFRGRGLLVGMKKTLVFYMGRAPRGEKTPWVMHEYRLDGKLPPNLPRSAKEEWAVCRVFNKDLAAKIAQMPPPPFPRNDSFDLDLDDFLHLDADLPPLIDDPFASTSTLKTEPPPPANLMHNHYGYFSLPASATNYNHSSGAMADQAIRRFCKAEASTACFSGADADVDPVVDELLSFPDSITDYSYIWKA

SEQ ID NO: 118400 - protein, 153 aa, Oryza sativa
  unsure (1)..(153): unsure at all Xaa locations
  Clone ID: PAT_MRT4530_21715C.1.pep
PRVRKGILSGASFNEAGRMQERKIHCGLLLGADGARSTVRELAGIHMKGQRDLQKLVSVHFRSKDLGKYLSRERPGMLFFIFNPGAIGVLVAHDLEHGEFVLQIPFYPPQQMFEDFSTXICEEIIVKLVGWEPSDGQVLDIKPWVMHAEVAEK

SEQ ID NO: 118401 - protein, 134 aa, Oryza sativa
  unsure (1)..(134): unsure at all Xaa locations
  Clone ID: PAT_MRT4530_21716C.1.pep
QGDGDARRRDGAARRWDGGHDGDSARHGRGSRLVGDGGDAMARQQHGARRGAGNSNGDMSGAXSARRSRRRRQHELRGDRRRRRATATRAARQGRGARGGATATARAEGRGLRRRDAMMATATWPATRRRWDGA

SEQ ID NO: 118402 - protein, 55 aa, Oryza sativa
  Clone ID: PAT_MRT4530_21717C.1.pep
MAIGPAAMTGVGGAVGDQTRASTPVRPEVFDWSDWCIYSAPKEMEVEVEVEVELC

SEQ ID NO: 118403 - protein, 132 aa, Oryza sativa
  Clone ID: PAT_MRT4530_21718C.1.pep
QLSFELIEFLLVGLTNLSSIVIRIKPDRRSDRGKPGQTGLAFGDGLRRGPLSKVHQKSLEKDGDSTLGSDLCLPYHKNDTRGGQLSFELIDFLLVGLTKSLEKDGDSTLGRTVESCTRYPPHHRFASVGLRH

SEQ ID NO: 118404 - protein, 71 aa, Oryza sativa
  Clone ID: PAT_MRT4530_21719C.1.pep
TAEAILDRISRNSELLLQCIILVMCFKSSSLSCVTAGVLAVGLAEDSVGESGGQCARAPGGRLHGGEAGED

SEQ ID NO: 118405 - protein, 549 aa, Oryza sativa
  unsure (1)..(549): unsure at all Xaa locations
  Clone ID: PAT_MRT4530_2171C.1.pep
HLHFVCLQMTMVLLETLRLYNPALFIQRKPTADIXGGIAWRSPPAVAVYIPVPIMHRDREVWGHDAGEFNPLRFRDGAARAAAAAGIPHALLSFSIGPRSCIGQGFAMLEAKAAMAAMLRRLSFRVSPGYVHAPVDLITLKPKFGLPVIATGGDGEGGGGGFGIGRGWLRRRRRVTGCFDGGSNWRPASFLTTAGDGGGQAASALTVDPLVLLFRLPLFPSLPVLRSSVATAAKQTVAAGHIRCRRAAVSIVFAGSRHHRWVRRGEGKLGHPSFSVAGYRSSAAPCKPSRRRRPFVAGHRRLSFGSWHSSLRGARLRSGEKSVGVAGESMPLVFEGRLRLVTVTVKRRWEATVVVVAQLLTGRGPDEEGWSLLLVENLQLLVLLITSLAVLVGCGITLLVCHSSISTPATKPQEAHPRALTPAKKKQETKPDPARKRRRWRGFIFIRVSPHYKTVYSYAWCGGEAAGVVAAGKESAASSAAAAAGCRTPGGGGAREGGRGAAVAGECPGAPRKRRAAPGPVSQMQEQHRQRRDFYSGPDVDAFFAAHNL

SEQ ID NO: 118406 - protein, 137 aa, Oryza sativa
  unsure (1)..(137): unsure at all Xaa locations
  Clone ID: PAT_MRT4530_21720C.1.pep
CAKTRRRISTLEIGMASPLRCLRRLLGETXALSLILPGTDSRRKTTMLSTTSQNFRPPCRQQLDRLPQILYCFSLTTFINVLNPSPKCQLVQRYVVLSEKRLVWTLPIVKLWSKYMVQCEIYCSNNDTHNPYTQVKV

SEQ ID NO: 118407 - protein, 141 aa, Oryza sativa
  Clone ID: PAT_MRT4530_21721C.1.pep
MAVADVAFKALTAGLGVATLYLAGTFSVNVYRGLSWHSEQSVSKTLARLDHQTLDFSPPLAGEPLIRGPSPTIWCYSLHLPCRISPLPLGLGRGFGWISFDLCSVVFFLHRPMPAKLEHVWPFDLMRAHIFLRDAAVLCRS

SEQ ID NO: 118408 - protein, 56 aa, Oryza sativa
  Clone ID: PAT_MRT4530_21722C.1.pep
MDDHQTQDLVKELVHRLISAESGGGGRDAGGALRFATGCSRAASRQPSSRRARARG

SEQ ID NO: 118409 - protein, 144 aa, Oryza sativa
  Clone ID: PAT_MRT4530_21723C.1.pep
MAALNHQPHTPRRLRRPHLLEPAPKEPQQPPQAAARPDEAPHHRQPAPDRPSAAPEPGGAGGVARLGTVSVVVLSSPKAAREALKVHDPECCSRSPSAGPRMLSYGYKDVAFSPYSNYVRNMRKLFVVELLSMRRVQAACYGPF

SEQ ID NO: 118410 - protein, 339 aa, Oryza sativa
  Clone ID: PAT_MRT4530_21724C.1.pep
MLTTSSHSRHHHAFERSPNHSMMKNIADRNKHDLLQSAMNHAASKYMQRIYPLGIQRSSSNLTLSSLSLSQNSNDSSLSSSNSSWEPKVPLLYGGTFSPWGDVLVSLERRREEDDDKVSDHDVEGGEEDFDCSEPGSLHRCSWITKNSDEAYVQFHDECWGVPVYNDNRLFELLALSGMLIDHNWTEILKRRDMYREAFADFDPSTVAKMDENDVAEISGNKELKLAECRVRCIIENAKCIQKVAKEFGSFSGYIWGHVNHRPTVGRYKHHKYIPFRTPKSEAVSKDLVRRGFRLVGPVIVYSFMQASGIVIDHLVDCFRFPECLHLADRSWGITNVAA

SEQ ID NO: 118411 - protein, 112 aa, Oryza sativa
  unsure (1)..(112): unsure at all Xaa locations
  Clone ID: PAT_MRT4530_21725C.1.pep
SPSPTPSSPTSTLTTPPSTLPPQAPXPAPPPPPPRPLSALPAARRRFAALPLRSAAXARPPSTPPQPATASLLCRHAPPQRSPTACICACPSSLHPPLPSPAPSMAAGSPAP

SEQ ID NO: 118412 - protein, 44 aa, Oryza sativa
  Clone ID: PAT_MRT4530_21726C.1.pep
LVFFKKGGMILLQLHSTHGNNKECPKGIARSSLLLSNITNEGQH

SEQ ID NO: 118413 - protein, 44 aa, Oryza sativa
  Clone ID: PAT_MRT4530_21727C.1.pep
RPHCCRSFWLVFLLFAAIPASVLVSCIAGTLYLAISAKNCASEW

SEQ ID NO: 118414 - protein, 75 aa, Oryza sativa
  Clone ID: PAT_MRT4530_21728C.1.pep
VRHWDQSGFGKEFDSKNELCIGCEGIGWVMHQLRWMGQRTTDIADTADTTDFVEVSCKTASRLDQRAIQGLPRWR

SEQ ID NO: 118415 - protein, 1008 aa, Oryza sativa
  Clone ID: PAT_MRT4530_21729C.1.pep
MGVISRKVLPACGSLCYFCPGLRARSRQPVKRYKSILAEIFPKTQDEEPNERRIGKLCEYCSRNPLRVPKITVSLEQRIYKELRSEQYGFAKVVMLIYRRLLVSCKEQMPLFASSLLSIVHTLLDQKRQDDMRIIGCETLFDFAVNQVDGTYQFNLEGLVPRLCELSQEVGEDEQTIALRAAALQALSAMIWFMGELSHISSEFDNVVQVVLENYRPQKMQNDGQVTKDSSDQLEQEAPKTEDSKAEDSKTEDSSPFVISAVPLWENIVNHIEHKTMVKQQEMQLSIVEVAATLAEQSIAQASAATIGAISDLVRHLKRTFHITLGSKDSELVKWNEKFRKAIDDCLGQLAKKKVYQGYFVEQVTDAGPVLDMMAVMLENIASTPVVARSTAAAVYRTAQIIASVPNITYQNKVFPEALFHQLLLTMIHPDHEARVAAHRIFAIVLVPSSVAPSIQASVSGQAKKHDMQRTLSRAVSVFSSSAAIFDKLKKDKHSDNSQGDSSGLHSISEESSNAKRSNLPVSQSRRRSMKIPNFSMKRGPSMAMRAPSVALRAPSISLRVTSMSLRAPSMSIKADHGSSSHPEDEMESVLLKLSSRQITLLLSSIWAQATSPENTPANYEAIAHTYSLLLLFSGAKASVFEALTQSFQVAFSLRGYSLTEPDSLPPCRRRSLFTLATAMIIFSSRTFNVLPLIPICKQMLNERTGDPFLRLVDECKLQAVKDSVDDPSKIYGSPEDNTNALKSLSAIELSESQSRECIVSTIMNNITNMLEAELNSVKNQLLSDFSPDDMCPTSTHFFEATGDNSSPGSHDNDHHPEAVLIDLGNDHDIFGEASESTAASANAVPVTDLLSIDQLLETVCLALLNSFSMFLLYSSDEVVTDPAPHTERVSVSTDMPFKEMSSQCEALTVRKHQKMASFMSFSQDMTMDPMATNQPFQTDLSLFHDPYPPQVGVPNTNPFVDDNLYGYPQYMNMNEANPQPTYEQAQQHFLRLPASSPYDNFRRAAGC

SEQ ID NO: 118416 - protein, 1014 aa, Oryza sativa
  Clone ID: PAT_MRT4530_2172C.1.pep
VVLGRDNHQKELRGESVDGIVDAIDKGVTDGDSIGKRVILPASFTGGRRYMVMNYQDAMTICRVYGSLDLFVTYTCNSKWQEIAEAIRFEPSQQPSDRADIIVRVFNMKVNEFIADIREGRTFGKVLAGQDRAKIYFETIAKTTNASPNHDLAPRDEILEYMDARFVSTCEALHRLFEFDIHYRVPPVERLVVHLPGKNYVRYEKGSDLRAVLESPATKRSMLTEWFEANKKYSKARSLTYCEFPKEWSWESSSRVWCQRTPAAKIGRIYYVHPTASELYYLRMLLMIVKGAQSYVDVRTFNNIVYATFREACEARGLLEGDNEWYLLFDEAIVSASSQHLRQLFVTILLYCSVSDVRSLFNKYWLYMIDDIHSKLKKALDNPNCIIPPDHLLNLLLHELANVFANSGGNIKDFNLPHPSSVPHIPGICNVKRGTMLAELLIETALIIWDEAPMTHRRCFEALDRTLCDILSETCPLNSIIPFGGKPVVLGGDFRQILPVVPKGSRRAIINASVTNSDLWKHVTILTMNIKMRLLNTMLPKNEKKDMDDFSQWVLAVGDGTLPMIAKEGESYPTWITIPDDLLIITDGDKINAIVSEVYPDFLASYKNPEYLASRAIVCPNNTTVDEINDYIIGLLPGDAKIYSSCDTISKCSEQIPDFDLLYPPEFLNSIDATNFPTYRLILKEAAVVMLLRNLNQSIGLCNGTRLLVTDSNKRILARVSRLWNFTDLNDDTKIFHTDLVLLDEMGTSIHAQIYPPITEKMKPLLKEEKVYYIDSFTVRAANRTYRLVANNLMILFSKWTTLEEHINVPPHFPGITFSLTPFEDVPSLVEKKSFYVALAQTFNQSSGLMSLLQDTTRMYQKKRGTRFIVNVTVRRICNEYSWWYKVVLIASDDDANATFILFGRIAQRLLRRPVESLIEEKPPNSEYIPSEITSLIGSNFAWNVSFTRDTVMRSQECLQVNSIISAGASNQPLLLMSPDASQVTSAIVSASSSSSVQTAPTPNETSNESQQPI

SEQ ID NO: 118417 - protein, 174 aa, Oryza sativa
  unsure (1)..(174): unsure at all Xaa locations
  Clone ID: PAT_MRT4530_21730C.1.pep
MGALCSCLQADYSDHHGHHASPALGGCMCLRCFTQQLINAYTVLFRAGTVHAVSQSIEATPVDSSESSFDTYRSPPRPLPYDDPRFSPPQRDWLVSRHGPSCHSPEESEPLRANDDEEMETPSSTHKSSKTNYDTKMKRSSSTHGEKLPTKEPGNYFTYYYPSAEDXDVLPTCL

SEQ ID NO: 118418 - protein, 425 aa, Oryza sativa
  Clone ID: PAT_MRT4530_21731C.1.pep
MGVLKKYVRNRARPEASIAKAPYIEEHLALVRARNIGKSDAWITRHHIDTFPAWLRQHLMGNESINQQLAFLARGPSGSITTFQGYEINGYTFYTRAQDMKSTNQNSAVRVDAMGHDGTTATYYGAIEDIWELDYGPLKVPLFRCQWVRLTGGGVMIDDSGMTTVDLNKVGYSDEPFVLANDVTQVFFVKDMSSKGKKGRGPDEPKRQVVLPGKRKIVGVEDKTDEDYDQLDGQPPFTVTIDPSILLSNEDTPYSRSDHKEGTIVRRKSSSSSTRLAVGRQRLAKGRWRGSSSDLGGVKGPHAMLSRLALPTQPSAREPSKIRGGDEHIEQLEPRGRAAERRHGPHARCTDLLRNDGSGVADAELDEVGEDIDARAEVFGVGEQPLEDKVEVADGGDAEELLSMPSSCCLPAVATCHRPAADLID

SEQ ID NO: 118419 - protein, 1017 aa, Oryza sativa
  unsure (1)..(1017): unsure at all Xaa locations
  Clone ID: PAT_MRT4530_21732C.1.pep
WIGNGCTLTGGPKSLLTACTIFXRVAEANRQRGFICCPCNKCKNQKEYSASRTIHFHLFESGFMPSYNCWTSHGEQGFEMEEDEVEDDNIPDFTQYVGFEGNQTGEEERDADGNDVADDLCQMLQDAKEDCESEKGAHKLDKMLEDHKTSLYPGCEQGHKKLDTTLEFLQRKAKNGVSDKAFGDLLKLVKNILPEGNKLPETTYEAKKIVCPLGLEVQKIYACPNDCILYRGEEYENLEACAVCKALRYKIRRDDPGEVDGQLTKKRIPAKVMWYFPIIPRLRRLFRNKGNARMMRWHAEERQQDGMLRHPVDANHPVRKKGKHFEHKADHRTKPKHRSGKTVFAMVKDLKVVFRKGPGSQPIESENGHAAMWKKNSIFWELPYWEFLDVRHAIDVMHLTKNLCVNLLGFLGVYGMSKDTLEACNDLKHMEQRGDLHPEPKEKGSHYLSPASYTLSKAEKESMFECLESIKVPSGYSTNIKRIISTKEKKFTNLKSHDCHVLMTQLLPVVIRGILADNVRATITKLCAFMNAISQKISILGPVYLHNMFPFERYMGVLKKYVCNRARPEASIAKGYGTEEVIEFCVEFIEDLRPIRVPESRHEGRLRGKGTLGRKAIMTVDNNLFRKAHFMVLQQSSLVAPYIEEHLALVRARNIGVMIDDSGMTTVDLNKLGYSDEPFVLANDVTQVFFVKDMSSKGKKSRGPDEPKRHVVLPGKRKIVRVEDKTDEDYDQLDGQPPFTVTIDPSILLSNEDTPYSRSDHKEGTIVRRKKDVVGVVPQARVKRAHGQRGATKKLEGRHIITEVEEDGRPSAPAEAAKNYVRHSGWVMRDNVPVSTVYWRRTRARGDHESFVPDSEKEMLWTTMLETFTLPAGTEDKVKRWTLKKMAEQFQSFKGDLYQKYILKGQTPNFDTFPKLRDHWDEFVAYKTGEQGQAMMERNKENATKKKYHTTWGQAAIASRCRSGRRWRLACLRGVSNRPLLIGRNDRSSGTMLTVERSTQLMAHLSSAIRYERLRVD

SEQ ID NO: 118420 - protein, 123 aa, Oryza sativa
  Clone ID: PAT_MRT4530_21733C.1.pep
PPTTQSPSTLGVKPPCHPDGAWLTGEIAGENFLFNSPPPAARSAPCRHGATCSTAAMHVRVSGVAPSLCLPLRRSTGLDLCLQRSCYHDSYVFACVPRPRSTPSFPSRLVCVAVWSISYIPCL

SEQ ID NO: 118421 - protein, 1720 aa, Oryza sativa
  unsure (1)..(1720): unsure at all Xaa locations
  Clone ID: PAT_MRT4530_21734C.1.pep
MEEDEVEDDNIPDFAQYVGFEGNQTGKEEIAADGNDVADDLGQMLQDAREDCESEKEAHKLDKMLEDHRTSLYPGCEQGHKKLDTTLELLQWKAKNGDGMLRYPADGSQWRNIDRKFKEFGKDARNIRFGLSTDGMNPFGEMSSGHSTWPVTMCIYNLPPWLCMKRKYIMMPIIIQGPKQPGNDIDVYLRPLVEDLKQLWKKEGVPVWDEDKQEEFNLRALLFVTINDWPALSNLSGQSNKGYKACTHCMDETESTYLKHCRKVVYMGHRRFLAANHPVRKKGKHFEHKADHRTKPKHRNGKTVFAMVKDLKVVFGKGPGSQHIESEDGHAAMWKKNSIFWELPYWEFLDVRHAIDVMHLTKNLCVNLLGFLGVYGKSKDTLEARNDLKHMEQRGDLHPETKEKGSHYLSPASYTLSKAEKENNVRATITKICAFMNAISQKVIDPDRLEALQNEVVQCLVSFELIFPPSFFNIMTHLLCHLVKEICILGPMYLHNIFPFERYMGVLKKYVRNRARPEASIAKGYGTEEVIEFCVEFIEDLRPIGVPESRYEGRLRGKGTLGRKAITTVDNNLFRKAHFTVLQHSSLVAPYIEEHLALVRARNIGKSDAWITRHHIDTFPAWLRQHLMGNESINQQLAFLARGPSGSIATFQGYEINGYTFYTRAQDMKSTNQNSAVRVDAMGHDGTTATYYGAIEDIWELDYGPLKVPLFRCQWVRLTDGGVMIDDSGMTTVDLNKVGYSDEPFVLANDVTQVFFVKDMSSKGKKGRGPDEPKRQVVLPGKRKIVGVEDKTDEDYDQLDGQPPFTVTIDPSILLSNEDTPYSRSDHKEGTIVRRKPPPPSPRRRANRRPDAATPPLTNENENDRTNESENEHVNVRCRDNVNENENDRTNESENENDRTKTSENEGTNVNENERTNVNELGNGHVERDVEGNQEEEASGSQPSVGQKRARGQRGAAKKLEGRHIITEVEEDGRPSAPAEAAKNYVRHSGWVVRDNVPVSTVYWRRTRARGDHESFVPDSEKEMLWTTMLETFTLPAGTEDKVKRWTLKKMAEQFQSFKGDLYQKYILKGQTPNFDTFPKLRDHWDEFVAYKTGEQGQAMMERNKENAAKKKYHHHLGSGGYSVAMPKWEQMEASLIERGIEPATANWPERSKFWYYAHGGTLNPADGSLVFGYQIQEAARRLTDAVEASSQGTFRPDRDRDELTLALQTPEHPGRTRGKGVIPWKIGFKEDIHTYRSRMRSKRDTEAKIADLEFRVSSYELNMQEEVARKVDERMAAHRSHDPQPTIPPAMVSPSGNRSSCASTGQVASGMAIPTDPSGTYHCRPIPAGYSKVKVELVEGAYEDLELDYPGGDGXYIILPGRQAASXAPASTPQDPAPTPPRAPTPTPPQAPLPAPSKSRAPPAPPLAHTRATKKAKVDAAKNKDPGYDCTQEELDAYVASEVKRQFKPRSPEKKIPIDPSVRNFFRGMSASVKEAIKLSDYERTQKKASSGKSKPVPQLGEQPNQEIEPLVTGKEMTIEQFITDTGLTTDQLLGVAPIEKAEVKYMYELGKPLVKPELLQSLPTQMYKFHQLYMEMSATGREMIGARIRDTDFLQGDDILWINFRGIYELYQLDALDVSIMSCWILMEIQRARRRRVFDTGFIDPRKVNVAMLDQYPQETEDNLVHLLKAQHYKTFILLPYNTEFHWVLLLIDLEACTVNVSWSQTAAYENGNGRQIS

SEQ ID NO: 118422 - protein, 520 aa, Oryza sativa
  Clone ID: PAT_MRT4530_21735C.1.pep
MLASCRRVRLRFRSALATAAASPVEASISTSDSDVDPESHGPADATLLRRRMRASAAEGNLAAALDALALLRPAPAGAHDYNALLHAYLRSGQAAAQHVAAAEHVAAVLCHMRSVGPAPNALTFNTAFNGLLRLGHLDASHAVLEEMWSRCGFVPSFTTVDRLIKKAVSGSNFELALKVFDLMLSLCYFPTLPIANAIVSILLKSGSAEIAYEVFMVLVNRKFVPDVYMYNQILFGLCKSGCSNKALTLFCNLKKRGLSLNVYSYTALVLGLCKEKMWADAYRALEKMCDEECKPSVVTYTVIVNFLCRDGKIDAAMHVFRMACKNGCCLDSTICNVLLHALCCEDRIPEARVIVDLMEEAGLVPDYFTISSLAAGFLKTGDVMTCQNFIRMVKKALALVSGMMERGLVPSTTTYNTILKGFCMELDLQGALQMLDHFSSTGVPCDSVSFNTILSAACRQQNASVIRMVLYRMHVEGINLDAISMTCLLRYFHKCGKFAESVNLVESLRIQGSLLFVHGT

SEQ ID NO: 118423 - protein, 955 aa, Oryza sativa
  Clone ID: PAT_MRT4530_21736C.1.pep
MDRQWMYADRQPRKFIDGVHYFLRVAEANRHKGFICCPCNKCKNQKEYSASRTIHFHLFESGFMPSYNCWTSHGEQGVEMEEDEVEDDNIPDFAQYAGFEGNQTGEEERDADGNDVADDLGQMLQDAKENCESEKNKGNARIMRWHAEERQQDRMLRHPANGSQWRNIDRKFKDFEKDARNIWFGLSKDGMNPFGEMSSGHRTWPVTMCIYNLPPWLCMNRKYIMMLIIIQGPKQPGNDIDVYLRLLVEDLKLLWKKEGVPVWDEDKQQEFNLRALLFITINDWPALSNLSESTYLKHCKKVVYMGHRRFLARNHPVRKKGKHFEHKADHRTKPKHRSRKTVFAMVKDLKVVFGKGPQSQSIDSQDGHAAMWKKNSIFSELPYWEFLDIRHAIDVMHLTKNLCVNLLGFLGVYGKSKDTLEARNDLKHMEKRGDLHPEPKEKGSHYLSPASYTLSKAEKESMFECLESIKVPSGNSTNIKRIISTKEKKFTNLKSYDCHVLMTQLLPVVIRGILPDNVRATITKLCAFMNGILQKVIDPDRLEALQNDVVQCLASFELIFPPSIFNIMTHLLCHLVKEISILRPVYLHNMFPFERYMGVLKKYVRNRARPEASIAKGYGTEEVIEFCVEFIEDLRPIGVPESRHEGRLRGKGTLGRKAIKTVDNNLFRKAHFTVLQQSSLVAPYIEEHLALVRARNIAKSDARITRHHIDTFPAWLRQHLMGNETINQQLVFLARGPFGSIATFQGYEINGYTFYTRAQDMKSTNQNSAVCIEAMGHDGTTGTYYGAIEDIWELDYGPLKVPLFRCQWVRLTGGGVMIDDSGMTTVDLNKVGYSDEPFVLANDVTQVFYVKDMSSKGKKGRGPDEPKRHVVLPGKRKIVGVEDKTDEDYDQLDGQPPFTVTIDPSILLPNEDTPYSHIDHKEGTIVRRKYVRSTVTADVLPGKISLVPVDENNRE

SEQ ID NO: 118424 - protein, 944 aa, Oryza sativa
  Clone ID: PAT_MRT4530_21737C.1.pep
MDRQWMYADRRSKEFIDGVHYFLRVAEANRQRGFICCPCNKCKNQKEYSASRTIHFHLFESGFMPSYNCWTSHGEQGVEMEEDEVEDDNIPDFAQYVGFEGNQTGEEEIAADGNDVADELGQMLQDAREDCESEKEAHKLDKMLEDHRTSLYPALRYKIRRDDPGEVDGQLTKKRIPAKVMWYFPIIPRLRRLFRNKGNARMLRWHAEERQQDGMLRHPADGSQWRNIDRKFKEFGKDARNIRFGVPVWDEDKQEEFNLRALLFVTINDWPALSNLSGQSNKGYKACTHCMDETESTYLKHCRKVVYMGHRRFLAANHPVQKKGKHFEHKADHRMKPKHRSGKTVFAMVKYLKVVFGKGPGSQHIESEDGHAAMWKKNSIFWELPYWEFLDVRHAIDVMHLTKNLCVNLLGFLGVYGKSKDTLEARNDLKHMEQRGDLHPEPKEKGSHYLSPASYTLSKAEKESMFECLESIKVPSGYSTNIKRIISTKEKKFTNLKSHDCHVLMTQLLPVVIRGILPDNVRATITKLCAFMNAISQKVIDPDRLEALQNEVVQCLVSFELIFQPSFFNIMTHLLCHLVKEIRILGPMYLHNMFPFERYMGVLKKYVRNRARPEASIAKGYGTEEVIEFCVEFIEDLRPIGLPESRHEGRLRGKGTLGRKAIMTVDNNLFRKAHFTVLQHSSLVAPYIEEHLALVRARNIGKSDAWITRHHIDTFPAWLRQHLMGNESINQQLAFLARGPSGSITTFQGYEINGYTFYTRAQDMKSTNQNSAVRVDAMGHDGTTATYYGAIEDIWELDYGPLKVPLFRCQWVRLTGGGIMIDDSGMTTVELNKVGYSDEPFVLANDVTQVFFVKDMSSKGKKGRGPDEPKRQVVLPGKRKIVGVEDKTDEDYDQLDGQPPFTVTIDPSILLSNEDTPYSRSDHKEGTIVRRKYVRSTVTADVMP

SEQ ID NO: 118425 - protein, 92 aa, Oryza sativa
  Clone ID: PAT_MRT4530_21738C.1.pep
DEMDECPRPLQLWRLPHACVVQRTLFELCCLPHGELTLPIGEGLSSGLDRLLQNTDLLLSMGLLAFIYSIPSSNDSYRRDLLLPSICIRFCT

SEQ ID NO: 118426 - protein, 954 aa, Oryza sativa
  unsure (1)..(954): unsure at all Xaa locations
  Clone ID: PAT_MRT4530_21739C.1.pep
MDRQWMYADRRSKEFIDGVHYFLRVAEANRQRGFICCPCNKCKNQKEYSASRTIHFHLFESGFMPSYNCWTSHGXMLQDAREDCESEKEAHKXWKAKNGVSDKAFGDLLKLVKNILPGGNKLPETTYEAKKIVCPLGLEVHKIHACPNDCILYRGEEYENLEACPVCKALRYKIRRDDPGEVDGQLTKKRIPAKVMWYFPIIPRLRRLFRNKGNARMLRWHAEERQQDGMLRHPADGPKQPGNDIDVYLRPLVEDLKQLWKKEGVPVWDEDKQEEFNLRALLFVTINDWPALSNLFGQSNKGYKACTHCMDETESTYLKHCRKVVYMGHRRFLAANHPVRKKGKHFEHKADHHTKPKHRSGKTVFDMVKDLKVVFGKGPGSQHIESEDGHAAMWKKNSIFWELPYWEFLDVRHAIDVMHLTKNLCVNLLGFLGVYGKSKDTLEARNDLKHMEQRGDLHPEPEEKGSHYLSPASYTLSKAEKESMFECLESIKVPSGYSTNIKRIISTKEKKFTNLKSHDCHVLMTQLLPVVIRGILPDNVRATITKICAFMNAISQKVIDPDRLEALQNEVVQCLVSFELIFPPSFFNIMTHLLCHLVKEIRILGPMYLHNMFLFERYMGVLKKYVRNRARPEASIAKGYGTEEVIEFCVEFIEDLRPIGVPESRHEGRLRGKGTLGRKAITTVDNNLFRKAHFTVLQHSSLVAPYIEEHLALVRARNIGKSDAWITRHHIDTFPTWLRQHLMGNESINQQLAFLARGPSGSIATFQGYEINGYTFYTRAQDMKSTNQNSAVLVDAMGHDGTTATYYGAIEDIWELDYGPLMVPLFRCQWVRLTGGGVMIDDSGMTTVDLNKVGYSDEPFVLANDVTQVFFVKDMSSKGKKGRGPDETKRQVVLPGKRKIVGVEDKTDEDYDQLDGQPPFTVTIDPSILLSNEDTPYSRSDHKEGTIVRRKYVP

SEQ ID NO: 118427 - protein, 148 aa, Oryza sativa
  Clone ID: PAT_MRT4530_2173C.1.pep
MLNKNPKSLALSCWSTCLSFGDSNKRIHARVSRLWNFTDLNDDTKIFHTDLVLLDEIGTSIHAQIYPPITEKMKPLLKEEKVYYIDSFTIRAANRTYRPVANNLMILFSKWTTLEEHINVPPHFPSITFSLTPFEDVPSLVEKNSFYV

SEQ ID NO: 118428 - protein, 1079 aa, Oryza sativa
  Clone ID: PAT_MRT4530_21740C.1.pep
MDRQWMYADRQSKEFIDGVHYFLRVAEANRQRGFICCPCNKCKNQKEYSASRTIHFHLFESGFMPSYNCWTSHGEQGVEMEEDEVEDDNIPDFAQYVGFEGNQTGEEEIAADGNDVADDLGQMLQDAREDCESEKEAHKLDKMLEDHRTSLYPGCDDKAFGDLLKLVKNILPGGNKLPETTYEAKKIVCLLGLEVHKIHACPNDCILYRGEEYENLEACPVCKALRYKIRRDDPGEVDGQLTKKRIPAKVMWYFPIIPRLRRLFRNKGNARMLRWYAEERQQDGMLRHPADSSQWRNIDRKFKEFGKDARNIRFGLSTDGMNPFGEMSSGHSTWPVTMCIYNLPPWLCMKRKYIMMPIIIQGPKQPGNDIDVYLRPLVEDLKQLWKKEGVPVWDGDKQEEFNLRALLFVTINDWPALSNLSGQSNKGYKACTHCMDETESTYLKHCRKVVYMGHRRFLAANHPVRKKGKHFEHKANHRTKPKHRSGKTVFAMVKDLKVVFGKGPGSQHIESEDGHAAMWKKNSIFWELPYWEFLDVRHAIDVMHLTKNLCVNLLGFLGVYGKSKDTLEARNDLKHMEQRGDLHPEPKEKGSHYLSPASYTLSKAEKESMFECLESIKVPSGYSTNIKRIISTKEKKFTNLKSHDCHVLMTQLLPVVIRGILPDNVRATITKLCAFMNAISQKVIDPDRLEALQNEVVQCLVSFELIFPPSFFNIMTHLLCHLVKEIRILGPMYLHNMFPFERYMGVLKKYVRNRARPEASIAKGYGTEEVIEFCVEFIEDLRPIGVPESRHEGRLRGKGTLGRKAITTVDNNLFRKAHFTVLQHSSLVAPYIEEHLALVRARNIGKSDAWITRHHIDTFPAWLRQHLMGNESINQQLAFLARGPSGSIATFQGYEINGYTFYTRAQDMKSTNQNSAVLVDAMGHDGTTATYYGAIEDIWELDYGPLKVPLFRCQWVRLTGGGVMIDDSGMTTVDLNKVGYSNEPFVLANDVTQVFFVKDMSSKGKKGRGPDEPKRQVVLPGKRKIVGVEDKTDEDYDQLDGQPPFTVTIDPSILLSNEDTPYSRSDHKEGTIVRRKYVP

SEQ ID NO: 118429 - protein, 935 aa, Oryza sativa
  unsure (1)..(935): unsure at all Xaa locations
  Clone ID: PAT_MRT4530_21741C.1.pep
MDRQWMYADRRSKEFIDGVHYFLRVAEANRQRGFICCPCNKCKNQKEYSASRTIHFHLFESGFMPSYNCWTSHGEQGVEMEEDEVEDDNIPDFAQYVGFEGNQTGEEEIAADGNDVADDLGQMLQNAREDCESEKEAHKLDKMLEDHRTSLYPGCEQGHKKLDTTLELLQWKAKNGVSDKAFGDLLKLVKNILPGGNKLPETTYEAKKIVCPLGLEVYKIHACPNDCILYRGEEYENLEACPVCKALRYKIRRDDPGEVDGQLTMKRIPAKDGMLRHPADGSQWRNIDRKFKEFGKDSRNIRFGPKQPGNDIDVYLRPLVEDLKQLWKKEGVPVWDEDKQEEFNLRALLFVTINDWPALSNLSGQSNKGYKACTHYMDETESTYLKHCRKVVYMGHRRFLAANHPVRKKGKHFEHKADHRTKPKHRSGKTVFAMVKDLKVVFGKGPGSQHIESEDGHAAMWKKNSIFWELPYWEFLDVRHAIDVMHLTKNLCVNLLGFLGVYGKSKDTLEALVIRGILPDNVRETITKLCAFMNAISQKVIDPDRLEALQNEVVQCLVSFELIFPPSFFNIMTHLLCHLVKEIRILGPMYLHNMFPFERYMGVLKKYIRNRARPEASIAKGYGTEEVIEFCVEFIEDLRPIGVPESRHEGRLRGKRTLGRKAIMTVDNNLFRKAHFTVLQHSSLVAPYIEEHLALVRARNIGKSDAWITRHHIDTFPAWLRQHLMGNESINQQLAFLARGPSGSITTFQGYEINGYTFYTRAQDMKSTNQNNAVRVDAMGHDGTTATXTVPSRTYGNLTMVLSRLIGGGVMIDDSGMTTVDLNKVGYSDEPFVLANDVTQVFFVKDMSSKGKKGRGPDEPKRQVVLLGKRKIVGVEDKTDEDYDQLDGQPPFTVTIDPSILLSNEDTPYSRSDHKEGTIVRRKYVRSTVTADVMP

SEQ ID NO: 118430 - protein, 1139 aa, Oryza sativa
  Clone ID: PAT_MRT4530_21742C.1.pep
MATAAQNAEGAAFPSCGFGGWFCSRGADVASGKKQPLQGLDHRVMVALMDRKWMYADRRSKEFIDGVHYFLRVAEANRQRGFICCPCNKCKNQKEYSASRTIHFHLFESGFMPSYNCWTSHGEQGVEMEEDEVEDDNIPDFAQYVGFEGNQTGEEEIAADGNDVADDLGQMLQDAREDCESEKEAHKLDKMLEDHRTSLYPGCEQGHKKLDTTLELLQWKAKNGVSDKAFGDLLKLIKNILPVGNKLPETTYEAKKIVCPLGLEVHKIHACPNDCILYRGEEYENLEACPVCKALRYKIRRDDPGEVDGQLTKKRIPAKVMWYFPIIPRLRRLFRNKGNARMLRWHAEERQQDGMLRHPADGSQWRNIDRKFKEFGKDARNIRFGLSTDGMNPFGEMSSGHSTWPVTMCIYNLPPWLCMKRKYIMMPIIIQGPKQPGNDIDVYLRPLEGVPVWDEDKQEEFNLRALLFVTINDWPALSNLSGQSNKGYKACTHCMDETESTYLKHCRKVVYMGHRRFLAANHPVRKKGKHFEHKADHRTKPKHRSGKTVFAMVKDLKVVFGKGPGSQHIESEDGHAAMWKKNSIFWELPYWEFLDVRHAIDVMHLTKNLCVNLLGFLGVYGKSKDTLEARNDLKHMEQRGDLHPEPKEKGSHYLSPASYTLSKAEKESMFECLESIKVPSGYSTNIKRIISTKEKKFTNLKSHDCHVLMTQLLPVVIRGILPDNVRATITKICAFMNAISQKVIDPDRLEALQNEVVQCLVSFELIFPPSFFNIMTHLLCHLVKEIRILGPMYLHNMFPFERYMGVLKKYVRNRARPEASIAKGYGTEEVIEFCVEFIEDLRPIGVPESRHEGRLRGKGTLGRKAIKTVDNNLFRKAHFTVLQHSSLVAPYIEERLALVRARNIGKSDAWITRHHIDTFPAWLRQHLMGNESINQQLAFLARGPSGSIATFQGYEINGYTFYTRAQDMKSTNQNSAVRVDAMGHDGTTATYYGSIKDIWELDYGPLKVPLFRCQWVRLTGGGVMIDDSGMTTVDLNKVGYLDEPFVLANDVTQVFFVKDMSSKGKKGRGPDEPKRQVVLPGKRKIVGVEDKTDEDYDQLDGQPPFTVTIDPSILLSNEDTPYSRSDHKEGTIVRRKYVP

SEQ ID NO: 118431 - protein, 66 aa, Oryza sativa
  Clone ID: PAT_MRT4530_21743C.1.pep
LIRVSISCAIQYLKKKSGQVRVPVCKQALHTGTLTMAGRMGHGLRVPLDWDFKRSFPMRTKCTISD

SEQ ID NO: 118432 - protein, 33 aa, Oryza sativa
  Clone ID: PAT_MRT4530_21744C.1.pep
ISAYLKLVILKIIVSEAFDLKYVYYFILLYRKT

SEQ ID NO: 118433 - protein, 1214 aa, Oryza sativa
  unsure (1)..(1214): unsure at all Xaa locations
  Clone ID: PAT_MRT4530_21745C.1.pep
MDRQWMYADRRSKEFIDGVHYFLRVAEANRQRGFICCPCNKCKNQKEYSASRTIHFHLFESGFMPSYNCWTSHGEQGVEMEEDEVEDDNIPDFAQYVGFEGNQTGEEEIAADGNDVADDLGQMLQDAREDCESEKEAHKLDKMLEDHRTSLYPGCEQGHKKLDTTLELLQWKAKNGVSDKAFGDLLKLVKNILPGGNKLPETTYEAKKIVCPLGLEVHKIHACPNDCILYRGEEYENLEACPVCKALRYKIRRDDPGEVDGQLTKKRIPAKVMWYFPIIPRLRRLFRNKGNARMLRWHAEERQQDGMLRHPADGSQWRNIDRKFKEFGKDARNIRFGLSTDGMNPFGEMSSGHSTWPVTMCIYNLPPWLCMKRKYIMMPIIIQGPKQPGNDIDVYLRPLVEDLKQLWKKEGVPVWDEDKQEEFNLRALLFVTINDWPALSNLSGQSNKGYKACTHCMDETESTYLKHCRKVVYMGHRRFLAANHPVRKKGKHFEHKADHRTKPKHRSGKTVFAMVKDLKVVFGKGPGSQHIESEDGHAAMWKKNSIFWELPYWEFLDVRHAIDVMHLTKNLCVNLLGFLGVYGKSKDTLEARNDLKHMEQRGDLHPEPKEKGSHYLSPASYTLSKAEKESMFECLESIKVPSGYSTNIKRIISTKEKKFTNLKSHDCHVLMTQLLPVVIRGILPDNVRATITKLCAFMNAISQKVIDPDRLEALQNEVVQCLVSFELIFPPSFFNIMTHLLCHLVKEIRILGPMYLHNMFPFERGKHRQXGYGTEEVIEFCVEFIEDLRPIGVPESRHEGRLRGKGTLGRKAITTVDNNLFRKAHFTVLQHSSLVAPYIEEHLALVRARNIGKSDAWITRHHIDTFPAWLRQHLMGNESINQQLAFLARGPSGSIATFQGYEINGYTFYTRAQDMKSTNQNSAVRVDAMGHDGTTATYYGAIEDIWELDYGPLKVPLFRCQWVRLTGGGAMIDDSGMTTVDLNKVGYSDEPFVLANDVTQVFFVKDMSSKGKKGRGPDEPKRQVVLPGKRKIVGVEDKTDEDYDQLDGQPPFTVTIDPSILLSNEDTPYSRSDHKEGTIGKSPRRRRRISPSSRARRPRRRLRLLRCRRISGVRAAAARSPFMHLDLSDLDPGHVAEPSLSGAASMRATTPPAQSMPHRHQAPPPALDAPHITPPPPSAPTATVCRRHPPPPPPNTSFNPLNPLRRKTLKLGTE

SEQ ID NO: 118434 - protein, 74 aa, Oryza sativa
  unsure (1)..(74): unsure at all Xaa locations
  Clone ID: PAT_MRT4530_21746C.1.pep
IGTGDKSKGKGGPFTKKGYTIIFPRSTKTKAIHIIRRGKKRRGGXELGTRGVQGKGPLAPFINLNLRGKKGGYS

SEQ ID NO: 118435 - protein, 641 aa, Oryza sativa
  Clone ID: PAT_MRT4530_21747C.1.pep
NFPNFRFFLASPHHTTPPHLPSHHPPFPPSRANTPAARSPDRDRDGSAAAAAMGGEAGERRLGRAMSFGIPDVALGLVMGFVEDPWDRDAISLVCRHWCRVDALSRKHVTVAMAYSTTPDRLFRRFPCLESLKLKAKPRAAMFNLIPEDWGGSASPWIRQLSASFHFLKALHLRRMIVSDDDLDVLVRAKAHMLSSFKLDRCSGFSTSSLALVARTCKKLETLFLEDSIIAEKENDEWIRELATNNSVLETLNFFLTDLRASPAYLTLLVRNCRRLKVLKISECFMLDLVDLFRTAEILQDFAGGSFDDQGQVEESRNYENYYFPPSLLRLSLLYMGTKEMQVLFPYGAALKKLDLQFTFLSTEDHCQLVQRCPNLEILEVRDVIGDRGLEVVAQTCKKLQRLRVERGDDDQGGLEDEHGMVTQVGLMAVAQGCPHLEYWAVHVTDITNAALEAIGTYSSSLNDFRLVLLDREANITESPLDNGVRALLRGCTKLRRFAFYVRPGALSDVGLGYIGEFSKTIRYMLLGNVGESDQGLLQLSTGCPSLQKLELRGCFFSERALAVAVLQLKSLRYLWVQGYKASPNGTDLMAMVRPFWNIEIIAPNQDEVCPDGQAQILAYYSLAGMRSDYPHSVIPLYPSV

SEQ ID NO: 118436 - protein, 111 aa, Oryza sativa
  Clone ID: PAT_MRT4530_21748C.1.pep
GDFAPPRGHTKAPLAWSPPGGFPLWFRAPPVVPPPGGSALAAPPSLLAQGPLWTPPPATRLGRAPDLAPGSFCWGPCFFVQPSPPPVYILPPRGGLLLSVYLKIKEQRTNC

SEQ ID NO: 118437 - protein, 79 aa, Oryza sativa
  unsure (1)..(79): unsure at all Xaa locations
  Clone ID: PAT_MRT4530_21749C.1.pep
TLDTGTAVLSAGRYEEAARHFTDAIALAPGNHVLYSNRSVALALVHRYSEALADAEKTVXLKPDWAKVVSRLGVAHLDF

SEQ ID NO: 118438 - protein, 179 aa, Oryza sativa
  unsure (1)..(179): unsure at all Xaa locations
  Clone ID: PAT_MRT4530_2174C.1.pep
MKEGSQDVESKAKVHPLVQGDDEIKGEQPNTDAPLGDSDSLSAASNDNKRVSREDIELVQNLIERCLQLYMNRGEVVRTLSTRARIEPGFTTLVWQKLEEENSEFFRAYYIRLKLKKQINLFNHLLEHQYHLMKYPVPQQVPLTPTQNGIRPMPVNNLPMXYPVLQQPXIPAPVQXHVN

SEQ ID NO: 118439 - protein, 183 aa, Oryza sativa
  unsure (1)..(183): unsure at all Xaa locations
  Clone ID: PAT_MRT4530_21750C.1.pep
XXKKXTSDPLRXXXPXXXXQXSXSGFASASXCXGSXDXXKXXHHSPAXGSSXXHNQHQXAXPDRPXXHXLSXXPGGGXGPXTNSSIFSXXQXGGGSXXSNXXHPSGSXIXXXXXTSHFFFFXXSXGRAPPXXXHXRCPHXFXFXXXXXLXLLXXSXLNFXYSXPXXNXLXHXKXXLXFXXKXK

SEQ ID NO: 118440 - protein, 277 aa, Oryza sativa
  Clone ID: PAT_MRT4530_21751C.1.pep
MKFGKRLKKQVEESLPEWRDKFLAYKRLKKLVRLVSSSSGDVGGGGGGEAEFVRLLDGEVDRINAFFLEQEEEFVIRQRELQETVEKVAGGGGGGRRPAAAEMRRVRKEIVDLHGEMVLLLNYSAVNYTGLAKILKKYDKRTGRLLRLPFIEKVLRQPFFTTELISRLVRDCEATMEAIFTSSVATTAMAGDRRTWKGCSGDAGMAPMADQQGIFRNTVAALATMKELRSGSSTYGRFSLPPMAAPASPESDVLQSIRSDPHLKENGRIPSLQFFYA

SEQ ID NO: 118441 - protein, 76 aa, Oryza sativa
  Clone ID: PAT_MRT4530_21752C.1.pep
AKGGKRDRAIKTQCLKKGTTFGGRLPEARKTHFEEAAPGEDNRAGKGGTECSCPPCNCGRRGTYLTEPSLKASHLT

SEQ ID NO: 118442 - protein, 448 aa, Oryza sativa
  unsure (1)..(448): unsure at all Xaa locations
  Clone ID: PAT_MRT4530_21753C.1.pep
MSSTAKAAAAGAVGAKSARACDGCLRRRARWYCAADDAFLCQGCDTSVHSANPLARRHERLRLRPSSPPPLVPPSGSGRRDEAVPAAWFKRKARTPRSHAAKSAAAFGQLLSRRLVVVPEAAAGSGGDSPEERKDEGEIVEEQEQLLYRVPIFDPALSEFCSPPPLEDAAAAVSCCNEDGAVENPTKPSMTTTTATTPPLQFFPDGQANFGPTDAELREFAADMEALLGRGLDDGNDEDSFCMETLGLIEPVDDDAGRVKVEADGDAGMTLAWCHELDTETSSGEMLDIDFDCGSPQAATTPDEKVGSSGPAAADDDAQLQQSNLALSLNYEAIIESWGTSPWTDGERPHVKLDDSWPRDYSGVWMAAAGVFGHGGEEQALTPRLGMDGGREARVSRYREKRRTRLFSKKIRYEVRKLNAEKRPRMKGRFVKRAAAXPPPPSPRRASR

SEQ ID NO: 118443 - protein, 54 aa, Oryza sativa
  Clone ID: PAT_MRT4530_21754C.1.pep
KRDVHLSCRMPRKYPHYTKSVLTEQDSISPPLRFNMPQNKMKNVGLIRQLNHLT

SEQ ID NO: 118444 - protein, 378 aa, Oryza sativa
  Clone ID: PAT_MRT4530_21755C.1.pep
MAIVDSRGSPNIGEGSGSSEWELGVRQLCDSGITTLPARYVLPPADRPARYVTPPALLPVVDLAALRARDPCQLAALHAACRDYGFFQLLNHGVPPDAMLYAARRFFFDLPLPARKRYMSADIRAAVRYGTSFNQLNDAVLSWRDFLKLLIRDTRRLADVLPSWPDAPDDLRPAAAAYATACQRLFRELMEAALDALGIVRCRRQLLEECDAGSQMMMVNCFPACPEPELTLGMPPHSDYGLLTILLQDEVRGLEVSYGDGGGWAVVEPLPGAVVVNVGDHLEILSNGLYRSVLHRVRVNGRRARVSVASLHSLAAERVIGPPAELVDEQRGRPRRYMDTDMAAFLAYLASAEGNHKSFLHSRRINTISSSGLTQPSN

SEQ ID NO: 118445 - protein, 41 aa, Oryza sativa
  Clone ID: PAT_MRT4530_21756C.1.pep
MKLGAYGHYLRSQDLGGRLQFVFRRVSDSLRTEFGLVSRLQ

SEQ ID NO: 118446 - protein, 586 aa, Oryza sativa
  unsure (1)..(586): unsure at all Xaa locations
  Clone ID: PAT_MRT4530_21757C.1.pep
MHLYQSFAPISPRVAPGGGEWSCRLRMLHLASLGLGFHSAFLVAEKVVVSTKSPKSDKQYVWEGVADSSSYVIKEETDPEKMLTRGTQNIRTLTKFSLSIASNYLEPVGQSLSKFASSSXKTELDDTLPRMGCLSECVLEQLLPGEHSPVILAEHGVGSDEARHAVGDIDGVAGASPGNLHVFNVELRGGPLAGEVVHLPPYAALHLSFLSCPHHTTRERERASQQNNPIQSNRKGHRQEEEEKEGIGIFIYSIMRKRLVRKTFDMIEEISEKDDKEDYKKFWESFGKFIKLGCIEDTGNHKRLAPLLRFHTSKNEGDLISLDQYVENMPENQKAIYYIATDSLQSAKTAPFLEKLVQKDIEVLYLIEPIDEVAIQNLQTYKEKKFVDISKEDLELGDEDEDNKESKQEYTLLCDWVKQQLGDKVAKVQISKRLSLSPCVLVSGKFGWSANMERLMKAQTLGDTSSLEFMRGRRIFEINPDHPIVKDLNAACKNEPESTEAKRAVELLYETALISSGYTPDSPAELGGKIYEMMTIALGGRWGRSDTETEAATTGDASTETGSSEATVTEVIEPSEVRPESDPWRD

SEQ ID NO: 118447 - protein, 112 aa, Oryza sativa
  Clone ID: PAT_MRT4530_21758C.1.pep
FFFFFFLHITHIYISKYSRFSKGSTCTMQFNDHTAMLDLLVDRLDAVGTRIHRRRILLGDDGLVHQKSAKLFLYHPDSFTRHEAFFHSRIPLQSWGIRSYKLVHELTHVVAA

SEQ ID NO: 118448 - protein, 337 aa, Oryza sativa
  Clone ID: PAT_MRT4530_21759C.1.pep
MALPKDDDLDAGKVADVLGFRLPDVEGAVRAFFRSREVREFASGALAGAMSKAVLAPLETIRTRMVVGVGSRHIGGSFVEIIEQNGWQGLWAGNTINMIRIIPTQAIELGTFECVKRTMAEAQEKWKEDGCPKIQIGKVKIEFPLQFLSPVAVAGAAAGIAGTLVCHPLEVIKDRLTINREVYPSISVTFSKIYRTDGIRGLYAGLCPTLIGMLPYSTCYYFMYDTIKTSYCRLHKKTSLTRPELLVIGALSGLTASTISFPLEVARKRLMVGALQGKCPPHMIAALAEVIQEEGLPGLYRGWGASCLKVMPNSGITWMFYEACKDILLADKDKRKA

SEQ ID NO: 118449 - protein, 1487 aa, Oryza sativa
  unsure (1)..(1487): unsure at all Xaa locations
  Clone ID: PAT_MRT4530_2175C.1.pep
IVTIVITTNLFLLLSVKSMGVHSFLLNFILXMIVCRLLIYTYFLPSPRYFVIRYMQMNEESTNRVRRVRASRQRRVANILSRQPAMHIEHAIIIPNQASEQSDRKRSLMDFTPELTKLNRQRRCFLRSKIPSSPTEGRRHGGQIQLPKLRPPPEPLATLLNFNGDARSKRFLRQIRLYNSMFVFTSMGATVDKSINTGNAPYVFKINGVVHHRIGTLVRSRGSPPKFAQLYIYDSENEIQNRLNIFENDGDNVDKADSEILAALSLMFDAENALVQNFRYAKERLSEHGDQQITLRRLGCNAKDDVQYNLPTSGEIXGIIVGEFSAKEYKFDMLVYDKNHGLHQISPLHPSYMALQYPLLFPYGERGFHLGIKYNNYDGVGRKYVTMPEYYRYMMHYRLNEPNPLTCYGRLSDQIDVDIFSTIEANRLQFFIDHCHDRKXPNGRSLRESVDGIVDAIDKGVTDGDSIGKRVILPASFTGGRRYMIELRIXTLIVFSLKLLXVLYTVEFQKRGLPHIHCLVWLAAPTADVSASIIDGFICAEIPDYDTDRLGYELVSEFMMHGPCGDANKSCPCIKNDKCXKKNYPKDFQDETIIDEAGFTIYRRRNDGRCIIKNGIPLDNRSVVPYNMKLLKKYEAHINVEWCNKSNLXKYLFKYIMKGQDRAKIYFETIAKTTNASPNHDLAPRDEILEYMDARFVSTCEALHRLFEFDIHYRVPPVERLVVHLPGKNYVRYEKGSDLRAVLESPATKRSMLTEWFEANKKYSKARSLTYCEFPKEWSWESSSRVWCQRTPAAKIGRIYYVHPTASELYYLRMLLMIVKGAQSYVDVRTFNNIVYATFREACEARGLLEGDNEWYLLFDEAIVSASSQHLRQLFVTILLYCSVSDVRSLFNKYWLYMIDDIHSKLKKALDNPNCIIPPDHLLNLLLHELANVFANSGGNIKDFNLPHPSSVPHIPGNNRLIEELALDPLMLSMHANSLIHQLNNDQKXIFDIITSRIAANQPGFFFVCGHGGTGKIFLWNAIIAKLRSHNKIVLAVASSGVASLLLPRGRTAHSRFKIPIDIDEIGICNVKRGTMLAELLIETALIIWDEAPMTHRRCFEALDRTLCDILSETCPLNSIIPFGGKPVVLGGDFRQILPVVPKGSRRAIINASVTNSDLWKHVTILTMNIKMRLLNTMLPKNEKKDMDDFSQWVLAVGDGTLPMIAKEGESYPTWITIPDDLLIITDGDKINAIVSEVYPDFLASYKNPEYLASRAIVCPNNTTVDEINDYIIGLLPGDAKIYSSCDTISKCSEQIPDFDLLYPPEFLNSIDATNFPTYRLILKEAAVVMLLRNLNQSIGLCNGTRLLVTGLGERILQCIILTGSNIGETVYIPRITLSTTKMKWPFTLQRRQFPVRVCYSMTINKNQGQTLQRVGVYLRKPVFTHGQLYVAISRATSRSGLKILIENDDGSCGTQTRNIVYTEVLSATLPAVLFNTLFHISCLCVL

SEQ ID NO: 118450 - protein, 1050 aa, Oryza sativa
  Clone ID: PAT_MRT4530_21760C.1.pep
MDRQWMYADRRSKEFIDGVHYFLRVAEANRQRGFICCPCNKCKNQKEYSASRTIHFHLFESGFMPSYNCWTSHGEQGVEMEEDEVEDDNIPDFAQYVGFEGNQTGEEEIAADGNDVADDLGQMLQDAREDCESEKEAHKLDKMLEDHRTSLYPGCEQGHKKLDTTLELLQWKAKNGVSDKAFGDLLKLVKNIPSGGKQIARDNEYENLEACPVCKALRYKIRRDDPGEVDGQLTKKRIPAKVMWYFPIIPRLRRLFRNKGNARMLRWHAEERQQDGMLRHPADGSQWRNIDRKFKEFGKDARNIRFGLSTDGMNPFGEMSSGHSTWPVTMCIYNLPPWLCMKRKYIMMPIIIQGPKQPGNDIDVYLRPLVEDLKQLWKKEGVPVWDEDKQEEFNLRALLFVTINDWPALSNLSGQYNKGYKACTHCMDETETNHPVRKKGKHFEHKADHRTKPKHRSGKTVFAMVKDLKVVFGKGPGSQHIESEDGHAAMWKKNSIFWELPYWEFLDVRHAIDVMHLTKNLCVNLLGFLGVYGKSKDTLEARNDLKHMEQRGDLHPEPKEKGSHYLSPASYTLSKAEKESMFECLESIKVPSGYSTNIKRIISTKEKKFTNLKSHDYHVLMTQLLPVVIRGILPDNVRATITKLCAFMNAISQKVIDPDRLEALQNEVVQCLVSFELIFPPSFFNIMTHLLCHLVKEIRILGPMYLHNMFPFERYMGVLKKYVRNRARPEASIAKGYGTEEVIEFCVEFIEDLRPIGVPESRHEGRLWGKGTLGRKAITTVDNNLFRKAHFTVLQHSSLVAPYIEEHLALVRARNIGKSDAWITRHHIDTFPAWLRQHLMGNESINQQLAFLARGPSGSITTFQGYEINGYTFYTRAQDMKSTNQNSAVRVDAMGHDGTTATYYGAIEDIWELDYGPLKVPLFRCQWVRLTGGGVMIDDSGMTTVDLNKVGYSDEPFVLANDVTQVFFVKDMSSKGKKGRGPDEPKRQVVLPGKRKIVGVEDKTDEDYDQLDGQPPFTVTIDPSILLSNEDTPYSRSDHKEGTIVRRNWC

SEQ ID NO: 118451 - protein, 1011 aa, Oryza sativa
  Clone ID: PAT_MRT4530_21761C.1.pep
MDRQWMYADRRSKEFIDGVHYFLRVAEANRQRGFICCPCNKCKNQKEYSASRTIHFHLFESGFMPSYNCWTSHGEQGVEMEEDEVEDDNIPDFAQYVGFEGNQTGEEEIAADGNDVADDLGQMLQDAREDCESEKEAHKLDKMLEDQRTSLYPGCEQGHKKLDTTLELLQWKAKNGVSDKAFGDLLKLVKNILPGGNKLPETTYEAKKIVCPLGLEVHNIHACPNDCILYRGEEYENLEACPVCKALRYKIRRDDPGEVDGQLTKKRIPAKVMWYFPIIPRLRCLFRNKGNARMLRWHAEERQQDGMLRHPADGSQWRNIDRKFKEFGKDARNIRFGLSTDGMNPFGEMSSGHSTWPITMCIYNLPPWLCMKRKYIMMPIIIQGPKQPGNDIDVYLRPLEGVPVWDEDKQEEFNLRALLFVTINDWPALSNLSGQSNKGYKACTHCMDETESTYLKHCRKVVYMGHRRFLAANHPVRKKGKHFEHKADHRTKPKHRSGKTVFAMVKDLKVVFGKGPGSQHIESEDDHAAMWKKNSIFWELPYWEFLDVYTEARNDLKHMEQRGDLHPEPKEKGSHYLSPASYTLSKAEKESMFECLESIKVPSGYSTNIKRIISTKEKKFTNLKSHDCHVLMTQLLPVVIRGILPDNVRATITKLCAFMNAISQKVIDPDRLEALQNEVVQCLVSFELIFPPSFFNIMTHLLCHLVKEIRILGPMYLHNMFPFERYMGVLKKYVRNRARPEASIAKGYGTEEVIEFCVEFIEDLRPIGVPESRHEGRLRGKGTLGRKAIMTVDNNLFRKAHFTVLQHSSLVAPYIEEHLALVRARNIAQDMKSTNQNSAVRVDAMGHDGTTATYYGAIEDIWELDYGPLKVPLFRCQWVRLTGGGVMIDDSGMTTVDLNKVGYSDEPFVLANDVTQVFFVKDMSSKGKKGRGPDEPKRQVVLPGKRKIVGVEDKTDEDYDQLDGQPPFTVTIDPSILLSNEDTPYSRSDHKEGTIVRRKYVRSTVTADVMP

SEQ ID NO: 118452 - protein, 1050 aa, Oryza sativa
  Clone ID: PAT_MRT4530_21762C.1.pep
MARRARRRRVAGTVQPRRPTGQSGDAVKIGNHFLRKKGLGGETGKLEEKSEMDRQWMYADRRSKEFIDGVQYFLRVAEANRQRGFICCPCNKCKNQKEYSASRTIHFYLFESGFMPSYNCWTSHGEQGVEMEEDEVEDDNIPDFAQYVGFEGNQTGEEEIAADGNDVADDLSQMLQDARDDCESEKEAHKLDKMLEDHRTSLYPGCEQGHKKLDTTGVSDKAFGDLLKLVKNILPGGNKLPETTYEAKKIVCPLGLEVHKIHACPNDCILYHGEEYENLEACPVCKALRYKIRRDDPGEVDGQLTKKRIHAKRKYIMKPIIIQGPKQPGNDIDVYLRPLVEDLKQLWKKEGVPVWDEDKQEEFNLRALLFVTINNWPALSNLSGQSNKGYKACTHCMDETESTYLKHCRKVVYMGHRRFLAANHPVRKKGKHFEHKADHRTKPKHRSGKTVFAMVKDLKVVFGKGPGSQPIESEDGHAAMWKKNSIFWELPYWEFLDVRHAIDAMHLTKNLCVNLLGFLGVYGKSKDTLEARNDLKHMEQRGDLHPEPKEKGSHYLSPASYTLSKAEKESMFECLESIKVPSGYSTNIKRIISTKEKKFTNLKSHDCHVLMTQLLPVVIRGILPDNVRATITKLCAFMNAISQKVIDPDRLEALQNEVVQCLVSFELIFPPSFFNIMTHLLCHLVKEINILGPMYLHNMFPLERYMGVLKKYVRNRARPEASIAKGYGTEEVIEFCVEFIEDLRPIGVPESRHEGRLRGKGTLGRKAIMTVDNNLFRKAHFTVLQHSSLVAPYIEEHLALVRARNIGKSDAWITRHHIDTFPAWLRQHLMGNESINQQLAFLARGPSGSIATFQGYEINGYTFYTRAQDMKSTNQNSAVRVDAMGHDGTTATYYGAIEDIWELDYGPLKVPLFRCQWVRLTGGGVMIDDSGMTTVDLNKVGYSDEPFVLANDVTQVFFVKDMSSKGKKGRGPDEPKRQVVLPGKRKIVGVEDKTDEDYDQLDGQPPFTVTIDPSILLSNEDTPYSRSDHKEGTIVRRKYVRSTVTVDVMP

SEQ ID NO: 118453 - protein, 47 aa, Oryza sativa
  Clone ID: PAT_MRT4530_21763C.1.pep
MWALRRAGNPLRVRAHQALSARGCANLEVILNADAKNVEEHHEGDCQ

SEQ ID NO: 118454 - protein, 1143 aa, Oryza sativa
  Clone ID: PAT_MRT4530_21764C.1.pep
MSLPTSAADPAASLLPPSTPPPRRCRHRPRTSPPLTRRLAVAGFRRPRRLSLRDLRDRRTGEMDRQWMYADRRSKEFIDGVHYFLRVAEANRQRGFICCPCNKCKNQKEYSASRTIHFHLFESGFMPSYNCWTSHGEQGVEMEEDEVEDDNIPDFAQYVGFEGNQTGEEEIAADGNDVADDLGQMLQDAREDCESEKEAYKLDKMLEDHRTSLYPGCEQGHKKLDTTLELLQWKAKNGVSDKAFGDLLKLVKNILPGGNKLPETTYEAKKIVCPLGLEVHKIHACPNDCILYRGEEYENLEACPVCKALRYKIRRDDPGEVDGQLTKKRIPAKVMWYFPIIPRLRRLFRNKRNARMLRWHAEERQQDGMLRHPADGSQWRNIDRKFKEFGKDARNIRFGLSTDGMNPFGEMSSGHSTWPVTMCIYNLPPWLCMKRKYIMMPIIIQGPKQPGNDIDVYLRPLVEDLKQLWKKEGVPVWDEDKHNLSGQSNKGYKACTHCMDETESTYLKHCRKVVYMGHRRFLAANHPVRKKGKHFEHKADHRTKPKHRSGKTVFAMVKDLKVVFGKGPGSQHIESEDGHAAMWKKNSIFWELPYWEFLDVRHAIDVMHLTKNLCVNLLGFLGVYGKSKDTLEARNDLKHMEQRGDLHPEPKEKGSHYLSPASYTLSKAEKESMFECLESIKVPSGYSTNIKRIISTKEKKFTNLKSHDCHVLMTQLLPVVIRGILPDNVRATITKICAFMNAISQKVIDPDRLEALQNEVVQCLVSFELIFPPSFFNIMTHLLCHLVKEIRILGPMYLHNMFPFERYMGVLKKYVRNRARPEASIAKGYGTEEVIEFCVEFIEDLRPIGVPESRHEGRLRGKGTLGRKAITTVDNNLFRKAHFTVLQHSSLVAPYIEEHLALVRARNIGKSDAWITRHHIDTFPAWLRQHLMGNESINQQLAFLARGPSGSIATFQGYEINGYTFYTRAQDMKSTNQNSVVRVDAMGHDGTTAMYYGAIEDIWELDYGPLKVPLFRCQWVRLTGGGVMIDDSGMTTVDLNKVGYSDEPFVLANDVTQVFFVKDMSSKGKKGRGPDESKRQVVLPGKRKIVGVEDKTDEDYDQLDGQPPFTVTIDPSILLSNEDTPYSRSDHKEGTIVRRKYVP

SEQ ID NO: 118455 - protein, 81 aa, Oryza sativa
  unsure (1)..(81): unsure at all Xaa locations
  Clone ID: PAT_MRT4530_21765C.1.pep
MQTLMSVLVIIIGCYTAIDWITDIVIFIMQLYRWAPSYSLLADLTAIDXFIRLHGCATSSLLIGIIIFTTTNIFYAQRLVG

SEQ ID NO: 118456 - protein, 1021 aa, Oryza sativa
  Clone ID: PAT_MRT4530_21766C.1.pep
MDRQWMYADRRSKEFIDGVHYFLRVAEANRERGFICCPCNKCKNQKEYSASRTIHFHLFESGFMPSYNCWTCHGEKGVEMEEDEVEDDNIPDFAQYVGFEGNQTGEEEIAADGNDVADDLGQMLQDAREDCESEKETHKLDKMLEDHRTSLYPGCEQGHKKLDTTLELLQWKAKNGVSDKAFGDLLKLVKNILPGGNKLPETTYEAKKIVCPLGLEVHKIHACPNDCILYRGEEYENLEACPVCKVLRYKIRWDDPGEVDGQLTKKIIPAKVMWYFPIIPRLRRLFRNKGNARMLRWHAEKRQQDGMLRHPADGSQWRNIDRKFKEFRKDARNIRFGLSTDGMNPFGEMSSGHSTWPVTMCIYNLPPWLCMKRKYIMMPIIIQGPKQPGNDIDVYIRPLVEDLKQLWKKEGVPVWDEDKQEEFNLRALLFVTINDWPALSNLSGQSNKGYKACTHCMDETESTYLKHCRKVVYMGHRRFLAANHPVRKKGKHFEHKADHRVYGKSKDTLEARNDLKHMEQRGDLHPEPKEKGSHYLSPASYTLSKAEKESMFECLESIKVPSGYSTNIKRIISTKEKKFTNLKSHDCHVLMTQLLPVVIRGILPDNVRATITKLCAFMNAISQKVIDPDRLEALQNEVVQCLVSFELIFPPSFLNIMTHLLCHLVKEIRILGPMYLHNMFPFERYMGVLKKYVRNRARPEASIAKGYGTEEVIEFCVKFIEDLRPIGVPESRHEGRLRGKGNLGRKAITTVDNNLFRKAHFTVLQHSSLVAPYIEEHLALVRARNIGKSDAWITRHHIHTFPAWLRQHLMGNESINQQLAFLARGPSRSIATFQGYEINGYTFYTRAQDMKSTNQNSAVRVDAMGHDGTTATYYGAIEDIWELDYGPLKVPLFRCQWVRLTGGGVMIDDSGMTTVDLNKVGYSDEHFVLANDVTQVFFVKDMSSKGKKGRGPDEPKRQVVLPGKRKIVGVEDKTDEDYDQLDGQPPFTVTIDPSILLSNEDTPYSRSDHKEGTIVRRKYVP

SEQ ID NO: 118457 - protein, 63 aa, Oryza sativa
  unsure (1)..(63): unsure at all Xaa locations
  Clone ID: PAT_MRT4530_21767C.1.pep
LVXDTRPIRLPRGFTPALPGDEAFCSWYRDIPQDQXATAADCSPMRFHATVSLSAAIFEEDAL

SEQ ID NO: 118458 - protein, 925 aa, Oryza sativa
  Clone ID: PAT_MRT4530_21768C.1.pep
MAAAMRVTATHGQETDGGGDDTTTCVPERAAAAGNGDAEACSNTAEIDGASAAQIDRVAEKEYSASRTIHFHLFESGFMPSYNCWTSHVEQGVEMEEDEVEDDNIPDFAQYVGFEGNQTSEEEIAADGNDVADDLGQMLQDAREDCESEKEAHKLDKMLEDHRTSLYPGCEQGHKKNKGNARMLRWHAEELQQDGMLRHPADGSQWRNIDRKFKEFGKDARNIRFGLSTDGMNPFGEMSSGHSTWPVTMCIYNLPPWLCMKRKYIMMPIIIQGPKQPGNDIDVYLRPLVEDLKQLWKKEGVPVWDEDKQEEFNLRALLFVTINDWPALSNLSGQSNKGYKACTHCMDETESTYLKHCRKVVYMGHRRFLAANHPVRKKGKHFEHKADHCTKPKHRSGKTVFAMVKDLKVVFGKGPGSQHIESEDGHAAMWKKNSIFWELPYWEFLDVRHAIDVMHLTKNLCVNLLGFLGVYGKSKDTLEARNDLKHMEQRGDLHPEPKEKGSHYLSPASYTLSKAEKENNVRATITKLCAFMNAISQKVIDPDRLEALQNEVVQCLVSFELIFPPSFFNIMTHLLCHLVKEIRILGPMYLHNMFPFERYMGVLKKYVRNRARPEASIAKGYGTEEVIEFCVEFIEDLRPIGVPESRHEGRLRGKGTLGRKAIMTVDNNLFRKAHFTVLQHSSLVAPYIEEHLALVRARNIGKSDAWITRHHIDTFPAWLRQHLMGNESINQQLAFLARGPSGSIATFQGYEINGYTFYTRAQDMKSTNQNSAVRVDAMGHDGTTATYYGAIEDIWELDYGPLKVPLFPRQWVRLTGGCVMIDDSGMTTVDLNKVGYSDEPFVLANDVTKGKKGRGPDEPKRQVVLPGKRKIVGVEYKTDEDYDQLDGQPPFTVTIDPSILLSNEDTPYSRSDHKEGTIVRRKYVP

SEQ ID NO: 118459 - protein, 453 aa, Oryza sativa
  Clone ID: PAT_MRT4530_21769C.1.pep
MDRQWMYVDRRSKEFIEGVHYFLRVAEANKRNGFICCPCNKCKNQKEYSASRTIHFHLFELGFMPSYNCWTSHSEQEVEMEEGEAEDENIPDWAQYAGFEENQTDEVDRDAGDNDAADDLGQMLQDAKEDCESEKGSHKLERMLEDHRTSLYPGCEQGHKKLDTTLNDKAFGDLLKLVKNILPEENKLPGTTYEAKKIVCPLGLEVQKIHACPNDCILYRGEEYESLEACPICKALRYKIRQDDPGKVDGQLTKKRIPAKVMWYFPIIPRLRRLFRNKGNARMMRWHAEERQQDGMLRHPADGPKQPGNDIDVYLRPLVEDLKLLWKKEGVPVWDEDKQEEFNVRALLFVTINDWPALSNLSGQSNKGYKACTHCMDETKSTYLKHCRKVVYMGHHRFLAANHPVRKKGKHFEHTADHRTKPKHRSGKTVFAMVKDLKVVFGKGPGSQPIEPL

SEQ ID NO: 118460 - protein, 231 aa, Oryza sativa
  Clone ID: PAT_MRT4530_2176C.1.pep
PNPRYCRRLKVRRVTRYVSEAACPTSSRNEDCRLGPPQPHPAGRGDADCTGDERRRRPEESLRERSAPTSSALETGRIAGGARRWGGVRDIRIGSGGWVGRNSQREFHGRNSKECNSLIVSVTEYGHKWVGGGGAAHQPQTAPKLRALLVACGRPLASLPHAGGRDARLPAPCRRATRQEKATEAFAAVGPWEKKKKRFEGRPAELAEPGWPEQPVPAWMGWPRTLTTRPS

SEQ ID NO: 118461 - protein, 33 aa, Oryza sativa
  Clone ID: PAT_MRT4530_21770C.1.pep
MQRRMVGGPVIGADHPTRDYGGGWTPQGAKAGL

SEQ ID NO: 118462 - protein, 141 aa, Oryza sativa
  Clone ID: PAT_MRT4530_21771C.1.pep
MEVLGSTAFFYLFSLIHVTHVLYSVATSRVTPFKRLNHPDRRSGPVLITMAAAVPGDPPPPPTCRRRYGHRFHLSSGKGRRRGGKKPLEPCSRPARSIVVVVAAVTVVVVAVALMPPTPLSDPPPPAFRYRRGRRHPLPSG

SEQ ID NO: 118463 - protein, 1093 aa, Oryza sativa
  Clone ID: PAT_MRT4530_21772C.1.pep
MDRQWMYADRRSKEFIDGVHYFLRVAEANKQRGFICCPCNKCKNQKEYSASRTIHFHLFESGFMPSYNCWTSHGEQGVEMEEDEVEDDNIPDFAQYVGFEGNQTGEEEIAADGNDVADDLGQMLQDAREDCESEKEAHKLDKMLEDHRTSLYPGCEQGHKKLDTTLELLQWKAKNGVSDKAFGDLLKLVKNILPGGNKLPETTYEAKKIVCPLGLEVHKIHACPNDCILYRGEEYENLEACPVCKALRYKIRRDDPGEVDGQLTKKRIPAKVMWYFPIIPRLRRLFRNKGNARMLRWHAEERQQDGMLRHPADGSQWRNIDRKFKEFGKDARNIRFGLSTDGMNPFGEMSSGHSTWPVTMCIYNLHPWLCMKRKYIMMPIIIQGPKQPGNDIDVYLRPLVEDLKQLWKKEGVPVWDEDKQEEFNLRALLFVTINDWPALSNLSGQSNKGYKACTHCMDETESTYLKHCRKVVYMGHRRFLAANHPVRKKGKHFEHRADHRTKPKHRNGKTVFDMVKDLKVVFEKGPGSQHIESEDGVYGKSKDTLEARNDLKHMEQRGDLHPEPKEKGSHYLSPASYTLSKAEKESMFECLESIKVPSGYSTNIKRIISTKEKKFTNLKSHDCHVLMTQLLPVVIRGILPDNVRATITKICAFMNAISQKVIDPDRLEALQNEVVQCLVSFELIFPPSFFNIMTHLLCHLVKEIHILGPMYLHNMFPFERYMGVLKKYVRNRARPEASIAKGYGTEEVIEFCVEFIEDFRPIGVPESRHEGRLRGKGTLGRKAITTVDNNLFRKAHFTVLQHSSLVAPYIEEHLALVRARNIGKSDAWITRHHIDTFPAWLRQHLMGNESINQQLAFLARGPSGSIATFQGYEINGYTFYTRAQDMKSTNQNSAVRVDAMGHDGTTATYYGAIEDIWELDYGPLKVPLFRCQWVRLTGGGVMIDDSGMTTVDLNKVGYSDEPFVLANDVTQVFFVKDMSSKGKKGRGPDEPKRQVVLPGKRKIVGVEDKTDEDYDQLDGQPPFTVTIDPSILLSNEDTPYSRSDHKEGTIVRRKYVRSTVTADVAISYVSEPTIIATEADLVLLRLALGGSSR

SEQ ID NO: 118464 - protein, 50 aa, Oryza sativa
  unsure (1)..(50): unsure at all Xaa locations
  Clone ID: PAT_MRT4530_21773C.1.pep
KVLMXXHITLXTSDTHSTACDLGYXXCRPYLLSLELMLICMWEIELYYIV

SEQ ID NO: 118465 - protein, 1104 aa, Oryza sativa
  unsure (1)..(1104): unsure at all Xaa locations
  Clone ID: PAT_MRT4530_21774C.1.pep
MGKALYDPTNWYQSLASTDGFGSTKEDLMTAKPRYLAALSPLQIKQETDAVDAAASQAVRGVGCGDLLDGGGGGQVTASTSGQPQGIVVVMQGREEAVTALPCIMMDRQWMYADRRSKEFIDGVHYFLRVAEANRKRGFICCPCNKCKNQKEYSASRTIHFHLFESGFMPSYNCWTSHGEQGVEMEEDEVEDDNIPDFAQFVGFEGNQTGEEEIAADGNDVADDLGQMLQDAREDCESEKEAHKLDKMLEDHRTSLYPGCEQGHKKLDTTLELLQWKAKNGVSDKAFGDLLKLVKNILPGGNKLPETTYEAKKIVCPLGLEVHKIHACPNDCILYRGEEYEDLEACPVCKALRYKIRRDDPGEVDGQLTKKRIPAKVMWYFPIIPRLRRLFRNKGNARMLRWHAEERQQDGMLRHPADGSQWRNIDRKFKEFGKDARNIRFGPKQPGNDIDVYLRPLVEDLKQLWKKEGIPVWDEDKQEEFNLRALLFVTINDWPALSNLSGQSNKGYKACTHCMEETESTYLKHCRKVVYMGHRRFLAANHPVRKKGKHFEHKADHRTKPKHRSGKTVFAMVKDLKVVFGKGPGSQHIESEDGHAAMWKKNSIFWELPYWEFLDVRHAIDVMHLTKNLCVNLLGFLGVYGKSKDTLEARNDLKHMEQRGDLHPEPKEKGIVIRGILPDNVRATITKQCAFMNAISQKVIDPDRLDALQNEVVQCLVSFELIFPPSFFNIMTHLLCHLVKEIRILGPMYLHNMFPFERYMGVLKKYVRNRARPEASIAKGYGTEEVIEFCVEFIEDLRPIGVPESRHEGRLRGKGTLGRKAIMTVDNNLFRKAHFTVLQHSSLVAPYIEEHLALVRARNIGKSDAWITRHHIDTFPAWLRQHLMGNESINQQLAFLARGPSGSIATFQGYEINGYTFYTRAQDMKSTNQNSAVRVDAMGHDGTTATYYGAIEDIWELDYGPLKVPLFRCQWVRLTCGGVMIDDSGMTNCDLNKXGILDEPFVLCNDVTQVFFVKDMSSXRKEGQRPDEPKRQVGLPSQKKIVGVEDKTGQDHDQLDGQPPFTVTIDPSILLSNEDTPYSRSDHKEGTIVRRKYVRSTVTADVMP

SEQ ID NO: 118466 - protein, 987 aa, Oryza sativa
  Clone ID: PAT_MRT4530_21775C.1.pep
MDRQWMYADRRSKEFIDGVHYFLRVAEANRQRGFICCPCNKCKNQKEYSASRTIHFHLFESGFMPSYNCWTSHGEQGVEMEEDEVEDDNIPDFAQYVGFEGNQTGEEEIAADGNDVADDLSQMLQDAREDCESEKEAHKLDKMLEDHRTSLYPAKNGVSAKAFGDLLKLVKNILPGGNKLPETTYEAKKIVCPLGLEVHKIHACPNDCILYRGEEYENLEACPVCKALRYKIRRDDPGEVDGQLTKKRIPAKVMWYFPIIPRLRRLFRNKGNARMLRWHAEERQQDGMLRHPADGSQWRNIDRKFKEFGKDARNIRFGLSTDGTNPFGEMSSGHSTWPVTMCIYNLPPWLCMKRKYIMMPIIIQGPKQPGNDIDVYLRPLVEDLKQLWKKEGVPVWDEDKQEEFNLRALLFVTINDWPALSNLSGQSNKGYKACTHCMDETESTYLKHCRKVVYMGHRRFLAANHPVRKKGKHFPHKADHRTKHKHRSGKTVFAMVKDLKVVFGKGPGSQHIKSEDGVYGKSKDTLEARNDLKHMEQRGDLHPEPKEKGSHYLSPASYTLSKAEKESMFECLESIKVPSGYSTNIKRIISTKEKKFINLKSHDCHVLMTQLLPVVIRGILPDNVRATITKLCAFMNAISQKVIDPDRLEALQNEVVQCLVSFELIFPPSFFNIMTHLLCHLVKEIRILGPMYLHNMFPFERYIGVLKKCVRNRARPEASIAKGYGTEEVIEFCVEFIEDLRPIGVPESRHEGRLRGKGTLGRKAIMTVDNNLFRKAHFTVLQHSSLVAPYIEEHLALVRARNIAQDMKSTNQNSAVRVDAMGHDGTTATYYGAIEDIWELDYGPLKVPLFRCQWVRLTGGGVMIDDSGMTTVDLNKVGYSDEPFVLANDVTQVFFVKDMSSKGKKGRGPDEPKRQVVLPGKRKIVGVEDKTDEDYDQLDGQPPFTVTIDPSILLSNEDTPYSRSDHKEGTIVRRKYVRSTVTADVMP

SEQ ID NO: 118467 - protein, 53 aa, Oryza sativa
  Clone ID: PAT_MRT4530_21776C.1.pep
MHESGVFCGIARWWNFAQWAGLAGIMPGSNKSPYRKRWKKKKNPSPKKTQTQE

SEQ ID NO: 118468 - protein, 119 aa, Oryza sativa
  Clone ID: PAT_MRT4530_21777C.1.pep
YKPDVIKGDLDSVRPEVKEYYSNMGTQIVDESHDQDTTDLHKCVAFITENSAIPNKSNLCIFALGALGGRFDHEMGNINVLHLFPNNRIILLSDDCLIFLLPRTHTHNIHIQRSIEGPH

SEQ ID NO: 118469 - protein, 325 aa, Oryza sativa
  Clone ID: PAT_MRT4530_21778C.1.pep
MVRGVEQGGPAMDESSSSSSPSPVSAPAGQAAMTAGGIATVAAVLIVFAALTLAFVLLQCYCDERRRAVTTTSTSGRGRRPRPRRRSGSGGDGGTGGGVDPEVLRSLPVTVYSRSTAAAAAKEEEEEDDDGVECAVCLAELEDGEEARFLPRCGHGFHAECVDMWLGSHSTCPLCRLTVVVPPPPLPPVPPEPPASYTVSLPASVLLGLSDHGAGAVTMTAEGRSTLVIEIPESAASTTPRDAAARSSPSLARLRSLRRLWSFGRQGAAGSTSSCSCATGGDNDDGDVEHGVSVTVAIRAVEAATPARPPEAEAGARTAAAHVRN

SEQ ID NO: 118470 - protein, 78 aa, Oryza sativa
  unsure (1)..(78): unsure at all Xaa locations
  Clone ID: PAT_MRT4530_21779C.1.pep
NTAGILRVSLLDGFDFLSGYATPPLPCAASTSPRRRGRGTSRSSAPVVLRPSSNRRRGLRPGETPSNPGRLFNLETVX

SEQ ID NO: 118471 - protein, 36 aa, Oryza sativa
  Clone ID: PAT_MRT4530_2177C.1.pep
MYRPVTGEGIPVTGRGQMPHRYPVRGVRIWRSEGPP

SEQ ID NO: 118472 - protein, 428 aa, Oryza sativa
  unsure (1)..(428): unsure at all Xaa locations
  Clone ID: PAT_MRT4530_21780C.1.pep
MATAEAAAAAARRGGGGGSNRGEASDGAGRRQRRAAAGARTARGGGEAAAAAAEEASGGGVQRRRQRRRRGEAVGEPGRAAPPPRRTHRRSTGDDDVAIKILFCGICHSDLHCIKNEWKHSIYPLVPGHEIAGVVTEVGKNVTRFKAGDRVGVGCMVNSCRSCESCNNGFENHCPEGVFTYNSVDKDGTVTYGGYSSMVVVHERFVVMFPEAMPLDVGAPLLCAGITVYTPMKYHGLNAPGKHVGVLGLGGXLGHVAVKFARAFGLKVTVISSSPGKKREALERLGADAFVVSSSAEEMEAARSTMDGVINTVSANTPMASPQHPHXPYLALLKPNGKMILVGLPENPLEVPPFSLVHGNRTLAGSNIGGMADTQEMIELAAKHGVTADIEVIGADDVNTAMERLAKADVRYRFVIDVGNTLHAAAAE

SEQ ID NO: 118473 - protein, 105 aa, Oryza sativa
  unsure (1)..(105): unsure at all Xaa locations
  Clone ID: PAT_MRT4530_21781C.1.pep
GRASXRVVXXDPPXNKFRXXLXDGGXTXNGTVDLIXQVEINXHQRDKSXSXPXWRRLEXXDPPGXGNSAXGEFGADFXFGHVXLXXXGXXFGMSSLSFGGXLFLA

SEQ ID NO: 118474 - protein, 88 aa, Oryza sativa
  Clone ID: PAT_MRT4530_21782C.1.pep
TLLEAAALQADRCVLAALRHSSFGPLLTLRASDCRRIIAHFLATPECIRLGGDHARFLASFCSHVVVWLASRRQWRQADLSCSRSWAQ

SEQ ID NO: 118475 - protein, 100 aa, Oryza sativa
  Clone ID: PAT_MRT4530_21783C.1.pep
PVYIAFLRFMGDDLEAKNYSYSLEVGGTGRKMIGQGVPRSIRDSHRKVRDSYDGLIIQRNMALFFSGGERKELKLRVTGWLWWGLPGKLLFALNCLLSCH

SEQ ID NO: 118476 - protein, 144 aa, Oryza sativa
  Clone ID: PAT_MRT4530_21784C.1.pep
SGDDHSSSHRTRATNTALPRNTRNAEAWRNWCSVRSLVWNPVPHEPASSFSGIPPASSTGTRTTGHPDSPETSAQHTRATCWGCCLQNFHGPRYSHSSGTSGIRKTILLEIYLDCLTPPKTPPSKCMVYLPHNNNNQNYLGPAR

SEQ ID NO: 118477 - protein, 272 aa, Oryza sativa
  Clone ID: PAT_MRT4530_21785C.1.pep
MAASPPLPTSIDGGQVLDDMEVVEMKYLFGKVLMPSDVSWDTEQLVIPDEHVGKLLDMVVMNRPEGGFFVVVVEDGEVTGKLWLFRYWKRDDVHCLTKGWGCYAREKGLRAGDTVSFFHSTACGRFFICCRCTCMSFLSLPTTSHRIHGSSVLPQPRAAQEAHHPFSGHATLCLGNKASDHSAPARHATASLGCAAAQPPQVPPTPTPRRRRRSMMVHPEPPEHTTDGMPVILESMALVSTPPVAKRVRLFGVYIDVPPLRPGGEATQDFNP

SEQ ID NO: 118478 - protein, 75 aa, Oryza sativa
  Clone ID: PAT_MRT4530_21786C.1.pep
IKFPQIAQSPSQDLVYHVPSCIRFHAIPMRPSTTKNQRPDSPLATVWIGWFLCIPLTHCSQYYVCFSSPMQAPLP

SEQ ID NO: 118479 - protein, 1020 aa, Oryza sativa
  unsure (1)..(1020): unsure at all Xaa locations
  Clone ID: PAT_MRT4530_21787C.1.pep
MEVKFIIQVLRNVNILAALVGIVLAVFKSTTNQRIYHCLCLSLNSIITIRAPAMMDRQWMYADRRSKEFIDGVHYFLRVAEANRQRGFICCPCNKCKNQKEYSASRTIHFHLFESGFMPSYNCWTSHGEQGIEMEEDEVEDDNIPDFAQYVGFEGNQTGEEERDADGNDVADDLGQMLQDAKEDCESEKGAHKLDKMLEDHRTSLYPGCEQGHKKLDTTLEFLQWKAKNGVSDKAFGDLLKLVKNILPEGNKLPQTTYEAKKIVCPLGLEVQKIHACPNDCILYRGEEYENLEACPVCKALRYKIRRDDPGEVDGQLTKKRIPAKRKYIMMPIIIQGPKQPGNDIDVYLRPLVEDLKLLWKKEGVPVWDNDKQEEFNLRALLFVTSNDWPALSNLSGQSNKGYKACTHCMDETESTYLKHCRKVVYMGHRRFLVANHPVRKKGKHFEHKANHRTKPKHRSGKTVFAMVKDLKVVFGKGPGSQPIESEDGHAAMWKKNSIFWELPNWEFLDVRHAIDVMHLTKNLCVNLLGFLGVHGKSKDTLEARNDLKHMEERGDLQPEPKEKGSHYLSPASYTLSMAEKESMFECLESIKVPSGYPTNIKRIISTKEKKFTNLKSHDCHVLMTQLLPVVIRGILPDNVRAPIXKICAFMNAISQKRSVFSGLCTYTTCPFERYMGILKKYVRNRARPEASIAKGYGTEEVIEFCVEFIEDLRSIGVPESRHEGRLRGKGTLGRKAIMTVDNDLFRKAHFTVLQQSSLVAPYVEEHLALVRARNIGKSDAWITWHHIDTFPAWLRQHLMGNESINQQLAFLARGPSGSIATFQGYEINGYTFYTRAQDMKSTNQNSAVRVDAMGHDGTTGTYYGAIEDIWELDYGPLKVPLFRYQWVRLTGGGVMIDDSGMTTVDLNKVGYSDEPFVLANDVTQVFFVKDMSSKGKKGRWPNEPKCHVVLPSKRKIVGVEDKTDEDYDQLDGQPPFTVTIDPSILLSNEDTPYSRSDHKKGTIVRRKYVRSTVTADVLP

SEQ ID NO: 118480 - protein, 925 aa, Oryza sativa
  Clone ID: PAT_MRT4530_21788C.1.pep
MDRQWMYADRRSKEFIDGVHYFLRVAEANRQRGFICCPCNKCKNQKEYSASRTIHFHLFESGFMPSYNCWTSHGEQGIEMEEDEVEDDNIPDFAQYVGFEGNQTGEEEIAADGNDVADDLGQMLQDAREDCESEKEAHKLDKMLEDHRTSLYPGCEQGHKKLDTTLELLQWKAKNGVSDKAFGDLLKLVKNILPGGNKLPETTYEAKKIVCPLGLEVHKIHACPNDCILYRGEEYENLESCPVCKALRYKIRRDDPGEVDGQLTKKRIPAKVMWYFPIIPWLRRLFRNKGNARMLRWHAEERQQDGMLRHPADGPKQPGNDIDVYLRPLVEDLKQLWKKEANHPVRKKGKHFEHKADHRTKPKHRSGKTVFAMVKDLKVVFGKGPGSQHIESEDGHAAMWKKNSIFWELPYWEFLDVRHAIDVMHLTKNLCVNLLGFLGVYGKSKDTLEARNDLKHMEQRGDLHPEPKEKGSHYLSPARYTLSKAEKESMFECLESIKVPSGYSTNIKRIISTKEKKFTNLKSHDCHVLMTQLLPVVIRGIHPDNVRATITKLCAFMNAISQKVIDPDRLEALQNEVVQCLVSFELIFPPSFFNIMTHLLCHLVKEIRILGPMYLHNMFPFEWYMGVLKKYVCNRARPEASIAKGYGTEEVIEFCVEFIEDLRPIGVPESRHEGRLRGKGTLGRKAIMTVDNNLFRKAHFTVLQHSSLVAPYIEEHLALVRARNIGTSDAWITRHHIDTFPAWLRQHLMGNESINQQLAFLARGPSGSIATFQGYDINEYTFYTRAQDMKSTNQNSAVRVDAMGHDGTTATYYGAIEDIWELDYGPLKVPLFRCQWVKLTGGGVMIDDSGMTTVDLNKSKRKIVGVEDKTDEDYDQLDGQPPFTVTIDPIILLLYEDTPYSLNDHKEGTIVRRKYVRSTVTADVM

SEQ ID NO: 118481 - protein, 96 aa, Oryza sativa
  Clone ID: PAT_MRT4530_21789C.1.pep
IRSPLSHDRWQWWRRGAARATGRRHRAERAATTAWSYEGGGCGVGVELRGRRHRGAAARAAIQLPGLHGRSPAEASACSRSCTTTTPTTTVDDDHH

SEQ ID NO: 118482 - protein, 169 aa, Oryza sativa
  Clone ID: PAT_MRT4530_2178C.1.pep
MERGASFAVVMAAMAVVLATTSTAQAQTTATDIVNIHNAARSAVGVPALSWDDNLAAYAQGYANQRAGDCALRHSDRNNYQYGENLSWNPSVQAWTAASSVDQWVAEKGSYDYASNSCVGGAMCGHYTQVVWRDTTAVGCAAVACNANRGVFFICTYFPAGNVQNQRPY

SEQ ID NO: 118483 - protein, 623 aa, Oryza sativa
  Clone ID: PAT_MRT4530_21790C.1.pep
MEEYEVEDDNIPDFALYAGFEGNQTGEEERDAHGNDVADDLGQMLQDAKEECESEKGAHKLDKMLEDHTTSLYPGCDVSDKAFDDLLKLVKNILPEGNKLPETTYEAKKIVCPLGLEVQKIHACLNDCILYRGEEYENLEACPVCKALRYKIRRDDPGEVDGQLTKKRIPAMVMWYFPIIPQLRRLFRNKGNARMMRWHAEERQQDGMLRHPADGSQWRNIDRKFKDFGKDARNTRFGLSMDGMNPFREMSSGHSTWPVTMCIYNLPPWLCIKRKYIMMPIIIQGPKQPGNDIDVYLRPLVEDLKLLWKKEGVPVWDEDKQEEFNLRALLFVTINNWPALSNLSGQSNKGYKACTHCMDEGCLHGSSSIPCSKPPGVYEKSKDTLEVRNNLKHMEQRGDLDPEPKEKGSHYLSLANYTLSKAEKESMFECLESIKVPSGYSMNIKRIISTKEKKFTNLKSHDCHVLMTQLLPVVIRGILPDNVRATITKLCAFMNAISQKVIDPDRLEALQNDVVQCLVSFEFIFPPSFFNIMTHLLCHLVKEIGILGPVYLYNMFPFERYMGVLKKYVLNRARPEASIAKGYGTEEVIEFCVEFIEDLRPIGVPESHHGRRLRGKGTLEGKQ

SEQ ID NO: 118484 - protein, 1081 aa, Oryza sativa
  Clone ID: PAT_MRT4530_21791C.1.pep
MARRARRRRVAGTVQPRRPTGQSGDAMDRQWMYADRRSKEFIDGVQYFLRVAEANRQRGFICCPCNKCKNQKEYSASRTIHFYLFESGFMPSYNCWTSHGEQGVEMEEDEVEDDNIPDFAQYVGFEGNQTGEEEIAADGNDVADDLSQMLQDARDDCESEKEAHKLDKMLEDHRTSLYPGCEQGHKKLDTTGVSDKAFGDLLKLVKNILPGGNKLPETTYEAKKIVCPLGLEVHKIHACPNDCILYHGEEYENLEACPVCKALRYKIRRDDPGEVDGQLTKKRIHAKWRNIDRKFKEFGKDARNIRFGLSTDGMNPFGEMSSGHSTWPVTMCIYNLPPWLCMKRKYIMKPIIIQGPKQPGNDIDVYLRPLVEDLKQLWKKEGVPVWDEDKQEEFNLRALLFVTINNWPALSNLSGQSNKGYKACTHCMDETESTYLKHCRKVVYMGHRRFLAANHPVRKKGKHFEHKADHRTKPKHRSGKTVFAMVKDLKVVFGKGPGSQPIESEDGHAAMWKKNSIFWELPYWEFLDVRHAIDAMHLTKNLCVNLLGFLGVYGKSKDTLEARNDLKHMEQRGDLHPEPKEKGSHYLSPASYTLSKAEKESMFECLESIKVPSGYSTNIKRIISTKEKKFTNLKSHDCHVLMTQLLPVVIRGILPDNVRATITKLCAFMNAISQKVIDPDRLEALQNEVVQCLVSFELIFPPSFFNIMTHLLCHLVKEINILGPMYLHNMFPLERYMGVLKKYVRNRARPEASIAKGYGTEEVIEFCVEFIEDLRPIGVPESRHEGRLRGKGTLGRKAIMTVDNNLFRKAHFTVLQHSSLVAPYIEEHLALVRARNIGKSDAWITRHHIDTFPAWLRQHLMGNESINQQLAFLARGPSGSIATFQGYEINGYTFYTRAQDMKSTNQNSAVRVDAMGHDGTTATYYGAIEDIWELDYGPLKVPLFRCQWVRLTGGGVMIDDSGMTTVDLNKVGYSDEPFVLANDVTQVFFVKDMSSKGKKGRGPDEPKRQVVLPGKRKIVGVEDKTDEDYDQLDGQPPFTVTIDPSILLSNEDTPYSRSDHKEGTIVRRKYVRSTVTVDVMP

SEQ ID NO: 118485 - protein, 158 aa, Oryza sativa
  Clone ID: PAT_MRT4530_21792C.1.pep
MAMRRRDAWGSRRRRRASGERRDRRGDATRAAAQGSARWDGRRGNGAGRRRWDGQATAMGRPRGGAQARGRQAVTGRRTARGARGARRRARGARRDGTRRRRRAARQRRRWRGTRDGSARTAKEGAGLGNLVEHLLRLARDLSFLCSLIPCFSEQWTH

SEQ ID NO: 118486 - protein, 1012 aa, Oryza sativa
  unsure (1)..(1012): unsure at all Xaa locations
  Clone ID: PAT_MRT4530_21793C.1.pep
MAVAIFYLLHKKNEIHGYTAFTIYVVLTYCFLDFLMPCVAAVGAALGMELEPQFDRPYLSASLLDFSGRRWNLMASAMLRPAVYDRVRARLGAPGGVLSTFLVSGLMHEVIAYYISFRAPTGQMDRQWMYADRRSKEFIEGVHYLLRVAEANKRNGFICCPCNKCKNQKEYSASRIIHFHLFESGFMPSYNCWTSHGEEGVEMEEDEAEDENIPDWAQYAGFEGNQTGEVDRDAGDNDTADDLGQMLQDAKEDCESEKEAHKLERMLEDHRTSLSPGCERGHKKLDTTLEFLQWKAKNGVSDKAFRDLLKLIKNILPEGNKLPETTYEAKKIVCPLGLEVQKIHACPNDCILYHGEEYENLEACPVCKALRYKIRREDPGEVDGQPTKKRIPAKEGVPEWDEDKQEEFNLRALLFVTINDWPAFSNLSGQSNKGYKACTHCMDETESTYLKHYRKEFLDVCHAIDVMHLTKNLCVNLLGFLGVYGKSKDTLEARNDLKHMEQRSDLHPEPKEKGSHYLSPASYTLSKAEKESMFECLESIEVPSGYSTNIKRIISTKEKKFTNLKSPDCHVLMTQLLPVVIRGILPDNVRATITKLCAFMKANLQKVIDPDRLEALQNDVVQCLVSFELIFPPSFFNIMTHLLCHLVKEIGILGPVYLHNMFPFERYIGVLKKYVRNRARPEASIAKGYGTEEVIELCVEFIEDLRPIGVPESCHEGRLRGKVVLGRKARMTVDNNLFRKAHFTVLQQSSLVAPYIEEHLALVRARNIGKSDAWITRHHIDTFPAWLRQHLMGNETINQQLAFLARGPSGSIATFXGYEINGYTFYTRAQDMKSMNQNSAVRVDTMGHDGATSTYYGAIEDIWELDYCPLKVPLFRCXWVRLTGGGVMIDDSGMTTVDLNKVGYSDESFVLANDVTKVFFVKDMSSKGKKGRGPDEPKRHVVLPGKRKIVRVEDKTDEDYDQLDGQPPFTVTIDPSILLSNEDTPYSRSDHKEGTIVRRKYVRSTVTADVLP

SEQ ID NO: 118487 - protein, 49 aa, Oryza sativa
  unsure (1)..(49): unsure at all Xaa locations
  Clone ID: PAT_MRT4530_21794C.1.pep
KDRNISELLNXNFHISAVLNKTNXSSQHTININDXSRIYKXHVWXPANK

SEQ ID NO: 118488 - protein, 1269 aa, Oryza sativa
  Clone ID: PAT_MRT4530_21795C.1.pep
MAGEIRRRGRGDNAMGRLKRTVAWKRRRGRRGRSRRCSGEDGHGGEIRWYGPIFRTNIIAQDMIVSLDPELNNLVFQQEERLFQCWYPNSFMRVFGADSIITTFGSSHRHVRNLVLRLFGPENLRRAMLQEMQKTAQASLLSWLDRPSIEVKEEVSSGRKNVMRMLRELLDERKKKTAHQLESIDFFDALIDELKQEKPAVSENVALDLLFLLLFASFETTSSGITAILRFLTDNPMALEELTEEHDRILKRKADPNSQITWEEYKSMKFTSHALRLANIAPVVFRKARQDVHIKGYTIPKGSKIMLSPSNIHLNPTVYKDPNEFNPWRWKVKNGVSDKAFGDLLKLVKNILPEGNKLPETTYEAKKIVYPLGLEVQKIHACPNDCILYRGEEYENLEACPVCKALRYKIRRDDPGEVDGQLTKKRIPAKVMWYFPIIPRLRRLFRNKGNARMMRWHAEERQQDGMLRHPADDSQWRNIDRKFKDFGKDARNIWFGLSTDGMNPFGEMSSGHSTWPVTICIYNLPRWLCMKRKYIMMPIIIQGPKQPGNDIDVYQRPLVEDLNLLWKKEGVPVWDEDKQKEFNLRTLLFVTINDWPALSNVSGQSNKGYKACTHCMDETESMYLKHSRKVVYMGHRRFLAANHPVRMKGKHFEYKADHRTKPKHRSGKTVFAMVKDLKVVFGKGPGSQPIESEDGHAAMWKKNSIFWELPYWEFLDIRHAIDVMHLTKNLCVNLLGFPGVYGKSKDTLEARNDLKHMEQRGDLHPEPKEKGSHYLSPASYTLSKAEKESMFECLESIKVPSRYSMNIKRIISTKEKKFTNLKSHDCHVLMTQLLPVVIRGILPNNVRATITKLCAFMNAISQKVIDPDRLEALQNDVVQCLVSFELIFPPSFFNIMTHLLCHLVKEIGIFGPLYLHNMFPFERYMGVLKRYVRNRARPEASITKGYGTEEIIEFCVEFIEDLRPIGVPESRHEGRLRGKRTLGRKAIMTVDNNLFHKAHFTVLQQSSLVAPYIEEHLALVRARNIGKSDAWITRHHIDTFSTWLKQYLMGNETINQQLAFLARGPSGSIATFQGYEINGYTFYTRVQDMKSTNQNSAVRIDAMEHDSTTGTFYGAIEDIWELDYGPLKVSLFRCQWVRLTGGGVTIDDSGMTTVDLNKVGYSDEPFVLANDVTQVFYVKDMSSKEKKGKGPDEPKRHVVLPGKRKIVGVEDKTDEDYDQFDGQPPFIVTIDPSILLSNEDTPYSRSDHKEGTIVRRKYVRSTVTADVLP

SEQ ID NO: 118489 - protein, 1018 aa, Oryza sativa
  Clone ID: PAT_MRT4530_21796C.1.pep
MDRQWMYADRRSKEFIDGVHYFLRVAEANRKRGFICCPCNKCKNQKEYSASRTIHFHLFESGFMPSYNCWTSHGEQGVEMEEDEVEDDNIPDFAQFVGFEGNQTGEEEIAADGNDVADDLGQMLQDAREDCERAQKLDTTLELLQWKAKNGVSDKAFGDLLKLVKNILPGGNKLPETTYEAKKIVCPLGLEVHKIHACRGKTDCILYRGEEYENLEACPVCKALRYKIRRDDPGEVDGQLTKKRIPAKVMWYFPIIPRLRRLFRNKGNARMLRWHAEERQQDGMLRHPADGSQWRNIDRKFKEFGKDARNIRFGLSTDGMNPFGEMSSGHSTWPVTMCIYNLPPWLCMKRKYIMMPIIIQGPKQPGNDIDVYLRPLVEDLKQLWKKEGVPVWDEDKQEEFNLRALLFVTINDWPALSNLSGQSNKGYKACTHCMDETESTYLKHCRKVVYMGHRRFLAANHPVRKKGKHFEHKADHRTKPKHRSGKTVFAMVKDLKVVFGKGPGSQHIESEDGHAAMWKKNSIFWELPYWEFLDVRHAIDVMHLTKNLCVNLLGFLGVYGKSKDTLEARNDLKHMEQRGDLHPEPKEKGSHYLSPASYTLSKAEKESMFECLESIKVPSGYSTNIKRIISTKEKKFTNLKSHDCHVLMTQLLPVVIRGILPDNVRATITKLCAFMNAISQKVIDPDRLDALQNEVVQCLVSFELIFPPSFFNIMTHLLCHLVKEIRILGPMYLHNMFPFERYMGVLKKYVRNRARPEASIAKGYGTEEVIEFCVEFIEDLRPIGVPESRHEGRLRGKGTLGRKAIMTVDNNLFRKAHFTVLQHSSLVAPYIEEHLALVRARNIAQDMNSTNQNSAVRVDAMGHDGTTATYYGAIEDIWELDYGPLKVPLFRCQWVRLTGGGVMIDDSGMTTVDLNKVGYSDEPFVLANDVTQVFFVKDMSSKGKKGRGPDEPKRQVVLPGKRKIVGVEDKTDEDYDQLDGQPPFTVTIDPSILLSNEDTPYSRSDHKEGTIVRRKYVP

SEQ ID NO: 118490 - protein, 1628 aa, Oryza sativa
  Clone ID: PAT_MRT4530_21797C.1.pep
MEEDEVEDDNIPDFAQYVGFEGNQTGEEERDADGNDVADDLGQMLQDAKEDCESEKGAHKLDKMLEDHRTSLYPGCEQGHKKLDTTLEFLQWKAKNGVSDKAFGDLLKLIKNILPEGNKLPKTTYEAKKIVCPLGLEVQKIHACPNDCILYRGEEYENLEACPVCKALRYKIRRDDPGEVDGQLTKKKIPAKVMWYFPIIPRLRRLFRNKGNASMMRWHAEERQQDGMLRHPADGPKQPGNDIDVYLRPLVEDLKLLWKKEGVPVWDEDKQEEFNLRALLFVTINDWPALSNLSGQSNKGYKACTHCMDETESTYLKHCRKVLYMGHRRFLAANHPVRKKGKHFEHKADHRTKPKHRSGKTVFAMVKDLKVVFGKGPGSQPIESEDGHAAMWKKNSIFWELPYWEFLDVRHAIDVMYLTKNLCINLLDFLGVYGKSKDTLEARNDLKHMEQRDDLHPEPKEKGSHYLSPASYTLSKAEKESMFECLESIKVPSRYSTNIKRIISTKEKKFTNLKSHDCHVLMTQLLPVVIRGILPDNVRATITKLCVFMNAISQKVIDPDRLEALQNDVVQCLVSFELIFPPSFFNIMMHLLCHLVKEISILGPVYLHNMFPFERYMGVLKKYVRNRARPEASIAKGYGTEEVIEFCVEFIEDLRPIGIPESRHEGRLRGKGTLGRKAIMTVDNNLFRKAHFTVLQQSSLVAPYIEEHLALVRARNIGKSDAWITRYHIDTFPAWLQQHLMGNESINQQLAFLVRGPSGSIATFQGYEINGYTFYTRAHDMKSTNQNNAVRVDAMGHDGTTGTYYGGIEDIWELDYGPLKVPLFRCQWVRLTGGGVMIDDSGMTTVDLNKVGYSDEPFVLANDVTQVFYVKDMSSKGKKGRGPDEPKRHVVLPGKRKIVGVEDKTDEDYDQLDGQPPFTVTIDPSILLSNEDTPYSCSDHKDGTIMRRKKDVVRVVPQAGVMADRDEEQILYDTIAEGSSQYWNEEEGNEDPNQYLNEEGNKGARGQRGAAKKLEGRHIITEVDEDGRPSAPAEAAKNYVRHNGWVVRDNVPVSTVYWRRTRARGDHESFVPDSEKEMLWTTMLEIFTLPAGTEDKVKRWTLKKMAEQFQSFKGDLYQKYILKGQTPNFDTFPKLRDHWDEFVAYKTGEQGQAMMERNKENAAKKKYHHHLGSGGYSVAMPKWEEMKASLLERGIEPATANWPERLKFWYYAHGGTLNPADGSLGTFRPDREKDELSLALQTPEHPGRTRGKGVIPWKIGFKEDIHTYRSRMRSKRDTEEKIADLEFRVSSYELSMQQEVARKVDERMAAHRSHDPQPTILPAMVSPSGNRSSCASTGQVGSQSMDAMQTQDETTCPVDDITQRTLCELHIPFKNLSIKVASGMAIPTDPSDTYHYRLIPAGYFKVEVELVEGAYKDLELDYPGGDGETHLRDTSHAIILWRKRYIILPGQQAVSRAPSPPALPSPPQAPTPSPLHAPAPSPPQAPALTPPQAPAPNPPQAPAPTPPQAPTPTPPQAPLPAPSKSRAPQAPPPAPTRATKKAKVDTAKNKDLGYDCTQEELDAYVASEVKRQFKPRSPEKKIPIDPSVRNFFRGMSAPAKEAIKLSDYERTLKKASSGKSKPVPQLGE

SEQ ID NO: 118491 - protein, 837 aa, Oryza sativa
  Clone ID: PAT_MRT4530_21798C.1.pep
MEEDDNIPDFAQYVGFEENQTGEEEIAADGNDVADDLGQMLQDAREDCESEKEAHKLDKMLEDHRTSLYPGCEQGHKKLDTTLEFLQWKAKNGVSDKAFGDLLKLVKNILPGGNKLPETTYEAKKIVCPLGLEVHKIHACPNDCILYRGEEYENLEACPVCKALRYKIRRDDPGEVDGQLTKKRIPAKVMWYFPIIPRLRRLFRNKGNARMLRWHAEERQQDGMLRHPAHGSQWRNIDRKFKEFGKDARNIQFGPKQPGNDIDVYLRPLVEDLKQLWKKEANHPVWKKGKHFEHKADHRTKPKHHSGKTVFAMVKDLKVVFGKGPGSQPIESEDGHAAMWKKNSIFWELPYWEFLDHMEQRGDLHPEPKEKGSHYLSPGSYTLSKAEKESMFECLESIKGYPSRQCPGNNNKVCAFMNAISQKVIDPDRLEALKNEVVQCLVSFELIFPPSFFNIMTHLLCHLVKEIRILGPVYLHNMFPFERYMGVLKKYVRNRARPEASIAKGYGTDEVIEFCVEFIEDLRPIGVPESRHEGRLRGKGTLGRKAIMRVDNNLFRKAHFTVLQHSSLVAPYIEEHLALVRARNIGKSDAWITRHHIDTFPTWLRQHLMGNESINQQLAFLARGPSGSIATFQGYEINGYTFYTRAQDMKSTNQNNVVRVDAMGHDGTTATYYGAIEDIWELDYGPLKVPLFRCQWVRLSGGDVMIDDSGMTTVDLNKVGYSDEPFVLANDVTQVFFVKDMSSKGKKGRGPDEPKRQVVLPGKRKIVGVEDKIDEDYDQLDRQPPFTVTIDPSILLSNEDTPYSRSDHKEGTIVRRKYVRSTVTADVMPRCKLFWMY

SEQ ID NO: 118492 - protein, 146 aa, Oryza sativa
  Clone ID: PAT_MRT4530_21799C.1.pep
MSFLAYVRKITKEHQPSGVKYQNAEAEVGRDIEIQPRCHCCYVEFVDVVMVEDKSRAKEHIKLQESCVGYIYSLQSQVCPVGCRASTQSQDCNLTDNFYFNIFPSAATALEKPIPCAVGNTLACDEFDEVKTLSSGDERWFAPVAA

SEQ ID NO: 118493 - protein, 154 aa, Oryza sativa
  Clone ID: PAT_MRT4530_2179C.1.pep
RAAGEILKECPGQYYRYHGDWRSETQAVVSMLAFMHWLETGGLLMHAEAQEKLGLSSGEFGLDVEDYLTGLCFMSNDFPRYVVNRVTAGDYDCPRKVLSFLTDLHASFRMLNLRNDFLRKKFDGMKYDLRRVEEVYYDVKIRGLVPGESKQEAA

SEQ ID NO: 118494 - protein, 649 aa, Oryza sativa
  Clone ID: PAT_MRT4530_217C.1.pep
MHVGYGIVAVVLVLLPPSATPAGIADCDEGVGNTYVANSTFEANLNVLAAALSPNVSVAPAGFAVATVGADPDKVFAMALCRGDVNASACSACVAAAFVDGKKDCPGNSGVAMYEDACVARFSRYRFMDFLSPDQWQVSQMIWYPEQASASVDVPAVGWFNAAVTKILAAMVDHAVTSTTGNSTTKKYFVTGEEEFDPNIYGFAQCVPDLTPAQCNDCLKDLLFYAKQAYLGKSLSWVRVNSVWCRLMYSVQPFYRGRAMLQVSAPPPTAEAPVLSPEPGSGKKISTAGIAAGVASSVVVLLILSVFAFVRFRRRTKVTDAVHPLKKITRAQCMIFDLSALQEATENFSPNNKLGEGGFGAVYKGVLSDGQEVAVKKLLGTGHGLDQLYNEIKLLAELQHKNLVRLQGFCLHQEQTLLVYEYLKNRSLDNFLFDPSRGNALNWDQQYNIILGIAKGILYLHEDSSLRIIHRDLKSNNILVGDDMEPKIADFGLARLLGEGHTHSKTTRVVGTFGYMAPEYAIDGNVSTKIDIFSFGVLVLEIITRRRNWHSDDHDLVSDVWNCWTKGTATKMIYQSLNGYSESQALRCIHIGLLCVQPDPDDRPHMSSIIFMLTKENMKLQPPAEPAFFLGRESASSPPSCGQHGYNCD

SEQ ID NO: 118495 - protein, 1092 aa, Oryza sativa
  Clone ID: PAT_MRT4530_21800C.1.pep
MATAAQNAEGAAFPSCGFGGWFCSRGADVASGKKQPLQGLDHRVMVALMDRKWMYADRRSKEFIDGVHYFLRVAEANRQRGFICCPCNKCKNQKEYFASRTIHFHLFESGFMPSYNCWTSHGEQGVEMEEDEVEDDNIPDFAQYVGFEGNQTGEEEIAADGNDVADDLGQMLQDAREDCESEKEAHKLDKMLEDHRTSLYPGCEQGHKKLDTTLELLQWKAKNGVSDKAFGDLLKLIKNILPVGNKLPETTYEAKKIVCPLGLEVHKIHACPNDCILYRGEEYENLEACPVCKALRYKIRRDDPGEVDRQLTKKRIPAKVMWYFHIIPRLRRLFRNKGNARMLRWHAEERQQDGMLRHPADGSQWRNIDRKFKEFGKDARNIRFGLSTDGMNPFGEMSSGHSTWPVTMCIYNLPPWLCMKRKYIMMPIIIQGPKQPGNDIDVYLRPLEGVPVWDEDKQEEFNLRALLFVTINDWPALSNLSGQSNKGYKACTHCMDETESTYLKHCRKVVYMGHRRFLAANHPVRKKGKHFEHKADHRTKPKHRSGKTVFAMVKDLKVVFGKGPGSQHIESEDGHAAMWKKNSIFWELPYWEFLDVRHAIDVMHLTKNLCVNLLGFLGVYGKSKDTLEARNDLKHMEQRGDLHPEPKEKGSHYLSPASYTLSKAEKEIVIRGILPDNVRATITKICAFMNAISQKVIDPDRLEALQNEVVQCLVSFELIFPPSFFNIMTHLLCHLVKEIRILGPMYLHNMFPFERYMGVLKKYVRNRARPEASIAKGYGTEEVIEFCVEFIEDLRPIGVPESRHEGRLRGKGTLGRKAIKTVDNNLFRKAHFTVLQHSSLVAPYIEERLALVRARNIGKSDAWITRHHIDTFPAWLRQHLMGNESINQQLAFLARGPSGSIATFQGYEINGYTFYTRAQDMKSTNQNSAVRVDAMGHDGTTATYYGSIKDIWELDYGPLKVPLFRCQWVRLTGGGVMIDDSGMTTVDLNKVGYLDEPFVLANDVTQVFFVKDMSSKGKKGRGPDEPKRQVVLPGKRKIVGVEDKTDEDYDQLDGQPPFTVTIDPSILLSNEDTPYSRSDHKEGTIVRRKYVP

SEQ ID NO: 118496 - protein, 47 aa, Oryza sativa
  Clone ID: PAT_MRT4530_21801C.1.pep
ITARYYPEYFFFSPPVLTGFKCWIWKMYLFVRGVDNKLILPLFPPVM

SEQ ID NO: 118497 - protein, 53 aa, Oryza sativa
  Clone ID: PAT_MRT4530_21802C.1.pep
RGTATDGMIKELFISFKRTTGHKPQRIIFDSDGAIYGHFYQVLVHELDAIRKA

SEQ ID NO: 118498 - protein, 53 aa, Oryza sativa
  unsure (1)..(53): unsure at all Xaa locations
  Clone ID: PAT_MRT4530_21803C.1.pep
VCKQARSQYSVSEVGDDQVRIGLELXGYFVRDIHKAFSLLSHPSFFVPQRHTS

SEQ ID NO: 118499 - protein, 40 aa, Oryza sativa
  Clone ID: PAT_MRT4530_21804C.1.pep
VRLLVSTTPRVLQWAAGDGAAAVRGSAAEAAGAELPRRMV

SEQ ID NO: 118500 - protein, 158 aa, Oryza sativa
  Clone ID: PAT_MRT4530_21805C.1.pep
HEGQVAARRRGRHRRRDQPQLAFCPGIIVPGIYYSDDKLLQTRIFSYSDTQRHRLGPNYLLLPPNAPKCAHHNNHYDGFMNFMHRDEEVDYFPSRYDPAKHAPRYPIPSATLTGRREKVVIAKENNFKQPGERYRSWDPARQDRFIKRWIDALSDPRL

SEQ ID NO: 118501 - protein, 52 aa, Oryza sativa
  Clone ID: PAT_MRT4530_21806C.1.pep
DPSSIGVGPRCGLLYHDQNSLHLHLFNIVIISVLVHPSHKIEIKNPDHLKNQ

SEQ ID NO: 118502 - protein, 492 aa, Oryza sativa
  Clone ID: PAT_MRT4530_21807C.1.pep
MDPYKHRPSSSFNGPLWSTNSGAPVWNNNNSLTVGSRGPILLEDYHLVEKLANFDRERIPERVVHARGASAKGFFEVTHDITHLTCADFLRAPGVQTPVIVRFSTVIHERGSPETLRDPRGFAIKFYTREGNWDLVGNNFPVFFIRDGMKFPDMVHSLKPNPKSHVQENWRILDFFSHHPESLHMFTFLFDDIGIPADYRHMDGSGVNTYTLVNRAGKSHYVKFHWKPTCGVKSLLDDEAVTVGGTNHSHATQDLYDSIAAGNFPEWKLFIQTIDPDHEDRFDFDPLDVTKTWPEDIVPLQPVGRMVLNRNIDNFFSENEQLAFCPGIIVPGIYYSDDKLLQTRIFSYSDTQRHRLGPNYLLLPPNAPKCAHHNNHYDGFMNFMHRDEEVDYFPSRYDPAKHAPRYPIPSATLTGRREKVVIAKENNFKQPGERYRSWDPARQDRFIKRWIDALSDPRLTHEIRSIWLSYWSQADRSLGQKLASRLSAKPSM

SEQ ID NO: 118503 - protein, 128 aa, Oryza sativa
  Clone ID: PAT_MRT4530_21808C.1.pep
EESTPKSQVHEPPCPLCTRGTDDEGCVSFSEPLHVALRSARRNQGNSFSLGGSGGSTSANPSRSDHGLKRNQSALVARRSGTMFRNRFKKQFSFKGRFGKDLFGGRVFKKVGSSSSSGQQDDRQQPKA

SEQ ID NO: 118504 - protein, 583 aa, Oryza sativa
  Clone ID: PAT_MRT4530_21809C.1.pep
MRRLLLAGILRRASSSPSSHHHLHLVRALSASSPLPASDADLRKYAGYALLLLGCGAATYYSFPLPPDALHKKAVPFKYAPLPDDLHAVSNWSATHEVHTRVLLQPDSLPALHDALAAAHGERRKLRPLGSGLSPNGLALSRAGMVNLALMDKVLGVDAKKKTVTVQAGIRVAELVDALREHGLTLQNFASIREQQVGGIIQVGAHGTGARLPPIDEQVISMKLVTPAKGTIELSREKDPDLFYLARCGLGGLGVVAEVTLQCVERHQLIEHTFVSNADEVKKNHKKWLSENKHIKYLWIPYTDTVVVVQCNPPSRWRTPKFTSKYGKDEAIQHVRDLYHESLKKYRTKAESNDPEVDQLSFTELRDRLLTLDPLDKDHVIRINKAEAEYWKKSEGYRMGWSDEILGFDCGGQQWVSETCFPAGTLAKPNMKDLDYIEELLQLIEKEDIPAPAPIEQRWTACSRSPMSPASSSQEDDIFSWVGIIMYLPTSDARQRKEITEEFFNYRSKTQTNLWDGYSAYEHWAKIEVPKDKDELAELQARLRKRFPVDAYNKARMELDPNKVLSNAKLEKLFPVTEVQHVK

SEQ ID NO: 118505 - protein, 95 aa, Oryza sativa
  unsure (1)..(95): unsure at all Xaa locations
  Clone ID: PAT_MRT4530_2180C.1.pep
FFFFFFSAAHGAFPINQGMSIQHNXTQLSPIXALTSLLKSIKQAQVXWRPQAAHRVAPISWQNRDPNWCQRXTEGHPFGLALYLASPAAGHVXSF

SEQ ID NO: 118506 - protein, 92 aa, Oryza sativa
  Clone ID: PAT_MRT4530_21810C.1.pep
MALAAGTVATGDCGCGIGRWEARWLDLYRLAAAGATSADPARHGCGRGNDKRMRAGGMAAPPPSLIGGGHDVGGSGTARLRAPRRRATTDRR

SEQ ID NO: 118507 - protein, 463 aa, Oryza sativa
  Clone ID: PAT_MRT4530_21811C.1.pep
MAIAISQEAFDAMVRENMEDLGMDADEALADAVDALTLQGADLSGIIKRVPGEAAAAEVSPVMRVLDEVKASSASDSDSGGRSEEDAERLASLLDELRELCSGDGLENAAVAARNGGVEALVALCASAGVKQERLLASGLKALSSLLRDVGSTEKFRQSEGPQVVMGILKGGSESSDILEGGFRVVASASAGNEVVKECFMVLKVDELIFQVMGEKSNSNVQSLYDAIRVLLTPDDNRVVASQVYGYSRRFAETGIAAVLVNALREKVAPSSLPSACAALKAIAVNDEICRSISENGGIDVLLRCIDEASEQKNKVIAKSCCSLLSKLAGSDANKTTIIERGGFDKFLKLTSRFSEDPPIIQEVMSMVTILTLRSPENAARAMGAGYGTLAIQAMQKFPSSAQTQKQACLMIRNLVVRNPENRTILLNDGVEKLIRKTKMMHGSCKDAATSALRDLGVDNYNA

SEQ ID NO: 118508 - protein, 675 aa, Oryza sativa
  Clone ID: PAT_MRT4530_21812C.1.pep
MFDSLLNSKFYNKCKHAIKCTRTRLDLVRRKKQAMVKFMKKDVADLIGNRLESHAFGRMEALIVEMNQASCYDMIEQYCEYIVKQLNNLQKQNECPQEALEAVSTLIFATARFPELPELCDLRHMFTERYGSFVEPFVSSEFVQKLQNKSFTNEEKLQVMQSIAEEFSVPFNSKALERKISGVPQNKHDLQNKSSFKRVEVEASACNELKVDRHAVHERKSKVTPEVHERKQEMPVKPKDIHVIPDAIGKVGEKSRKNRSDIPYDVPPSDLKQINDQELKKDHKKHSHHQRELRNADKSAPPYAEPKEDVAEKSDGKGYHVHRSRMAGGLDHNWGHADLGLKTLGLEKQGIEPASSLDGKTLNKAPPYSKPYKASDEYGQSVQDRQKMPEKAVNMRPPYVKPNSTNQAVDDYKHAGTGEIGHQRDGLADDNTLQPVSVRRKSAKPPTHGDRYDDEAKMTSQTPGGRRRHSSRRNGSDDDYDQRVGYMLPPDDDAVNNARHFKRMSERRKHGSRQGGSASGNDYESDEDETNSVIDFGNLLPRAPSSHRKHRSRSAHPRSGGRDDEERVMDKLLMHYSKKGIDREEHKTRTKSRTPRPRADQPADGVGERSNREVAPQHPPERTVSLPSDSGNLGVKPKAPARSISMQPDKSRGIVHPSMPDFDELAARISALRKE

SEQ ID NO: 118509 - protein, 267 aa, Oryza sativa
  unsure (1)..(267): unsure at all Xaa locations
  Clone ID: PAT_MRT4530_21813C.1.pep
MGLPEQPSGSSGPKAELPVAKEPEASPTGGAAADHADENNESGGGEPREGALVAAPNRGPRERPRGCNNNAEAAIFGTRXDSPNALRSHVMEVAGGADVADAIAQFSRRRQRGVCVLSGAGTVANVALRQPSAPGAVVALHGRFEILSLTGTFLPGPAPPGSTGLTVYLAGGQGQVVGGSVVGSLIAAGPVMVIASTFANATYERLPLEEEEEGSGPPMPGGAEPLMAGGHGIADPSALPMFNLPPSNGLGGGGDGFPWAAHPRPPY

SEQ ID NO: 118510 - protein, 255 aa, Oryza sativa
  Clone ID: PAT_MRT4530_21814C.1.pep
MVADGGGWRRWWLWQWRWRLSTMVPMAAMVKGHHPADGASSSAAGIVGESLAEPFGRLTTTTLFGVVPLLGGVVLAYPFPFPTIFSGYIMDPKMKQLQEALVDIETDAEQLLLARHQLVENDRIRNGNREALTALRKRAKTTKTSVPTPFEIIMKGLEGTSGKQLVKEICPTCGDHDPKEDTWLMFPGSDIFARVPFHVAHTVLDKDQERLDYDTKKLQSFVKEKSFVISEKGALADRISPGIVKSLVSLTDKPK

SEQ ID NO: 118511 - protein, 89 aa, Oryza sativa
  unsure (1)..(89): unsure at all Xaa locations
  Clone ID: PAT_MRT4530_21815C.1.pep
MEIQYELNSDRDPNRSPTGLQGPSDGSYIFVRGVTGGGIASPWEYGEENARGGEDRAGAIDYFLYIDARYFARIPSTSXHLLPLRSASS

SEQ ID NO: 118512 - protein, 97 aa, Oryza sativa
  unsure (1)..(97): unsure at all Xaa locations
  Clone ID: PAT_MRT4530_21816C.1.pep
LSLYXCTAVAQLVVMMEIVKHFIITYPIYELXXINFHFCIYCLNYALSIACLLSLRLSRLVRSLCAQAYMVILLFGDYVGLIPLPAEWCRGCDRLFX

SEQ ID NO: 118513 - protein, 115 aa, Oryza sativa
  unsure (1)..(115): unsure at all Xaa locations
  Clone ID: PAT_MRT4530_21817C.1.pep
EWGGNLPDDDNKAIDAAARSQLFPSFRRDGDIPDADDEATGAAARSRLLPVADXDVAAAAARNQPFPSIRPLVFGSRTSAATNRRRLRPHWHPWSSPAKDQLGTNPKSITNSLPI

SEQ ID NO: 118514 - protein, 519 aa, Oryza sativa
  Clone ID: PAT_MRT4530_21818C.1.pep
FLAVVTGMAALVFIRFIVHDHDNLFVAAEAAHALGIAVLIYKLTKEKTCAGLSLKSQDLTALFLAVRLYCSFVMEYDIHTVLDTATLAATLFVIYMIRFKLRPTYMVDKDNFALYYVVVPCAVLALLIHPSTSHNIVNRISWAFCVYLEAVSVLPQLRLMQNTKIVEPFTAHYVFALGVARFLSCAHWVLQVLDTRGRLLTALGYGLWPSMVLLSEIVQTFILADFCYYYVKSLVGGQLVLRLPSGVVQNGERKSYDVLQRFGFHTICMVAFGHDLPCLADGGVMEDARSDFMHSFGEAQNLVVGRFFDLIEVSWKIKKWLNVGTIRRLRKAIADVHTFAMDIVRARRQSASVQDRDDVLSRFVASDEHSDEVLRDIVLSFLIVGRDTTASGLSWFFCLLSSRPDVVARIADEVRAVRKPTDTRLGEPFRFDALWEMHYLHAALTESMRLYPPASVVRGGRHTPRRHARPRRLVRDVQRIRHRARTAWSTGRSGGSARTACSSRRAREREMPASQRKRD

SEQ ID NO: 118515 - protein, 168 aa, Oryza sativa
  unsure (1)..(168): unsure at all Xaa locations
  Clone ID: PAT_MRT4530_21819C.1.pep
MAAPPRAPSPARACRCARGRRVAPRRRLFAPPPXSVAGVDDGRRRVEVLEDEEVPAIVSVGARLSWXAAPVRSTTMTAAGVTVVDVPAXGVARRWXSRHWLRPLLIGLGFVGWSXGGGGESRTLCRAGLHPSFIMAQCDGGPPAIGLGAPDQGAVKAQSLSYAFTVVL

SEQ ID NO: 118516 - protein, 77 aa, Oryza sativa
  Clone ID: PAT_MRT4530_2181C.1.pep
PVCTSSEPASALSMAILDLPLARLGADVSCTPCASRVDGPHGVCHLARSGQTSPEYSLSISSDVWSQACDDFAIRVR

SEQ ID NO: 118517 - protein, 231 aa, Oryza sativa
  unsure (1)..(231): unsure at all Xaa locations
  Clone ID: PAT_MRT4530_21820C.1.pep
RPGEKNSSEDCSATYINKKLKSKFSKAWISFLQLPLPLDVYKEVLATIHKNVIPSMSNPAILCDFLTRSYDIGGVISVMALSGLFILMTQHGLEYPKFYDKLYALLTPAVFMAXKHRAVFLQLLDACLKSSYLPAYLAAAFAKRLSRLTLSVPPAGALIIIALIHNLLRRHPSINFWVHWEIDANDSEIFNEASQRKKVGADPFXNEQTDPAKSGAMRSSLWEIKTLRHHY

SEQ ID NO: 118518 - protein, 159 aa, Oryza sativa
  unsure (1)..(159): unsure at all Xaa locations
  Clone ID: PAT_MRT4530_21821C.1.pep
MAAPPRAPSPARACRCARGRRVAPRRRLFAPPPXSVAGVNDGRRRGXELGLGFLVLLIRADLVLFFLWISFPETIXTLGHRRCRRGLTWMRRWXSRHWLRPLSIGLGFCGVELAAAVNLVPCAVPASTPLXYMAQCDGGPPAIGLGAPDQGAVKAPLSR

SEQ ID NO: 118519 - protein, 903 aa, Oryza sativa
  Clone ID: PAT_MRT4530_21822C.1.pep
MEEDEVEDDNIPDFAQYVGFEGNQTGEEEIAADGNDVADDLGQMLQDAREDCESEKEAHKLDKMLEDHRTSLYPGCEQGNKTLDTTLELLQWKAKNGVSDKAFGDLLKLVKNILSGGKQIARDNEYENLEACPVCKALRYKIRRDDPGEVDGQLTKKRIPAKWRNIDRKFKEFGKDARNIRFGLSTDGMNPFGEMSSGHSTWPVTMCIYNLPPWLCMKRKYIMMPIIIQGPKQPGNDIDVYLRPLVEDLKQLWKKEGVPVWDEDKQEEFNLRALLFVTINDWPALSNLSGQSNKGYKACTHCMDETESTYLKHCRKVVYMGHRRFLAANHPVRKKGKHFEHKADHRTKPKHRSGKTVFAMVKDLKVVFGKGPGSQHIESEDGHAAMWKKNSIFWELPYWEFLDHMEQRGDLHPEPMEKGSHYLSPASYTLSKAEKESMFECLESIKVPSGYSTNIKRIISTKEKKFTNLKSHDCHVLMTQLLPVVIRGILPDNVWATITKICAFMNAISQKVIDPDRLEALQNEVVQCLVSFELIFPPSFFNIMTHLLCHLVKEIRILGPMYLHNMFPFERYMGILKKYVRNRARPEASIAKGYGTEEVIEFCVEFIEDLRPIGVPESRHEGRLRGKGTLGRKAITTVDNNLFRKAHFTVLQHSSLVAPYIEEHLALVRARNIGKSDAWITRHHIDTFPAWLRQHLMGNESINQQLAFLARGPSGSIATFQGYEINGYTFYTRAQDMKSTNQNSAVRVDAMGHDGTTATYYGAIEDIWELDYGPLKVPLFRCQWVRLTGGGVMIDDSGMTTVDLNKVGYSDEPFVLANDVTQVFFVKDMSSKGKKGRGPDKPKRQVVLPGKRKIVGVEDKTDEDYDQLDGQPTFTVTIDPSILLSNEDTPYSRSDHKEGTIVP

SEQ ID NO: 118520 - protein, 116 aa, Oryza sativa
  unsure (1)..(116): unsure at all Xaa locations
  Clone ID: PAT_MRT4530_21823C.1.pep
MKKCRPSSSLALGCRGCGAGEVDGDDGCGSDGRRCPGDEVWRGGGASRHWLRPLSIGLGFVGWSXGGGGESRTLCRAGXPPLFYMAQCDGGPPAIGLGAPDQGXGQGPLEPLGSIP

SEQ ID NO: 118521 - protein, 711 aa, Oryza sativa
  Clone ID: PAT_MRT4530_21824C.1.pep
MDRQWMYTDRRSKEFINGVHYFLRVAEANKQKGFICCPCNKCKNQKEYSASRTIHFHLFESGFMPSYNCWTSHGEQGVEMKEDEVEDDNIPDFAQYAEFEGNQTGEEDIDADYNDVADDLSQMLQDAKEDCESEKGAHKLDKMLEDHRTSLYPGCEQRHKKLDTTLEFLQWKAKNGVSDKAFGDLLKLVKNILPEGNKLPETTYEAKKIVCPLGLEVQKIHACPNDCILYHGEEYENLEACPVCKALRYKIRRDDLGEVDGQLTKKRIPAKVMWYFPIIPRLRRLLRNKGNARMMCWHAEESQQDGMLRHPADGSQWRNIDRKFKDFGKDARNIRFGLSTDGMNPFGEMSSGHSTWPVTMCIYNLLPWLCMKRKYIMMPIIIQGPKQPGNDIDVFLRPLVEDLKLLWKKEGVPVWDEDKQEKFNLQALLFVTINDWPALSNLSGQSNKGYKACTHCMDETESTYLNHCRKVVYMGHRRFLAANHPVRKKGKHFEHTADHRVYGKLKDTLEARNDLKHMKQRGDLHPEPQEKGSHYLSPASYTLSKAEKESMFQCLESIKVPSGYSTNIKRIISTKEKKFTNLKSHDYHVLMTQLLPVIIRSILPDNVRVTITKLCSFMNAISQKVIDPDRLEALQNDVVQCLVSFELIFPPSFFNIMTHLICHLVKEIGILGPVFLHNMFPFERYMGVLKKYIRNRALPEASIAKGYGTWA

SEQ ID NO: 118522 - protein, 194 aa, Oryza sativa
  Clone ID: PAT_MRT4530_21825C.1.pep
MTAWSMASLTIVVAAIFLVAGLLLSSASVAVHGRRSSRRRFVRSYDEPCMEMRLYLHDILYDYSNSTSNSTAAAATKPTALANAVPSTGGTFFGTTVVFNDPMTEGTSALPPSPAMEEETAVRAQGLYLYDGKAASTLNAWLAFSVVFNSTARRGTLSLMGAVLNFALGSHRLDLVGWFYLGLMNDIVDERERV

SEQ ID NO: 118523 - protein, 940 aa, Oryza sativa
  Clone ID: PAT_MRT4530_21826C.1.pep
MEEDEVEDDNIPDFAQYVGFEGNQTGEEEIAADGNDVADDLGQMLQDAREDCESEKEAHKLDKMLEHHRTSLYPGCEQGHKKLDTTLELLQWKAKNGVSDKAFGDLLKLVKNILPGGNKLPETTYEAKKIVCPLGLEVHKIHACPNDCILYRGEEYENLEACPVCKALRYKIRRDDPGEVDGQLTKKRIPAKVMWYFPIIPRLRRLFRNKGNARMLRWHAEERQQDGMLRHPADGSQWRNIDRKFKEFGKDARNIRFGPKQPGNDIDVYLRPLVEDLKQLWKKEGVPVWDEDKQEEFNLRALLFVTINDWPALSNLSGQSNKGYKACTHCMDETESTYLKHCRKVVYMGHRRFLTANHPVRKKGKHFEHKADHRTKLKHRSGKTVFAMVKDLKVVFGKGPGSQHIESEDGVYGKSKDTLEARNDLKHMEQRGDLHPEPKEKGSHYLSPASYTLSKAEKESMFECLESIKVPSGYSTNIKRIISTKEKKFTNLKSHDCYVLMTQLLPVVIRGILPDNVRATITKLCAFMNAISQKVIDPDRLEALQNEVVQCLVSFELIFLPSFFNIMTHLLCHLVKEIRILGPMYLHNMFPFERYMGVLKKYVRNRARPEASIAKGYGTEEVIEFCVEFIEDLRPIGVPESRHEGRLRGKGTLGRKAIMTVDNNLFRKAHFTVLQHSSLVAPYIEEHLALVRARNIGKSDAWITRHHIDTFPAWLRQHLMGNESINQQLAFLARGPSGSITTFQGYEINGYTFYTRAQDMKSTNQNSVVRVDAMGHDGTTATYYGAIEDIWELDYGPLKVPLFRCQWVRLTGGGVMIDDSGMTTVDLNKVGYSDEPFVLANDVTQVFFVKDMSSKGKKGRGPDEPKRQVVLPGKRKIVGVEDKTDEDYDQLDGQPPFTVTIDPSILLSNEDTPYSRSDHKEGTIVRRKYVRSTVTADVMP

SEQ ID NO: 118524 - protein, 296 aa, Oryza sativa
  Clone ID: PAT_MRT4530_21827C.1.pep
MPPARVLGGGGGGGGLGDEAPELERQMGCMAGIFQIFDRRQRLLTARRRRPPPKMLPPGPGHTLPRSSSNVAAQSSSTSKIVLEKTFSKSMTENSSLSIESSRASCSSSSCSSFSSLDGNKSIQQELPYINEQLFVQRPLKSSPSLKDPVMDTRSGQSNIGFRDIVKDSINRDTGGLTVKTSVKDARRNGQYKDSPRPLLLSKSMDGTYVIGIDRSTKVPANAVESSRRFPEQSRFSCDDRRLLRPVEAQENKKPSTRLKELPRLSLDSRKETLSSSSRQKTFSYRRTDDSLMDAL

SEQ ID NO: 118525 - protein, 1072 aa, Oryza sativa
  Clone ID: PAT_MRT4530_21828C.1.pep
MSTICHGQISSSTCPRSNEGGKELVRHLSVTSKMDRQWMYADRRSKEFIDGVHYFLRMAEANRQRGFICCPCNKCKNQKEYSASRTIHFHLFESGFMPSYNCWTSHGEQGVEMEEDEVEDDNIPDFAQYVGFEGNQTGEEEIAADGNDIADDLGQMLQDAREDCESEKEAHKLDKMLEDHRTSLYPGCEQGHKKLDTTLELLQWKAKNGVSDKAFGDLLKLVKNILPGGNKLPETTYEAKKIVCPLGLEVHKIHACPNDCILYRGEEYENLEACPVCKALRYKIRRDDPGEVDGQLTKKRIPAKVMWYFPIIPRLRRLFRNKGNARMLRWHAEERQQDGMLRHPADGSQWRNIDRKFKEFGKDARNIRFGLSTDGMNPFGEMSNGHSTWPVTMCIYNLPSWLCMKRKYIMMPIIIQGPKQPGNDIDVYLRPLVEDLKQLWKKEANHPVRKKGKHFEHKADHRTKPKHRSGKTVFAMVKDLKVVFGKGPGSQHIESEDGHAAMWKKNSIFWELPYWEFLDVRHAIDVMHLTKNLCVNLLGFLGVYGKSKDTLEARNDLKHMEQRGDLHPEPKEKGSHYLSPASYTLSKAEKESMFECLESIKVPSGYSTNIKRIINTKEKKFTNLKSHDCHVLMTQLLPVVIRGILPDNVRATITKLCAFMNAISQKVIDPDRLEALQNEVVQCLVSFELIFPPSFFNIMTHLLCHLVKEIRILGPMYLHNMFPFERYMGVLKKYVRNRACPEASIAKGYGTEEVIEFCVEFLEDLRPIGVPESRHEGRLRGKGTLGRKAIMTVDNNLFRKAHFTVLQHSSLVAPYIEEHLALVRARNIGKSDAWITRHHIDTFPAWLRQHLMGNESINQQLAFLARGPSGSIATFQGYEINGYTFYTRAQDMKSTNQNSAVRVDAMGHDGTTATYYGAIEDIWELDYGPLKVPLFRCQWVRLTGGGVMIDDSGMTTVDLNKVGYSDEPFVLANDVTQVFFMKDMSSKGKKGRGPDEPKRQVVLPGKRKIVGVEDKTDEDYDQLDGQPPFTVTIDPSILLSNEDTPYSRSDHKEGTIVRRKYVRSTVTADVMP

SEQ ID NO: 118526 - protein, 761 aa, Oryza sativa
  Clone ID: PAT_MRT4530_21829C.1.pep
MVLGDPWSRVNRGDVSSIGAQGEVWRRRLGRWESPLPRVLGGGGYYNIGQILQDAKENDESEKEAHKLERMLEDHRTSLYPGCEQGHKKLDTTLEFLQWKAKNGVSDKEFGDLLKLVKNILPEGNKLPETTYEAKKIVYPLGLEVQKIHACPNDCILYRGEENKGNARMMRWHAEERQQDGILRHPADGSQWRNIDRKFKDFGKDARNIQFGLSTDGMNTFGEMSSSHSTWKFVYMGHRRFLVANHLVRKKGKHFEHKADHRTKPKHRSGKTVFAMVKDLKVVFGKGPGSQPIESEDGHAAMWKKNFIFWELPNWEFLDVRHAIDVMHLTKNLCVNLLGFLGVYGKSKDTLEARNDLKHMEQLGDFHPEPKEKGSYYLSPASYTLSKAEKESMFECLESIKVPSGYSTNIKRIVSTKENKFTNLKCHDCHVLMTQLLLVVRRGILPDNVRAIITKLCAFMNAISQKVIDPNRLEALQNDVRYMGVLKKYVRNRARPEASIAKGYGTEEVIEFCVEFIEDLRPIGVPESRHEGRLWGKGTLGRKAIMTVDNNLFRKAHFTVMQQSSLVAPYIEEHLALVHARNIVRGPSGSIATFQGNEINGYTFYTRAQDMKSTNQNSAVCIDAMGHDGTTGTYYGAIEDIWELDYGPLKVGYSDEPFVLANDVTQVFYMKDMSSKGKKGKGLDEPKRHVVILGKRKIVGFEDKTDEDYDQLDGQPPFTVTIDPSILLSNEDTPYSRSDHKEGTIVRRKYVRSTVTADVMP

SEQ ID NO: 118527 - protein, 2071 aa, Oryza sativa
  unsure (1)..(2071): unsure at all Xaa locations
  Clone ID: PAT_MRT4530_2182C.1.pep
GAMSPSPTWRPPDLRYKRDPPRDXGIEFQSLHNDHSLQNPRTSVPQYPLYLVYGYPPSTVARXVGGLGAXGSTTITSSFVDNGVNTGPILGVPTSTMLVWTQVGEIVFPVYTTVPISTDSSMTRNENVVAINPDDPVSKDPPAVAENGTSMPYEPEKVPSSAKSCPSDKNCEPTRTSSEVTKSWCPIHKSRKHNLQACWVFLNVQAEIPACKXRGIQRTSPTRDIYCPIHKTKNHDFSSCKVFLRTMKTTLPKVQQSGTSLKDTDKEQEATLTSDRFVGVIDIDPHEPSVLHLLEDYGSSSSSTPRDVFAIGGTNTSAQANAEAENQTVTPTQHLGTVNAILREAPYDPVLNNDLARWTERLRESVANLSNAFEEAATRAQPERPTAEGADGEPPKQRTSPRXATPQPRGTGDLHDHLNGRREAGRXRDNENRSRHRVSSXRHENEERGGRSNEDQHRHDRHNCRDRDDQRTPDDAGRGRQHDGDDNGGQRQDNNGGRQQNSREPERRPRNRTPEPSEPSSSSSSSSSSSSDRHPRRTHDRRQPTXPSAGCRAFNRSLRDVRWPERFRPGAIEKYDGSIDPEEFLQVYSTVLYAAGVDDNMLANYLPTVLKGSARSWLMHLPPYSISSWADLWQQFVANFXGTYKRHAIEDDLHALTXNPGESLRDYVRRFNDCRNTIPDITDASMICAFKTGVRDRYTTQELATRRITTTRRLFKVVDRCAHADDALRRKNDKPKAGGEKKPAKDAPESRKKKSGKSGKRKAQAEVLASEYKRPPKHPDPQGSDTKRICCPIHKSDRHSLEECLIFNKSLEKXLALEKGKQVRVVEKATEATTQDSDFTYPDSDLHVSHIAAIISGRYPIVVEPTIRNIKVALVLVDGGSSINLLFASTLDAMGIPRSELTPTDQPFHGITPQSSSKPLGKITLPVTFGQASNFRTKQITFHVAEFDTAYNAIIGRTALVKFMAASHYAYEVLKMPGPKGTITIQGNAKLAVQCDKQSLDMVEHMPSPPATTEPPKKVIKTTKTPKPDGAIKIVPLSSANPDKTELALITFLRDNADVFAWQPSDMPGVPREVIEHKLMVXPDAKPVKQKLXRFAPDRKQAIREELDKLVKAGFIREVLHPEWLANLVMVRKANEKWRMCVDFTDLNKACPKDHFPLPXIDQLVDSTAGCELFSFLDAYSGYHQISMAKEDEEKTAFITPFGVFCYVKMPFGLITAGNTFQRTVQGALSDQLGNNVETYVDDIIVKTKTSDSLIDDLWETFDNLRRYRLMLNLEKCTFGVPSGKLLGFLVSGRGIEANPEKIKAIENMKSPTRLKEVQRLTGCMVALSGFVTRMGEXGQPFFALLKKQDKFVWTQEAEEAFIALKRYLSNPPVLVAPQLNEVLFLYIAAMPYSVSTVIIFEREKVQRPVYYVSEALHDAXTRYQQIQKLLYAVIMTSRKLRHYFQAQRVTIVSAFPLGKVVRNKDVVDRIAKWVVELSQFDVHFVPPTAIKSQVLADFVADWTMPENGLDSKTDNETWTMAFDGALNSQGAGAGFILTSPSGDQFKHAIHLNFRATNNTAEYEGLLAGIRAAAALGVXGDSELVINQVHKDYKCSSPELSKYLTEVRKLEXRFDRIEVRHVYXKDNIEPDDLARRASRREPLEPGTFLDILTKPSVKEANDEDSSVTPDISSGATEVERAVADIKTTDDWRTLLIKFISSDELLEDDAEAEKITRQAKIYRMIGNDLYKKAPNGVLLKCVSSDDGKHLLHDIHEAVCGSHAAGRTLVGKAFRQGFFWPTALKDACDMQTYKATSASTTNHPSHLAVLVLGARHTRSIPTTTGRLQIXFVVIDKFTKWIEATPTGEIKADNAIKFIRGIFCRYGLPHRIITDNGSQFISADFQDYCIGLGVKICFALVSHPQSNGQVERANSIVLQGIKTLQWAVRTTPTTSNKETPFFLVYGSEAMLPTELRHQSTRVQKYSDEDQDEQRNDDVNLLEEHRERVAVRAASYQQALRRYHEKRIRACILSIGDYVLXRVQSQAGRNKLSPKWEGPYTITQVLRPGAFKIADGDGRELANSWIIDQLRKFYV

SEQ ID NO: 118528 - protein, 829 aa, Oryza sativa
  Clone ID: PAT_MRT4530_21830C.1.pep
LDTTLELLQWKARNGVSDKAFGDLLKLVKNILPGGNKLPETTYEAKKIVCPLGLEVHKIHACPNDCILYRGEEYENLEACPVCKALRYKIRRDDPGEVDGQLTKKRIPAKVMWYFPIIPRLRRLFRNKGNARMLRWHAEERQQDGMLRHPADGSQWRNIDRKFKELERTHETYGPKQPGNDIDVYLRPLVEDLKQLWKKEANHPVRKKGKHFEHKADHRTKPKHRSGKTVFAMVKDLKVVFGKGPGSQHIESEDGHAAMWKKNSIFWELPYWEFLDVRHAIDVMHLTKNLCVNLLGFLGVYGKSKDTLEARNDLKHMEQRGDLHPEPKEKGSHYLSPASYTLSKAEKESMFECLESIKVPSGYSTNIKRIINTKEKKFTNLKSHDCHVLMTQLLPVVIRGILPDNVRATITKLCAFMNAISQKVIDPDRLEALQNEVVQCLVSFELIFPPSFFNIMTHLLCHLVKEIRILGPMYLHNMFPFERYMGVLKKYVRNRACPEASIAKGYGTEEVIEFCVEFLEDLRPIGVPESRHEGRLRGKGTLGRKAIMTVDNNLFRKAHFTVLQHSSLVAPYIEEHLALVRARNIGKSDAWITRHHIDTFPAWLRQHLMGNESINQQLAFLARGPSGSIATFQGYEINGYTFYTRAQDMKSTNQNSAVRVDAMGHDGTTATYYGAIEDIWELDYGPLKVPLFRCQWVRLTGGGVMIDDSGMTTVDLNKVGYSDEPFVLANDVTQVFFMKDMSSKGKKGRGPDEPKRQVVLPGKRKIVGVEDKTDEDYDQLDGQPPFTVTIDPSILLSNEDTPYSRSDHKEGTIVRRKYVRSTVTADVMP

SEQ ID NO: 118529 - protein, 209 aa, Oryza sativa
  unsure (1)..(209): unsure at all Xaa locations
  Clone ID: PAT_MRT4530_21831C.1.pep
MASFSFSVNLVKHVLRENEITMQLYLDQVYSGQNHNQENMVPSTHPASFGLIVVHDWPIYDGPDPKSSTIVAHARGVTIXADQSTPGWYSSLNIEFVDDRYTWNMLFLGXYRFNESKLQVMGTTYWWTNLFSPGSQPHYSPGYATCMHDFEPHKSFILSTNHSNTTYHSQNPQIHQAAFSISKYITNHSQNHKIISTKSFTHHTSHISE

SEQ ID NO: 118530 - protein, 890 aa, Oryza sativa
  Clone ID: PAT_MRT4530_21832C.1.pep
MVKKGGRAREGNKKPDDDDLVNTIFSWTLEDVMNQNLFADKVPSISFVFSIRLVNAIPDRFSGLKSYLDSFRALLLEEIRAEMSSNLETLPNNSSSTKHIQSLVRVPTGLRQCPLYRVTISDQRGACAPCIGDIVVLTDTVPRRPSDLASNGRSCCLAHVKDVVNRRTFLIRAAKKIGDADSYAFAASLLAFIPYARIWRCLDYDYALKINPPLVMAVAGVALQTTSLAGSSSFHRANGGTDEITSRLPAFGLNDSQAGAIQSCVSAVQGNGASTTSGRFSLIWGPPGTGKTKTISVLLLMLMTTATSQSRYRVLTCAPTNTAISQVASRLLALSKQHSAAAAGGLCHGDLLLFGNKDRMGIDGDLKEVFLDNRVKILQKCFSPESGWRHGLSSLQVFLSFPLALRCQYIQACIALKDGTALPESSFVRSRFHDICQKLSRCFQTILSHVPKSVILEKNYNNIILLTTMLENFRKLLSKNSAAGDEVLVGIFMKEKKPDGSDGGVVHSDLVRNLRQSMTQILGVISTLLRGLQLPATTSPFKIKKFCLRSASLIFCTVSGSAKLYEQKMDLLLIDEAAQLKECESLIPLQVSGLKHAVLIGDECQLPATVKSKAADGALLGRSLFERLTLLGHQKHLLNMQYRMHPSISIFPNFSFYDKKILDGPNVTHVRHERSFLQGAMFGPYSFINIENGREDPGRNKRNMAEVAAIKKILHNLCKACVGTGEGVSVGIICPYAAQVEAIQSGIDANAVRPLDVRVNSVDGFQGSEEDIIILSTVRSNSTGSIGFLSNRRRANVALTRARHCLWILGDAATLLGSGSVWGELVRDAVDRRCFYDWDDGGAGLLGVARRGHEDELDDAVEFATAFDTFADEAGCRDDICDALGSLKLA

SEQ ID NO: 118531 - protein, 1044 aa, Oryza sativa
  unsure (1)..(1044): unsure at all Xaa locations
  Clone ID: PAT_MRT4530_21833C.1.pep
MDRQWMYADRRSKEFIDGVHYFLRVAEANRQRGFICCPCNKCKNQKEYSASRTIHFHLFESGFMPSYNCWTSHGEQGVEMEEDEVEDDNIPDFAQYVGFEGNQTGEEEIAADGNDVADDLGQMLQDAREDCESEKEAHKLDKMLEDHRTSLYPGCEQGHKKLDTTLELLQWKAKNGVSDKAFGDLLKLVKNILPGGNKLPETTYEAKKIVCPLGLEVHKIHACPNDCILYRGEEYENLEACPVCKALRYKIRRDDPGEVDGQLTKKRIPAKVMWYFPIIPRLRRLFRNKGNARMLRWHAEERQQDGMLRHPADGSQWRNIDRKFKEFGKDARNIRFGLSTDGMNPFGEMSSGHSTWPLWKKEDVPVWDEDKQEEFNLRALLFVTINDWPALSNLSGQSNKGYKACTHCMDETESTYLKHCRKVVYMGHRRFLAANHPVRKKGKHFEHKADHRTKPKHRSGKTVFAMVKDLKVVFGKGPGSQHIESEDGHAAMWKKNSIFWELPYWEFLDVRHAIDVMHLTKNLCVNLLGFLGVYGKSKDTLEARNDLKHMEQRGDLHPEPKEKGSHYLSLASYTLSKAEKESMFECLESIKVPSGYSTNIKRIISTKEKKFTNLKSHDCHVLMTQLLPVVIRGILPDNVRATITKICAFMNAISQKVIDPDRLEALQNEVVQCLVSFELIFPPSFFNIITHLLCHLVKEIRILGPMYLHNMFPFERYMGVLKKYVRNRARPEASIAKGYGTEEVIEFCVEFIEDLRPIGVPESRHEGRLRGKGTLGRKAITTVDNNLFRKAHFTVLQHSSLVAPYIEEHLALVRARNXRGPSGSITTFQGYEINGYTFYTRAQDXSTNQNSAVRVDAMGHDGTTATYYGAIEDIWELDYGPLKIPLFRCQWVRLTGGGVMIDDSGMTTVDLNKVGYSDEPFVLGNDVTQVFFVKDMSSKGKKGRGPDEPKRQVVLPGKRKIVGVEDKTDEDYDQLDGQPPFTVTIDPSILLSNEDTPYSRSDHKEGTIVRRKANPRADAAVSRRRLELVVLAAASASSAAAASL

SEQ ID NO: 118532 - protein, 211 aa, Oryza sativa
  Clone ID: PAT_MRT4530_21834C.1.pep
MWRRGREVNKAKRQSMIRRHGGARRGDAAEHEAAACMGHLVSMIEFGKVFAARGLAVTVVVVDPPYSNTGATGAFLTGVTAANPAMTFHRLPKVEVPPVASKHHELLTFEVTRLSNPSLRDFLAGALRGEAGGIEHDDAREGASPTGHYGGRHREKSWAADARTMPVDRISHGGSVTQQRGKGGKRRRRLRAASSGGVSRRRSGGPHHQLL

SEQ ID NO: 118533 - protein, 437 aa, Oryza sativa
  Clone ID: PAT_MRT4530_21835C.1.pep
MGHRRFLVANHPVRKKGKHFEHKVDHHTKPKHHSGKTMFAMIKDLKVVFGKGPGSQPIESEDGHAVIWKKNTIFWELPYWEFLDVRHAIDMMHLTKNLCVNLLGYLGVYGKLKDTLEARNDLKHMEQRDDLNPEPTEKGSHYLSPASYTLNKAEKKIVIRGILPDNVREIITKLCAFMNAISQKVIDPDRLEALQNDVVQCLVSFELIFPPSFFNIMTDLLCHPIKEISILGPVYLHNMFPFERETTGQGTLGRKAIMTVDNNLFRKAHFTVLQQSSLVAPYIEEYLALGLARNIAQDMKSTNQNSDVRINAMRHDGTTGTYYGAIEDIWELDYGPLKVPLFRCQWVRLTGEGITIDDSGMTTVDLNKVGYSDVPFVLANDVTQVFYVKDMSSKGKKGKGPDGPKRHVVLPGKRKIIGVEDKTDEDYNQLDGHPPIK

SEQ ID NO: 118534 - protein, 1072 aa, Oryza sativa
  Clone ID: PAT_MRT4530_21836C.1.pep
MDRQWMYADRRSKEFIDGVHYFLRVAEANRQRGFICCPCNKCKNQKEYSASRTIHFHLFESGFMPSYNCWTSHGEQGVEMEEDEVEDDNIPDFAQYVGFEGNQTGEEEIAADGNDVADDLGQMLQDAREDCESEKEAHKLDKMLEDHRTLLYPGCEQGHKKLDTTLELLQWKAKNGVSDKAFGDLLKLVKNILPGGNKLPETTYEAKKIVCPLGLEVHKIHACPNDYILYRGEEYENLEACPVCKALRYKNRRDDPGEVDGQLTKKRIPAKVMWYFPIIPRLRRLFRNKGNARMLRWHVEERQQDGMLRHPADGSQWRNIDRKFKEFGKDARNIRFGLSTDGMNPFGEMSSGHSTWPVTMCIYDLPPWLCMKRKYIMMPIIIQGPKQPGNDIDVYLRPLVEDPKQLWKKEGVPVWDEDKQEEFNLRALLFVTINDWPALSNLSGQSNKGYKACTHCMDETESTYLKHCRKVVYMGHRRFLAANHPVRKKGKHFEHKADHRTKPKHRSGKTVFDMVKDLKVVFGKGPGSQHIESEDGHVAMWKKNSIFWELPYWEFLDVLHAIDVMHLTKNLCVNLLGFLGVYGKSKDTLEARNDLKHMEQRGDLHPEPKEKGSHYLSPASYTLSKAEKESMFECLESIKVPSGYSMNIKRIISTKEKEFTNLKSHDCHVLMTQLLPVVIRGILPDNVRATITKIYAFMNAISQKVIDPDRLEALQNEVIRILGPMYLHNMFPFERYMGVLKKYVHNRARPEASIAKGYGTEEVIEFCVEFVEDLRPIGVPESRHEGRLQGKGTLGRKAITTVDNNLFRKAHFTVLQHSSLVAPYIEEHLALVRARNIGKSDAWITRHHIDTFPVWLRQHLMGNESINQQLAFLARGPSGSIATFQGYEINGYTFYTRAQDMKSTNQNSAVRVDAMGHDGTIATYYGAIEDIWELDYGPLKVPLFRCQWVRLTGGGVMIDDSGMTTVDLNKVRYSDEPFVLANDVTQVFFVKDMSSKGKKGRGPDEPKRQVVLPGKRKIVGVEDKTDEDYDQLDGQPPFTVTIDPSILLSNEDTPYSRSDHKEGTIVRRKYVP

SEQ ID NO: 118535 - protein, 74 aa, Oryza sativa
  unsure (1)..(74): unsure at all Xaa locations
  Clone ID: PAT_MRT4530_21837C.1.pep
FFFFFTTNPTGLINNSNGDDNLSWEQQNHXXXXXXGTXXXFXXTXSLTCKXYDQVQPGQQQQXSHGHLSSVAGV

SEQ ID NO: 118536 - protein, 923 aa, Oryza sativa
  Clone ID: PAT_MRT4530_21838C.1.pep
MTIFRTLLSTLDWKQIKRARRKGMLMVTMLQDAKEDCESEKGAHKLDKMLEDHITSLYPGCEQGHKKLDTTLEFLQWKAQNGVSDKAFGDLLKLIKNILPEGNKLPKTTYEAKKIVCPLGLEVQKIHACPNNCILYRGEEYENLEACRVCKALPYKIRQDDPGEVDGQLIKKRIPAKVMWYFPIIPRLRRLFRNKGNARMMRWLAEERQQDGMLRHPADGSQWRNIDRKFKEFGKDARNIRFGLSTDGMNPFGEMSSGHSTWPVTMCIYNLPPWLCMKRKYIMMPIIIQGPKQPANHPVRKKGKYFEHQADHRTKPKHRSGKTVFAMVKDLKVVFGKGPGSQPIESEDGHAAMWKKNSIFWELPYWEFLDIHHAIDVMHLTKNLCVNLLGFLGVCGKSKDTLEARNDLKHMEQRDDLHPEPKEKGSHYLSPASYTLSKAEKESIFECLESIKVPFGYSTNIKRIISTKEKKFTNLKSHDCHVLMTKLLPVVIRGIFPDNVRTTITKLCAFMNAISQKVIDPDRLEALQNDVVQCLISFELIFPPSFFNIMTHLLCHLVKEIGILGPVYLHNMFPFERYMGVLKKYVHNHARPEASITKGYGTEEVIKFCVEFTEDLRPIEVPESRHEGRLRGKGTLERKAIMTVDNNLFHKAHFMVLQQSSLVAPYIEEHLALVRARNIGKSDAWITRHHIDTFPAWLRQHLMGNKLINQQLAFLARGPSRSIATFQGYEINGYTFYTRAQDMKSTNQNSVVRVDAIGYDGTTGTYYGAIEDIWELDYGPLKVPLFRCQWVRLTGRGIMIDDSGMTTVDLNKVGYSDEPFVLANDVTQVFFVKDMSSKGKKGRGPDEPKRHVVLPGKRKIVGVEDKTDEDYDQLDGQPPFTLTIDPSIFLSNEDTPYSRSDHKEGTIVRRKYVRSTVTADVLP

SEQ ID NO: 118537 - protein, 185 aa, Oryza sativa
  Clone ID: PAT_MRT4530_21839C.1.pep
MAYGLVRSLLVAAADGNSARRQARGCADAIPELGTLTVRHRNRYDATTVALLPPVWPSQGPCGAGGGPYDRGRPRAVALLATRQGRPWTMREPAWTWRNVAHWPIAWCCSADRDAHRTYDGGREARKLFPCPLLPAAGTRERMNGEGEALGAARELGRGRRRERRAGGFALAGTDKPGLGAHSRR

SEQ ID NO: 118538 - protein, 816 aa, Oryza sativa
  Clone ID: PAT_MRT4530_2183C.1.pep
MRTYSLGSRPTCRGSQGGDCAQTYDQLVDSTAGCELLNFLDAYSGYHQISMAEEDEEKTAFITPFGVFCYVKMPFGLITAGNTFQRTVQGALSDQLGNNVEAYVDDIVVKTKTCDSLIDDLRETFDNLRRYCLMLNPEKCMFGVPSGKLLGFLVSGRGIEANPEKIKEIENMKSPTRLKEVQKLTGCMVALSSKALHDAKTRYPQIQKLLYAVIMTSRKLRHYFQAHRVIVVSAFPLGEVVRNKDVVGRIAKWVVELSQFDVHFVPRTAIKSQVLADFVADWTMPENRLDSQTDNETWTMAFDGALNSQGAGAGFILTSPSGDQFKHAIHLNFRATNNIAEYEGLLAGIRAAAALGVKRQIVKGDSELVANQVHKDYKCSSSELSKYLAEVRKLEKNLMGSSPGATEAERAVADIETTDDWRTPLIKFINSDELPEDDAEAKKITRQGKIYCMIGNDLYKKAPNGVLLKCVLSGDGKHLLLDIHEGVCGSHAAGRTLVGKAFRQGFFWPTALKDACDMGLDILGPFSRGQGGYRFLFVAIDKFTKWIEATPTGEIKADNAIKFIKGIFCRYGLPHRIITDNGSQFISADFQDYCIGLGVKKCFASVSHPQSNGQVEWANSIVLQGIKTRVYDRLMSHDKKWVEELPSKYSDENQEEQRNDDVNLLEEYRERVTVRADSSENRKNPCEGTRDATADDDLVHTPAHNDHGCATTPEVRVEPYLATSERLHGPVPLLFQYSPLKFGDLELRPPVLDATVAISKHALKILVHAVPRHIRLELKCRNDYRQFGIPVLLDILDIGISTNNRQSTRNQNAKEN

SEQ ID NO: 118539 - protein, 87 aa, Oryza sativa
  Clone ID: PAT_MRT4530_21840C.1.pep
SSMARIIVPGDPMVYAVVTSLLSKSSAWAPMKTVIDLVTASWRVACRVAFLASKYDSRTVVGAVASGISEGISEQGADTLSLTLYAW

SEQ ID NO: 118540 - protein, 338 aa, Oryza sativa
  Clone ID: PAT_MRT4530_21841C.1.pep
MAREPPPSLVDILSSSAGGLGSYYRRRHRLRLSPIRGGRAREPSTSHQRQSAIISLLRSSSSLANALLVEEPGGGGGGRRRRWFAVLLCFGGDGNDKDEAAGRPPRRRKRTVPVDGAGDDDGAVSSAGSAEREMRRGERRPRRRRGGCGFLLPLSSCVPGLLKRNVRRNSNSSNDVHGGQRQQHEPTAPPLPRPAELPPPPPPPRRRHDVVAPATTRGAGAGAGAIADAETAESKGDVVVVASSRERASSCGHGEFGPAMGVCVVAAVSMAGLLGGRLWAVVCVCAWLAAVYGLQLNRRRAKPPPAADGGGEEVVGDVNSKDYKKLVVLKGLLQRDRR

SEQ ID NO: 118541 - protein, 195 aa, Oryza sativa
  Clone ID: PAT_MRT4530_21842C.1.pep
MPRSHSVSATIVRGSLATVTTLATPMGLSPAATIATASLPFAPMLPRGSRDERTVGGRRAFPEKKIVQQSRNSKMNKGKIFKLAKGFRGRAKNCIRIARERVEKALQYSYRDRRNKKRDMRSLWIERINAGTRIHGVNYGNFMHGLMKENIQLNRKVLSELSMHEPYSFKALVDVSRTAFPGNRPVKKEGLASIL

SEQ ID NO: 118542 - protein, 735 aa, Oryza sativa
  unsure (1)..(735): unsure at all Xaa locations
  Clone ID: PAT_MRT4530_21843C.1.pep
MRVRGSGGRRVGDGSGRRRGRGRGRGGARERAAARGEAGSAATGXGEAGSATVDLAATGTSQTIEIDADVNRVDDNDERPVKRKKLTSEVWQYFNKEKVSIDENGKIYKQEWAHCKFKNCTYKGRCESATGTSGFWSHLKLHHSVVKGQQQLKAQKDQEKGINVVEPYKYDEEASLRKLYVAIIMHEYPFNMVGHEYFRDFITSLRPNFPLKSRVTVRKEILSIYMQERDKLYEYLKTVKCRISATMDMWTSNQNKGYMCITLHWVDDDWCIQKRIVTFSHVEGRHTGVRLSEGFTTSMLRWFVEKKMFSLTLDNASANDVAVKDIICCCXDIISELKKHSPLVCIGLFFHFRCACHILNLVAKDGLQEIESTIEKIKSFVNAVKGSPLQWEELMKCASESGLDTTKGLLNDVSTRWNSTYLMLADAIYYRAAFDRLTSYDRRRYEKMCPSAAEWEKAMKIRAFLKRFFDLTELFSGTLYPTANLFYKGFCDIKIILTDWSKGKDSDITIRRMATAMLAKFDKYWNKSNTALAVASFLDPRFKMRIVQFCMEFIHXDMHPIKVTEFLNIIRNMYDCYASAAPPRNHNAFEPIDTPDANQDPTEFVSALDKYLYRAETHNTSSKVNDLEKYLSEETLKVTKANESTFDILAWWKNQKDTYHVLSLLARDVLAMQASTVASESAFSAGGRVVDPYCSRLDSEMAQALICTKDWIAGVRRGKNYNSLDILFISHTITF

SEQ ID NO: 118543 - protein, 81 aa, Oryza sativa
  unsure (1)..(81): unsure at all Xaa locations
  Clone ID: PAT_MRT4530_21844C.1.pep
EGYTPLFGLDNILRFGHDRTVNLLLERCTDSGVMXSSMYQHGFFSACIKLPFYYTAGVVLAFYTSNGDMIYKLIDELDFHF

SEQ ID NO: 118544 - protein, 71 aa, Oryza sativa
  Clone ID: PAT_MRT4530_21845C.1.pep
LGFSARHGQYRGGPDQSPSKFWSFLFALWQHIILVKFAGLFSVVSRPFVRDGFLCIVRRIRGHFALRPGIE

SEQ ID NO: 118545 - protein, 71 aa, Oryza sativa
  Clone ID: PAT_MRT4530_21846C.1.pep
FFFFTTNYNIHTSSTLLHCYAYKDDTQDTDRLMQKTTYTVHANAHVPPATTLVCNFNILSKLKRRWNGYGR

SEQ ID NO: 118546 - protein, 140 aa, Oryza sativa
  unsure (1)..(140): unsure at all Xaa locations
  Clone ID: PAT_MRT4530_21847C.1.pep
ISCDVNFRGGKMEVQSSGGGPLXVLMEKVLSVNILSSDYFXELYRLMTYHEVIDEIYNXADHVEPWMTGNCRSPSSVLCLLYGFFTMKLTVKQWCAMLSWRDYPLARACFFLELKTSVLFIWQAYLQLRKCSSAVKKNSE

SEQ ID NO: 118547 - protein, 360 aa, Oryza sativa
  Clone ID: PAT_MRT4530_21848C.1.pep
MARKNRDGRVAVWLMMVFLLLSGSYQCEARALMRRSRRNTLLNALYKLNFIRTVEPMQLPSSSPSPAKPDGDAASLADATGDGSSSPYCVNPPNAPPSSSTPTTTPTPTPPFASTPFAPDDQPPPLPPIGGFTPPSFEPSPPASSTPGFTPSTPGSAPPSPIFVVPSPPETGPGGGGLGGGSGGEGGGGVGGGSGGEGGGGGGVGGGPGGGGSGGEGGGGGGSSGGGGSNGGGGSSGGGGNSGGGGGGGGFLPPIVYPPPLAPPAAPGAGEALWCVAKPTVPDPIMQEAMDYACGSGAECGSIQPSGACYTPDTVLAHASYAFNSYWQMTKAAGGTCDFGGTATIVTRDPSYEKCQFDLL

SEQ ID NO: 118548 - protein, 387 aa, Oryza sativa
  unsure (1)..(387): unsure at all Xaa locations
  Clone ID: PAT_MRT4530_21849C.1.pep
CSGLSPSSPSSPPQPPSPPPRXESPELLPFAVGAAPEGCDVGEGEWVFDEAARPWYAEEECPYIQPDLTCQAHGRPDAAYQRWRWQPRDCSLPSFNATGMLEMLRGKRMLFVGDSLLRGQYTSLLCLLHRGAPGGGGGSRSFETVDSLSIFRAKDYDATIEFYWAPMLAESNSDGAAVPDDRLIRGAPMNKHSSFWKGADVLVFNSYLWWMTGDKIQILRGADEDMSKDIVEMEAAEAYRLVLHQVTRWLEGNVDPKSARVFFVTASPSHAGAGGECYDQTTPVGAADAASYCGSTSRRMVQVAGEVLGASRVPVGVVNVTRMSELRRDAHTQVYREQRWAKPTAEQLAADPRSYADCTHWCLPGVPDAWNELLYWKLFFPARDEAI

SEQ ID NO: 118549 - protein, 739 aa, Oryza sativa
  Clone ID: PAT_MRT4530_2184C.1.pep
MWLVAEDRVESADPRTSVPQYPLYPVYGYPPSTVARQVGGLGAQGSTTMTSSFVDNGVNTGPIQGVPTSTMLVWTQVGEIVFPVYTTVPISAGPSMTGNENAVAITPDDPLSKVPSAAKPCPSDKNCELTRITSETKNHDFSSCKVFLRAMKTTLPKVQQSGTSLKDTNKEQGAMLTSDRFVGVIDIDPHEPSVLHLLENYGLSSSSTPRDVFAIGRTSTFAHANAEAENQTVTPAQLLGTVNAILREAPYDPQFIANFQGTYKRHAIEDDLHALTQNPGESLRDYVRRFNECRNTIPDITNVSVIHAFKTGVRDCYTTQELATRRITTTRRLFEVVDRCAHADDALRRKNDKPKAGGDKKPAKDTPKPSKKKSGKSGKRKAQAEVLASEYERPPKHPDPQGSDTKRIWCPIHKSDIHSLEECLIFKKSLEKQLALEKGKRVRVVEKATEETTQDSDLAYLDSYLHGVAPKMKWSEQKIEFLDEDHPKAAVIPGRYPIVVEPTIRNIKVVRPYRSVSTLAGHAVASPSVAVASPSPACPPFPVETSGSASPPATVALPPLFRLRPPLSRLLCTGRRRHHLSRHRNAVLFPGQATALPEFHRNTAVPRRPLHPPRRNFPGRPFLHPCAVGRANTTSGIAAASRRRRPRHRLPSIQTPPLSVVIVSSSFPRHRSSSSAPVCCCCPVIVFVLGSASSSLVSAASRLHPRIAAEVVPSPFVSVVPVRLRTRSPSSFPRLVAWC

SEQ ID NO: 118550 - protein, 96 aa, Oryza sativa
  Clone ID: PAT_MRT4530_21850C.1.pep
MTFLGPEYRINQSATIVFPNTHRGSVAGPSAIGTTPPPLTLTSSVAGNGGDTVDLVHERLPGSIGWGHEVTGGGGGRERRRDPPNTGDGESEMRDC

SEQ ID NO: 118551 - protein, 2738 aa, Oryza sativa
  unsure (1)..(2738): unsure at all Xaa locations
  Clone ID: PAT_MRT4530_21851C.1.pep
MAGFADALRPDKFTGVHFKRWQIKITLWLIAMKCFWVSTGKPMGVLNADQQKEFDEATTLFVGCILSVLGDRLVEVYMHITDAKELWDALNTKFGATDASNDLYIMEQFHDYKMADNRSVVEHAHEIQTMAKELELLKFRYCTQTQETGIRSVEGLIASLDVEEKAREKDVASKGDGGQSTANVVHKAQNKSKGKYKAQQTTNFKKKNNNNNSNQDERTCFVCGQPGHLARKCPQRKGMKAPAGQTSKSANVTIGNTGDGSGYGNLPTVFSVNQSTNWWVNTGANVARGSTVLMGNGSHASVHGVGTVDLKFTSGKIVQLKNVQHVPSIDRNLVSGSRLTRDGFKLVFESNKVVVSKHGYFICQGHEYRGLFRFSLSDFCNKSVNHIFGSVDDEANAEVENQLHRKIKRLRSNRGGEFFSNEFDLFCEEHGIIHERTPPYSPESNGIAERKNRTLIDLVNAMLDTAGLPKAWWGEALLTSNHVLNRVPNRNKDKTPYEIWIGRKPSLSYLRTWGCLAKVNVPITKKCKLGPKTVDCVFLGYAHHSIAYRFLIVNLSSITPPEQTEHTHEHVTEEDDSEAPRRSKRQRTAKSFGDDFTVYLVDDTPKSISEAYASPDADYWKEAVRSEMDSIIANGTWEVKTCGVQVASHGLLVYQMDVKIAFLNGELDEEIYMDQPDWFVVEGQEGKVCKLLKSLYGLKQAPKQWHEKFDKTLTFAGFAVNETNKCVYYRHGGGEGVILCLYVDDILIFGTNLEVINEVKSLLSQNFDMKDLGVANVILNIKLIRGENGITLLQSHYVEKILNRFGYIDSKPSPTPYDPNLLLRKNKRITRNQLEYSQIIGSLIYLASATRPDISFAGYSDSNWISDVDEIKATSGYVFTLGGGAVSWRSCKQTILTRSTMEAELTALDTATVEAEWLRDLLMDLPIVEKPVPAILMNCDNQTENSDLFSFGNIPKNPMDRQWMYADRRSKEFIDGVHYFLRVAEANRQRGFICCPCNKCKNQKEYSASRTIYFHLFESGFMPSYNCWTSHGEQGVEMEEDEVEDDNIPDFAQYDGFEENQTGEEEIAADGNDIADDLGQMLQDAREDCESEKEAHKLDKMLEDHRTSLYPGCEQGHKKLDTTLEFLQWKAKNGVSAKAFGDLLKLVKNILPGGNKLPETTYEAKIVCPLGLEVHKIHACPNDCILYRGEEYENLEACPVCKALRYKIRRDDPGEVDGQLTKKRIPAKWRNIDRKFKEFGKDARNIRFGLSTDGMNPFGEMSSGHSTWPVTMCIYNLSPWLCMKRKYIMMPIIIQGPKQPGNDIDVYLRPLVEDLKQLWKKEGVPVWDEDKQEEFNLRALLFVTINDWPALSNLSGQSNKGYKACTHCMDETESTYLKHCRKVVYMGHRRFLAANHPVRKKGKHFKHKADHRMKPKHHSGKTVFAMIKDLKVVFGKGPGSQPIESEDSHAAMWKKNSIFWELPYREFLDVRHAIDVMHLTKNLCVNLLGFLGVYGKSKDTLEARNDLKHMEQRGDLHPEPKEKGSHYLSPASYTLSKAEKESIFEYLESIKVPSGYSTNIKRIISMKEKKFTNLKSHDCHVLMTQLLPVVIRGILPENVRATITKLCAFMNAISQKVIDPDRLEALQNEVVQCLVSFELIFLPSFFNIMTHLLCHLVKEIRILRPVYLHNMFPFERYMGVLKKYVRNRARPEASIAKGYGTEEVIEFCAEFIEDLRPIGVPESRHEGRLRGKGTLGRKSNNDAPYIEEHLALVRARNIGKSDAWITWHHIDTFPTWLRQHLMGNESINQQLAFLARGPSGSIATFQGYEINGYTFYTRAQDMKSTNQNSAVRVDAMGHDATTATYYGAIEDIWELDYGPLKVPLFWCQRVRLTGGGIMIDDSGMTTVDLNKVGYSDEPFVLANDVTQVFFVKDMSSKGKKGRGPNEPKRQVVLPGKRKIVGAEDKTDEDYDQLDRQPPFTVTIDPSILLSNEDTPYSRSDHKEGTIMADRDEEQILYDTIAEGSSQYWNEEEGNEDPNQYLNEKGNVERDAEGNQQGHVERDVEGNQEEEASGSQPSVGQKRARGQRGAAKKLEGRHIIMEVEEDGRPSAPAVAAKNYVRHSGWVVRDNVPVSTVYWRRTRTRGDHESFVLDSEKEMLWTIMLETFTLPAGTEDKVKRWTLKKMAEQFQSFKGELYKKYILKGQTPNFDTFPKLRDHWDEFVAYKTGEQGQAMMERNKENAAKKKYHHYLGSGGYSVTMPKWEEMEAILIERGIEPATANWPERSKFWYYAHGGTLNPADGSLVFGDQIREAARRLTDAVEASSQGTFRSDRYRDELTLALSRMRSKRDTEAKIADLEFRVSSYELSMQEEVTRKVDERIAAHRSHDPQPTIPPAMMSPSGNRSSCALTGQVGLQSMDAIQTQDESTCPVDDITQQTPSELHIPYKNLSIKVASGMAIPTDPSGTYHCRPIPAGYSKVEVELVEGAYEDLELDYPGGDGXPAPTPPQDPAPTPPRAPTPTPPQAPLPAPSKSRAPPXAPPPAHTRATKKAKVDAAKNKDPGYDCTQEELDAYVASEVKRQFKPRSPEKKIPIDPSVRNFFRGMSASVKEAIKLSDYERTLKKASSGKSKPVPQLGERPNQEIEPLVTGKEMMIEQFITDTGLTTDQLLGVAPIEKTEVKYMYELGKPLVKPELLQSLPTQMYKFHQLYMEMSATGREMIGARIRDTDFLQGDDILWINFRGINELYQLDALDISIMSC

SEQ ID NO: 118552 - protein, 832 aa, Oryza sativa
  Clone ID: PAT_MRT4530_21852C.1.pep
MWYFPIIPRIRRLFRNKRNARMMRWHAEERQQDGMLRHPADGSQWQNIDKKFKEFGKDSRNIRFGLSTDGMNPFGEMSSGHSTWPVTMCIYNLPPWLCMKRKYIMMPIIIQGPKQPGNDIDVYLRPLVEDLKLLWKKEGVPVWDEDKQEEFNIRALLFVTINDWPALSNLSGQSNKGYKACTHCMDETESTYLKHCRKVVYMGHRRFIAANHPVRKKGKHFEHKPKHRNGKTVFAMVKDLKVVFGKGPGSQPIESEDGHAAMWKKNSIFWELPYWEFLDVRHAIDVMHLTKNLCVNLLGFLGVYRKSKDKLEARNDLKHMEQRGDLHPEPKEKGSHYLSPASYTLSKAEKESMFEYLESIKVPSGYSTNIKRIISTKEKKFTNLKSHDCHVLMTQLLPVVIRGILQDNVRATITKLCAFMNAISQKVVDRDRLEALQNDVVQCLVSFELIFPPSFFNIMTHLLCHLVKEISILGPVYLHNMFLFERYIGVLKKYVRNRARPEASIAKGYGTEEVIEFCVEFIKDLRPIGVPESRHEGRLRGKGTLGRKAIMTVDNNLFRKAHSTVLQQSSLVAPYIEEHLALVRARNIGKSDAWITRHHIDTFPAWIRQHLMGNESINQQLAFLARGPSGSIATFQGYEINGYTFYTRAQDMKSTNQNRAIRVDAMGHDGTTSTYYGAIEDIWELDYGPLKVPLFRCQWVRLTGGGVMIDDSGMTTVDLNKVGYSDEPFVLANDITQVFFVKDMSSKGKKGRGPDEPKRHVVLLGKRKIIEVEDKTDEDYDQLDGQPPFTVTIDPSILLSNEDTPYSRSDHKEGTIVRRKYVRSTVTADVLP

SEQ ID NO: 118553 - protein, 91 aa, Oryza sativa
  unsure (1)..(91): unsure at all Xaa locations
  Clone ID: PAT_MRT4530_21853C.1.pep
AMARXRCGXGLSXRVSXWGYQAAAXAAAAARRXGQATIAGVGXPRXRRRRHRTPPRLESPSAQGWDNRXTCAAAPAMRXSTXXRERKPKPL

SEQ ID NO: 118554 - protein, 1025 aa, Oryza sativa
  unsure (1)..(1025): unsure at all Xaa locations
  Clone ID: PAT_MRT4530_21854C.1.pep
MADRDEEQILYDTIAEGSSQYWNEEEGNEDPNQYLNEKGNVERNAEGNQEGHAERDVEGNQEEEASGSQPSIGQKRARGQRGAAKKLEGQHIITEVDEDGRPSAPAEAAKNYVRHSGWVVRDNVPVSTVYWRRTRARGDHESFVPDSEKEMLWTXMLETFTLPAGTEDKVKRWTLKKMAEQFQSFKGDLYXKYILKGQTPNFDTFPKLRDHWDEFVAYKTGEQGQAMMERNKENTAKKKYHHHLGSGGXSIAMPKWEEMEVSLLERGIEPATANWPEQSKFWYYADGGTLNPADGSLVFGDQIREAARRLTDAVEASSQGTFRPDRERDELSLALQTPKHPGQTRGKGVIPWKIGFMEDIHTYRSRMRSKRGTEAKIADLEFRVSSYELSMQEEVARKIDERMAAHRSHDPQPTIPPVMVSPSGNRSSCASTGQVGSQSMDAMQTQDESTCPVDDITQQAPCELHIPFKNLSIKVSSXNNLPTDPSGTYHYRPIPAGYSKVEVELIEGAYKDLELDYPGGDGETHLRDTSHAIILWRKRYIIIPGRQAASRAPSPPAPPSPPAPPSPPHAPAPSPPQAPAPTPPPAPVPTPPQAPAPTPSQAPTPTPPQAPLPAPXKSRAPQAPPPAHTRVTKKAKVDAAKNKDTWYDCTQEELDAYVASEVKRQFKPQSPKKKIPIDPSVRNFFRGMSAPAKEAIKLSDYERTLKKASSGKSKPVPQLGEQPNQEIEPLVTGEDIGIEEFINDTGLTTDQLLGVALIEKAEVKYMYELGKPLVKLELLQSLPTQMYKFHQLYMEMSATGREMIGARIKDTDFLQGDGILWINFKGIYELHQLDALDVSIMSCWVLMEIQRPRRRGVFDTRFIDPRKVNVAMLDQYPQATEDNLVYLLKAQHYKTFILLPYNTEFHWVLLLFNMSACTINVYDSMDKKESTFDKVFELIDRAWYRFRHLVRGNWRERLRRKFKFPFIRMRDNLTTHKEFIAAVQEQLMGFINEQILDPKGEFYYDGNTIHRSLASELATTTTSKS

SEQ ID NO: 118555 - protein, 205 aa, Oryza sativa
  Clone ID: PAT_MRT4530_21855C.1.pep
MAAFNASHSSLIRLFRTLCTSTRGGGGGGGAAGEHHCRGSNSAFLHRERNPRETFTYHWPPARSVDAAGKRARRERRNPEAHVAAPGSRGENGGGAISTPGGGAGTEPSVGLPPLETRPSPTTRKAKRPRHGWSSRVAAGHRDRRAPRVTRVAGASMRRLPGGAAGAGSPCRKHRKRLENDELRGKLRRGRCSSPARSRLRRGDG

SEQ ID NO: 118556 - protein, 1111 aa, Oryza sativa
  unsure (1)..(1111): unsure at all Xaa locations
  Clone ID: PAT_MRT4530_21856C.1.pep
MDRQWMYDGRRSKEFIDGVHYFXLRVAEANRQKGFICCPCNKCKNQKEYSASRTINFHLFELGFMPSYNCWTSHGEQGVEMEEDEVEDDNIPDFDQYSGFEGNQTGEKKMDADGNDVADDLGQMLQDAKEDCESEKGAHKLDKMLEDHRTSLYPGCEQGHKKLDTTLEFLQWKAKNSVSDKAFGDLLXVKNILPEGNKLPETTYEAKKIVCPLGLEVQKIHACPNDCILYRGEEYKNLEACPVCKALWYKIRRDDPGEVDGQLTKKRIPAKVMWYFPIIPRLRRLFRNKGNARMMRWHAEERQQDGMLRHPADGSRWRNIDRKFKDFGKDARNIQFGFSTDGMNPFGEMSSGHSTWPVTMCIYNLTPWLCMKRKYIIMPIIIQGPKQPGNDIDMYLRPLVKDLKLLWKKEGVPVWDEDKQEEFNLRALLFVTINDWPALSNLSGQSNKGYKACTHCMDETESTYLKHCRKVVYMGHRRFLAANHPVRKKGKHFEHKAEHRTKPKHRNGKTVFAMVKDLKVVFGKGPGSQPIESGDGHAAMWKKNSIFWELPYWKFLDVRHAIDVMHLTKNLCVNLLGFLGVYGKSKDTLEARNDLKHMEQRSDLHPEPKXEKGSHYLSPASYTLSKAEKESMFDCLESIKVPSGYSTNIKRIISMKEKKFTNLKSHDCHVLMTQLLLVVIRGILPDNVRATITKLCAFMNAISQKVIDPDRLEALQNDVVQCLVSFELIFPPSFFNIMTHLLCHLVKEISIIRPVYLHNMFPFERYMGVLKKYVRNRARPEASIAKGYGTEEVIEFCVEFIEDLHPIGVPESRHEGRLRGKGTLGRKAIMTIDNNLFRKAHFTVLQQSSLVAPYIEEHLALVRARNIDKSDAWITRHHIDTFPAWLRQHLMGNESINQQLAFLARGPSGSIATFQGYEINGYTFYTRAQDMKSTNQNSAVRVDAMGHDGTTSTYYGAIEAIWELDYGPPKVPLFRCQWIRLTGGGVMIDDSGMTTVDLKKVGYSDEPFVLANDVTQIFYVKDTSSKGKKGRGPDEPKRHVVLPGKRKIVGVEDKTNEDYDQLDGQPPFTVTIDPSILLSTEDTPYSRSDHKEGTIVRRKYVRSTVSADVLP

SEQ ID NO: 118557 - protein, 64 aa, Oryza sativa
  Clone ID: PAT_MRT4530_21857C.1.pep
GVTRMACLCLLVFLYDITRNIIPSNGVEILLVYYGYKVHPQAHGYTIVAFHPRVFQGYNIYFIL

SEQ ID NO: 118558 - protein, 2352 aa, Oryza sativa
  unsure (1)..(2352): unsure at all Xaa locations
  Clone ID: PAT_MRT4530_21858C.1.pep
MSWHRAGVLLLGAQSCLPVPGVPAVGGVGSVLLFMARMGWELCHVFRPYTVVMFNREKGKNVSGYASSNSSFQLNPPLASRELTRAHPWSIPSMLLSSQLPLVRSQDQNQCVFDRAFATQVNEPPMPKEHVPFCHDCREQGHYALNCPWVYAKEAPSFGLTGQTSLNQPPRTKSSLQPSVQSREPNGENPLNPGKCFPPSLSYHVGSRTKQAKGKKSKNQKRKASMRTEEEVRKMAISSTEWPPAGITIPRRQRGNTFRGARQLTQHLLSHGGRVSDSEGSDQVSSDDEDESPRHLGEEEMESKACTRCGEIGHIASRCLTLCPRCEEDHPPGECPTRKVSLKGSRLKYHIVTRSIHNSRSEKYLVDKGRKVIKMFNREKGKNVSGYASSNSSFQLNPPLASRELTRAHPWSIPSMLLSSQLPLVRSQDQNQCVFDRAFATQMDRQWMYADRRSKEFIDGVHYFLRVAEANRQRGFICCPCNKCKNQKEYSAYRTIHFHLFESGFMPSYNCWTSHGEQGVEMEEDEVEDDNIPDFAQYVGFEGNQTGEEEIAADGNDVADDLGQMLQDAKEVCESEKEAHKLDKMLEDHRTSLYPGCEQGHKKLDTTLEFLQWKAKNGVSDKAFGDLLKLVKNILPEGNKLPETTYEAKKIVCLLGLEVQKIHACPNDCILYRGEEYENLEACHVCKALRYKIRRDDPGKVDGNKGNARMMRWHTEERQQDGMLRHPADGSQWRNIDRKFKEFGKDARNIRFGLSTDGMNPFGEMSSGHSTWPVTMCIYNLPPWLCMKRKYIMMSIIIQGPKQPGNDIDVYLRPLVEDLKLLWKKEESTYLKHCRKVVYMGHRRFLAANHPVRKKGKHFEHKADHRTKPKHRSGKTVFGKGPGSQPIESEDGHAAMWKKNSIFWELPYWEFLDVRHAIDVMHLTKNLCVNLLGFLGVYGKSKDTLEARNDLKHMEQRGDLHPEPKEKGSHYLSAASYTLSKAEKESMFGCLESIKVPSGYSTNIKRIISTKEKKFTNLKSHDYHVLMTQLLPVVIRGILPDNVRATITKLCAFMNAISQKVIDPDRLEALQNEVVQCLVSFELIFPPSFFNIVTHLLCHLVKEISILGPVYLHNMFPFERYMGVLKKYVRNHARPEASIAKGYGTEEAIEFCIEFIEDLRPIGVPESRHEGRLRGKGTLGRKAIMTVDNNLFRKAHFTILQHSSLVAPYNEEHLALVRARNIAQDMKSTNQNSAVRVDAMGHDGTTATYYGAIEDIWEFDYGPLKVPLFRCQWVRLTGGGVMIDDSGMATVDLNKVGYSDEPFVLANDVTQVFFVKDMSSKGKKGRGPDEPKRQVVLPGKRKIVGVEDNTDEDYDQLDGQPPFTVTIDPSILLSIEDTPYSYSDHKEGTIVRRKWLTAMSNRYYTYLNEEGNVERDAEGNQQGHVERDVEGNQEEEASGSQPSVGQKRARGQRGAAKKLEGRHIITEVEEDGRPSAPAEAAKNYVRHSGWVVRDNVPISTVYWRRTRARGDHESFVLDSEKEMLWTTMLETFTLPAGTEDKVKRWTLKKMAEQFQSFKGDLYQKYILKGQTPNFDTFPKLRDHWDEFVVYKTGEQGQVMMERNKENAAKKKYHHHLGSGGYSVAMPKWEEMEASLLERGIEPATANWPKRSKFWYYAHGGTLNPADGSLVFGDQIREAARRLTDVVEASSQGTFQPDRDRDELTLALQTPEHLGRTRGKGVIPWKIGFKEDIQTYRSRMRSKRDTEAKIADLESWVSSYELNMQEEVARKVDERMAAHRSHDPQPTIPPAMLSPSGNHSSYASTGQVGSQSMDAMQTQDESTCPVDDITQRTPCELYIPFKNLSIKVASGMAIPTDPSGTYHCRPIPAGYSKVEVELVEGAYEDLELDYPGGDGXYIILPGRQAASHGPSPPAPPSPPQDPAPSPPHAPPAPSPLQAPAPTAPQAPAPTPPRAPTPTPPQAPLPAPSKSRAXPPAPPPAHTRATKKAKVDAAKNKDPGYDCTQEELDVYVASEVKRQFKPRSPEKKIPIDPSVRNFFRGMSAPVKEAIKLSDYERTLKKASSGKSKPVPQLGEQPNHDIEPLVTGEDMTIEEFITDTGLTTDQLLGVEPIEKAEVKYMYKLGKPLVKPELVQSLPTQMYKFHQLYMEMSATGREMIGARIRDPDFLQGDDILWINFKGIYELYQLDALDVSIMSCWILFHWVLLLFDLSACTVNVYDSMDKKESTFDKVFELIDRAWYQFRHLVRGNWRERLKRKFKFPCAKQKQGTNLCGYYVCEYCHCLVDQIITTRELDFIRMRDNLTTHKEFIAAVQEQLMGFINEEILDPKGEFYYDGNTIHRSLASELVTTTTSKS

SEQ ID NO: 118559 - protein, 550 aa, Oryza sativa
  Clone ID: PAT_MRT4530_21859C.1.pep
MLTCGRFLSSSAAASTPSLSPFRNLTLSLLRRPHFRLLSSSATASAAAAAVEPDTKGGAGGGAAKPQWKAAIDFKWIRENTDAVAANIRDRNSAANLDLVLQLYDEYLALQKEVERLRAERNAVANKMKGKLEPSVRQALVEEGKNLKEGLIALEEDLVQLTDKLQLEAQSIPNTTHPDAPVGGEESSVVRKEVGSQRNFNFTIRDHLQLGKELDLFDFDAAAELLYEQLYFFSLVHFTKVVYCHFQVSGSKFYYLKNEAVLLEMALVNWAITEVSKKGFTPLITPEIVRSSVVEKCGFQPRAQNTQLLELVVLGGSYAHNFKKKVYSIDNSDQCLIGTAEIPVGGIHMDSILPDSDLPRKYVAYSHCFRTEAGAAGAATRGLYRVHQFSKVEMFVFCRPEESDKCHEELITIEEELYASLGLHFKTLDMATGDLGAPAYRKFDIEAWMPGLDRYGEISSASNCTDYQSRRLGIRFRPSPADPPPANAKKGKGSSGPTQFVHTLNATAVAVPRLIICILENFQQEDGTVVIPEPLRPFMGGLEVLSPKTK

SEQ ID NO: 118560 - protein, 114 aa, Oryza sativa
  Clone ID: PAT_MRT4530_2185C.1.pep
VAHSHHLNYMRTTWRIVVSQLLIRLDNCNHVTRVQYHCCVPCLACKITVHRHRARIIDLDAHLHRAPLSTIPSYRPPLSFRALLPRMKVLGAAGERPSSRRRSSSPPCSSRLLN

SEQ ID NO: 118561 - protein, 70 aa, Oryza sativa
  Clone ID: PAT_MRT4530_21860C.1.pep
MSKARNVLVATGLLAFAGAGLAFPFYFVKSKNKPIIDSSKPLPPQATFRGPYVNTGSRDIGPDYTDYPKK

SEQ ID NO: 118562 - protein, 1853 aa, Oryza sativa
  unsure (1)..(1853): unsure at all Xaa locations
  Clone ID: PAT_MRT4530_21861C.1.pep
MDRQWMYADRRSKEFIDGVHYFLRVAEANRHKGFICCPCNKCKNQKEYSASRTIYFQLFESGFMPSYNCWTSHGEQGVEMEEYEVEDDNILDFGQYARFEGNQTGEDERDADGNIIADDLSQMLQEANEDCESEKGDHKLDXMLEDHRTSLYPGCEQGHKKLDTILKFLQWKAKNGVSDKAFGDLLKLVKNIFPEGNKLPETTYEAKKIVCPLGLEVQKIHACPNDCILYRGEEYENLEACPVCKALRYKIRRDDPREVDGQLTKKRIPTKVMWYFPIIPRLRRLFRNKGNARMMRWHAEEYQQDGTLRHPADGSQWRNIDRKLKDFRKDARNIQFGLSTDGISPFGEMSSGHSTWPVTMCIYNXPPWLCMKRKYIMMPIIIQGPKQPGNDINVYQRPLVEDLKLLWKKEGVPVWDEDKQEEFNLRALLFITINDWPALSNLSGQSNKGYKACTHCMDETESTYLKHCRKVVYMGHRRFLAANHPVRKKGKHFEHKADHRTKPKHRNGKTVFAMVKDLKVVFGKGPGSQPIEREDGHAAMWKKNSIFWELPYWKFLDVRHAIDVIDLTKNLCVNLLGFLGVYGXSKDTLEARNDLKHMEQRGDLHPEPKEKGIVXTIRVSIVDYXRVLIQYYLSFNIRLLEFXYNIIRFVIXDLIYNYCLXGPNIRHLDLASLTIRVLIQYYLTFNXDYYSFNITLLDLCNKTXLTIVDYXVLIQYYLSFNIXIIRGPNIRHLDLASLTIRVLIQYYLTFNIRXYSFNITLLDLCNKTXVLIQYYLSFNIRLLEFXYKIIRFVIRLSXIRLCRVLIYDSXRLSIFNLAYMIVSIXIVKAKMTYRLSNYFLYEQMADRDEKQILYDTIVEGSSQYWNEEEGNEDPNQYLNEEGNVERDAEGNLEGNVERDVEGNQEEEASRSQPSAGQKRARGQQGAAKKLEGQHIITEVDEDGRPSAPAEAAKNYVRHSGWVVQDNVPVSTVYWRRTRARGDHESFLLDSEKEMLWTTMLETFTLPAGKEDKVKRWTLKKMAEQFQSFKGDLYQKYILKGQTPKFDTFPKLRDHWDEFVTYKTGQQEQAMMERNKENAARKKYHHHLRSGGCSVAMPKREEMEASLLERGIGPATSKWPDRSKFWYYAHGGTLNPVDGSLVFSDQIREAASRLTDAVEASSQGTFRPDREKDELSLALQTPEHPGRTXGKGVIPWKIGFKEDIHTYRSRMRSKRDTEAKIADLEYRVSSYELSMQEEVARKVDERMAAYRSHDPQPTIPPAMVSPSGNRSSCASTGQVGSQSLDAMQTQDETTYPVDDITXRTPCELHIPFKNLSIKVASGMAIPTDPSGTYHCRPIPTGYSKVEVELVEGAYEDLELDYPGGDGETHLRDTSHAIILWRKRYIILPRXQAASRAPSPPAPPSPTQAPAPSPPYAPAPSPPQAPAPTPPXAPTPTPPQAPRPAPSKSRAPQAPPPAPTRATKKAKVDAAKNKDPGYDCTQEELVAYVTSEVRRQLKPRXILIDPSARNFFRGMSARAKEAIKLSDYERILKKASFGKSKPVPQLGEQPNPEIEPLVTGEDFGIQEFINYTGLTTDQLLXGAPIEKAEVKYMYELGKPLVKPEQLQSLPTQMYKFHQLYMEMSATGREMIGARIRDTDFLQGDDILWINFKGIYELYQLDTLDVCIMSCWILMEIQRARRQGVFDTGFIDPRKVNVAMLDQYPQATEDNLVHLLKALHYKTFILLPYNTEFHWVLLLFDLEACTVNVYDSMDKKESTFDKVFELIDRAWYRFRHLVRGKWRERLRRKFNFPFIRMRDNLITHKEFIAAVXKQLMGFINEQILDPKGEFYYDGNTIHRSLASEITTSTVQKPYNH

SEQ ID NO: 118563 - protein, 928 aa, Oryza sativa
  Clone ID: PAT_MRT4530_21862C.1.pep
MIYRLSLVYLFERVLDALYMDRQWMYADQRSKEFIDGVHYFLRVAEANRQRGFICCPCNKRKNQKEYSASRTIHFHLFESGFMPSYNCWTSHGEQGVEMEEDEVEDDNIPNFAQYVGFEGNQTGKEERDADGNDVADDLGQMLQNAKEDCESEKGAHKLDKMLEDHRTSLYPGCEQGHKKLDTTLEFLQWKAKNGVSDKAFGDLLKLVKNILPEGNKLPETTYEAKKIVCPLGLEVQKIHTCPNDCILYRGEEYENLEACPVCKALRYKIRRDDPGEVDGQLTKKRIPAKVMWYFPIIPRIRRLFRNKGNARMMRWHAEEHQQDGMLRHPADGPKQPGNDIDVYLRSLVEDLKLLWKKEANHPVRKKGKHFKHKADHRTKSKHRSGKTVFAMVKDLKVVFGKGPGSQPIESEDGHAAMWKKNSIFWELPYWEFLDVRHAIDVMHLTKNLCVNLLGFLGVYRKSKDKLEARNDLKHMEQRGDLHPEPKEKGSHYLSPASYTLSKAEKESMFEYLESIKVPSGYSTNIKRIISTKEKKFTNLKSHDCHVLMTQLLPVVIRGILQDNVRATITKLCAFMNAISQKVVDRDRLEALQNDVVQCLVSFELIFPPSFFNIMTHLLCHLVKEISILGPVYLHNMFLFERYIGVLKKYVRNRARPEASIAKGYGTEEVIEFCVEFIKDLRPIGVPESRHEGRLRGKGTLGRKAIMTVDNNLFRKAHSTVLQQSSLVAPYIEEHLALVRARNIAQDMMSTNQNSVVRVDAMGHDGTTGTYYGAIEDIWELDYSPLKVPLFRCQWVRLTGGGVMIDDSGMTTVDLNKVGYSDEPFVLANDVTQVFFMKDMSSKGKKGRGPDEPKRHVVLLGKRKIDGVEDKTDEDYDQLDGQPPFTVTIVPSILLSNEDTPYSRSDHKEGTIVRRKYVRSTVTADVLS

SEQ ID NO: 118564 - protein, 1290 aa, Oryza sativa
  unsure (1)..(1290): unsure at all Xaa locations
  Clone ID: PAT_MRT4530_21863C.1.pep
MEEDEVEDDNIPDFAQYAGFEGNQTGEAERDADGNDVADDLGQMLQDAKEDCESEKGAHKLDKMLEDHRTSLYPGCEQGHKKLDTTLEFLQWKAKNGVSDKAFGDLLKLVKNILPEGNKLPETTYEAKKIVCPLGLEDGMLRHPADGSQWRNIDRKFKDFGKDARNIRFGLSTDGMNPFGEMSSGHSTWPVTMCIYNLPPWLCMKRKYIMIPIIIQGPKQPVNDIDVYLRPLVEDLKLLWKKEGVPVWDEDKQEEFNLRALLFVTINDWPALSNLSGQSNKGYKACTHCMDETESTYLKHCRKVVYMGHRRFLTANHPVRKKGKHFEHKADHRTKPKHRSGKTVFAMVKDLKEFLDVRHAMDVMHLTKNLCVNLLGFLGVYGKSKDTLEACNDLKHMEQCGDLHPEPKEKGSHYLSLASYTLSKAEKESMFACLESFKVPSGYSMNIKRIISMKEKKFTNLKSLDCHVLMTQLLPVLIRGILPDNVRATITKLCAFMNAISQKVIDPDRLEALQNDVVQCLVSFELIFPPSFFNIMTHLLCHLVKEIGILGPVYLHNMFPFERYIGILKKYIRNCSRPKASIAKGYGTEEVIEFCVEFIEDLRLIGVPESRHEGRLRRKGTLGRKAIMMVDNNLFRKAHFTVLQQSSLVAPYIEEHLALVRARNIGKSDAWITRHHIDTFSAWLRQHLMGNETINQQLAFLARGPSGSIATFQGYEINGYTFYTRAQDMKSTNQNSDVRIDAIGHDGTTSTYYGAIEDIWELDYGSLKVGYLDEPFVLANDVTEVFYVKDMSSKGKKAKGPDEPKRHVVLLGKRKIIGVEDKTDEDYDXFDGQPPFTVTIDPSILLSNEDTPYSRSDHKEGTIVRRKYVRSIVTADVLLANMTYRPNKYFLYAQMADRDEEQILYDTIAEGSSQYWNEEEGNEDPNQYLNEEGNVERDAEGNEEGNDEEEASGSHPSAGQKRAHGQRGAAKKIEEVAKNFVRHCGCVVRDNVPVSTVYWRRTRARGDNDSFVPDSEKEMLWTIMLETFTLLAGTENIVKQWTLKKMAEQFQSFKGDLYKKYILKGLTPNFDTFPKLRDHWDKFVAYKTGQQGQAMMERNKENAAKKKYHHHLGSGGYSVTMPKWEEIEASLLERGIEPATAKWPEXSKFWYYAHGGTLNPADGSLMFGDQIREAARXLTDVVEASSQGTFRPDREKDELLLALQTPEHPGRTRGKGVIPWKIGFKEDIHTYRSWMRSKRDTEAKIADFEYRVSSYELSMQEEVARKVIERMAAHRSQDPQPYIPPAMVSP

SEQ ID NO: 118565 - protein, 120 aa, Oryza sativa
  unsure (1)..(120): unsure at all Xaa locations
  Clone ID: PAT_MRT4530_21864C.1.pep
SCEALPKNHIAAFSRCRALKAKVPETCSSTEEEENPXIDFTCVAWRRRLNXCRDIRTHVXSLLRIIEPDMLRITYLDSTPFHALDYSPGEASERACTCVPPLLSTSHASSGKESILPYIE

SEQ ID NO: 118566 - protein, 343 aa, Oryza sativa
  unsure (1)..(343): unsure at all Xaa locations
  Clone ID: PAT_MRT4530_21865C.1.pep
MDKLKMMAKTMAECARKVIQAWEARAAAAADGERMVQVEVGEQFHELTADVISHTAFGSSYRQGKEVFVAQRELQYIAMSALNSVRIPGSQYIPTKANIRRRQLAKKVRGTLMAIIRERQATAAAAKEDRGYGNDLLGLMLEANAAAGGGEKSMTMDEIVDECKTFXFAGHDTTSHLLTWAMFLLGTHPEWQQRLREEVLXTMVLYETLRLYGPVSMLVRTATADAELGGVRVPKGTMTMMPVAILHRDADVWGADAGEFDPLRFRGGVNKAAAHAGALLAFSLGQRSCIGQDFAMMEAKTTLAMILRRFAFEVSPEYVHAPLDLLTLQPKCGLPMVLKLLDQ

SEQ ID NO: 118567 - protein, 1101 aa, Oryza sativa
  unsure (1)..(1101): unsure at all Xaa locations
  Clone ID: PAT_MRT4530_21866C.1.pep
MDRQWMYADXRSKELIDDVHYFLRVAEANRQMGFICCPCNKCKNQKEYSVSRTIHFHLFDAGFMPSYXVEMEEDEVEDDNISDFAHYAGFEGNQTGGEERDAVGNDVADDLGQMLQDAKXDCESEKGAHKLDKMLEDHRTSLYQGCEQGHKKLDTTLEFLQWKAKNGVSDKAFGDLLKLVKNILPEGNKLPETTYEAKKIVCPLGLEVQKIHACPNDCILYRGKEYENLEACPVCKALRYKIRRDDPGEVDGQLTKKRIPAKVMWYFPIIPRLRRLFRNKGNARMIQWHAGERQQDMMLRHPADGSQWRNIDRKFKDFGKDARNIRFGLSTDGMNPFGEMSSGHSTWPVTMCIYNLPPWLCMKRKYIMMPIIIQGPKHTGNNIDVYLRPLVEDLKLLWTKESVPVWDEDKQEEFNLRALLFVTINSWHALSNLSGQSNKGFKAYTHCMDETXSTYHKHCRKVVYMGHRRFLAANHLVRKKGNHFXHKADHRTKPKHRNGKTMFAIVKDLKVVFGKGPGNQPIESEDGHAAMWKKNSIFWELPYWEFLDVRHAIDVMHLTKNLCVNLLGFLGVYGKSKDTLEALNDLKHMEQRGDLHPEPKEKGSHYLSPASYTLSKAKKESMFECLESIKVPSGYSTNIKRITSTKEKKFTNLKSHDYHVLMTHLLLVVIRGILPDNVRATITKLCAFMNAISQKVIDPYRLQAMXNDVVQCLVSFELIFPPSFFNIMTHLLCHLVKEIGILGPVYLHNMFPFERYMGVLKKYVHNRARPEASIAKGYGTEEVIEFCIEFIEDLRPIGVPESRHEGRLRGKGTLGRKAIMTVDNNLFRKAHFTVLQQSSLVAPYIEEHLALVRTRNIGKSDAWITRHHIDTFSTWLRQHLMGNETINQQLAFLARGPSGSIATFQRYEINGYAFYTRAQDMKSTNQNSVVRIDAMGHDGTTGTYYGAIEDIWELDYGHLKVPLFRCQWVRLTGGGVTIDDSGMTTVDLNKVGYSDEPFVLANDVTQVFYVKDMSSKGKKGKGPNEPKRHVVLLGKRKIVGVEEKTDEDYDQFDAQPPFTVTIDPRILLSNEDTPYSRSNHKEGTIVRRKYMQSTVTADVLS

SEQ ID NO: 118568 - protein, 225 aa, Oryza sativa
  unsure (1)..(225): unsure at all Xaa locations
  Clone ID: PAT_MRT4530_21867C.1.pep
XLXLLVVXVVVAIXVAIXIASSSDGLRVLVGGGAEAVRGGEGDPHQRLRGGLRRAGDGGAGHRQAGGGGGAGAGEVRAVLVGAPAAAGAGAVQGGRPTGGRHGVLPPPAVHLPVRVLRRRPRLPHEPPHLPRPQGRRRRLQPRRGPLHRRNSPPAAALLLLQQLQAGGGGGELGVAGTVLPRGGGAAGGVEAAAGSHRRVLRPRIHAELLRSQHRGLNIFFLPLF

SEQ ID NO: 118569 - protein, 335 aa, Oryza sativa
  Clone ID: PAT_MRT4530_21868C.1.pep
MVVLAKGELEQIALPAAHPPPADVRAIDLSATGPARAAEARALVAACEEQGFFRVTGHGVPPGLVRAAEAAAARFFALPQPDKEAAAGAPLGYASKRIGSAGDLGWIEYLLLCLAPAAAAAALPCAATSPTPPCPLRELLREYSAAVRRVACGVLELMAEGLGVGPADALARLVAREDSDSILRVNHYPPRPDQLGGGGGPNLTGFGEHTDPQIISVLRSNGAPGLEISLRDGAWASVPHDGDGDSFFVNVGDTLQVLTNGRFRSVKHRVVVNSEKSRVSMVFFGGPPPGERLAPLPALLGDGGRSRYREFTWKEYKGSGCKGRLADDRLCRFEN

SEQ ID NO: 118570 - protein, 71 aa, Oryza sativa
  Clone ID: PAT_MRT4530_21869C.1.pep
MGPSAVLRPWETSLVPSSAHSTATWQPSEGLGAARSKGPRGATGHPEAPWPLDDYPTSPEGRGKQAARPRG

SEQ ID NO: 118571 - protein, 931 aa, Oryza sativa
  unsure (1)..(931): unsure at all Xaa locations
  Clone ID: PAT_MRT4530_2186C.1.pep
GRQEARHAQDNKNRSRHRVSLRRRENEERGGRSNEDQHHHNRHSHRDRDNHEQRTPDDAGRGRQHDGGDNGDRRHDNNGGRRQNSREPSFXRSLRDVRWPKRFRPGAIEKYDGSTDPEEFFQVYSMQFVANFQGTYKRHEIEDDLHTLTQNSGESLRDYVRRFSECRNTIPDITDASVIRAFKTGVRDRYTTQELATRQITTTRRLFEVVDRCAHADNALRRKSDKTKAGGEKKPAKDALEPSKKKSGRVGRGKLKRKHSLEECLIFKKSLEKQLALEKGKRVRVVEKATEATTQESDSASEKIEFSDEDHPKAVVIPGRYPIVVEPTIRNIKVARVLVDGGSSINLLFASTLDAMEIPRSELTLGTWHLTWGCIGVQSLVKGIKLTGTPASHHIWTYTGAKQISQAEQITFDVAEFDTAYNTIIGRTALVKFMAASHYAYQVLKMPGPKRTITIQGNAKLAIQCDKRSLDMVEHTPSPPATAEPPKKELALITILHDNADVFAWQPSDMPGVPREVIEHKLMVRPDAKPVKQKLRRFAPDRKHAIREELDKLLKAGFIREVLHPEWLANPVMVRKAHGKWRMCVDFTDLNKACPKDHFPLPRIDQLVDSTAGCELLSFLDAYSSYHQISMAKEDEEKTTFITPFGVFCYVKMPLGLITAGNTFQRTVQGALSDQLGNNVEAYVDDIVVTTKTGDSLIDDLRETFDNLRRYRLMLNPEKCTFGVPSGKLLGFLVSGRGIEANPKKIKAIENIKSRIRLKEEAKEAFIALKRYLSNPPILVAPQPNEELFLYIAATPYSVSTVIVVEREKVQRPVYYISEALHDAKTRVTVVSAFPLGEVVRNKDVVSRIAKWTDNETWIMVFDGAFNSQGAGAGFILTSPSGDQFKHAIHLNFRATNNTAEYEGLLAGIRAAAALGVKRLIVKGDSELVAN

SEQ ID NO: 118572 - protein, 540 aa, Oryza sativa
  Clone ID: PAT_MRT4530_21870C.1.pep
MAIVDASTGPAVIVAVAVVVVVVSTLLWTAMAQLVWRPYAVGRALGQQGVRGPAYRLLVGNIGEANEMRAAASGGVLDRRCHDVVPRVLPHYRAWMSRYGKVFVSWTGPFPALCVGDYAMAKEILADRTGLYAKPDPGASILALFGNGLAFVNGDDWARHRRVVHPAFAMDKLKMMAKTMAECARKVIQAWEARAAAAADGERMVQVEVGEQFHELTADVISHTAFGSSYRQGKEVFVAQRELQYIAMSALNSVRIPGSQYIPTKANIRRRQLAKKVRGTLMAIIRERQATAAAAKEDSGHGNDLLGLMLEANATDACGSGGEKSMTMDEIVDECKTFFFAGHDTTSHLLTWAMFLLGTHPEWQQRLREEVLRECCGGGGGDTEALPNGDALNKLKLMTMVLYETLRLYGPVSMLVRTATADAELGGVRVPKGTMTMMPVAILHRDADVWGADAGEFDPLRFRGGVNKAAAHAGALLAFSLGQRSCIGQDFAMMEAKTTLAMILRRFAFEVSPEYVHAPLDLLTLQPKCGLPMVLKLLDQ

SEQ ID NO: 118573 - protein, 1110 aa, Oryza sativa
  unsure (1)..(1110): unsure at all Xaa locations
  Clone ID: PAT_MRT4530_21871C.1.pep
MDRQWMYTDRRSKEFIDGVHYFLRVAEANRQKGFICCPCNKCKNQKEYSASRTIHFHLFESGFMPSYKCWTSHGEQGVEMEEDEVEDDNIPDFAQYAGFEGNQTGEEERDADGNDVADDLGQMLQDAKEDCESEKXAHKLDKMLEDHRTSLYPGCEQRHKKLDTTLEFLQWKAKNGVSDKAFGDLLKLVKNILPEGNKLPETTYEAKKIVCPLGLEVQKIHACPNDCILYRGEEYENLEACPVCKALXYKIRRDDPGEVDGQLTKKRIPAKVMWYFPIIPWLRRLFRNKGNARMMRWHTEERQQDGMLRHPADGSQWRNIDRKFEDFGKDARNIRFGLSTDGMNPFGEMSRGHSTWPVTMCIYNLPPWLCMKRKYIMMPIIIQGPKQPGNDIDVYLRPLVEDLKLLWKKEGVPVWDEDKXEEFNLRALLFVTINDWPALSNLSRQSNKGYKACTHCMDDTESTYLKHCRKVVYMGHRRFLAANHPVRKKGKHFEHKADHRTKPKHRGGKTVFAMVKDLKVVFGKGPGSQPIESEDSHVAMWKKNSIFWELPYWEFLDVLHAIDVMHLTKNLCVNLLGFLGVYGKSKDTREARNDLKHMEQRGDLHPEPKEKGSHYLSPASYTLSKAEKESMFECLESIKVPSGYSTNIKRIISTKEKKFTNLKSHDYHVLMTQLLPVVIRGILPDNVRATITKLCAFMNAISQKVIDPDRLEALQNDVVQCLVNFELIFPPSFFNIMTHLLCHLVKEIGILGPVYLHNMFPFERYMGVLREKYVHNRARPEASIAKGYGTKEVIEFCVEFIEDLHPIGVPESRHEGRLRGKGTLRRKAIMTVDNNLFRKAHFTVLQQSSLVAPYIEEHLALVRARNIGKSDAWITRHHIDIFSTWLRQHLMGNETINQQLAFLARGPSGSIATFQGYEINGYTFYTRAQDMKSTNQNSAVRIDAMGHDSTTGTYYGAIEDIWELDYGPLKVALFRCQWVRLTGGGVTIDDSGMTTVXNKVGYSDEPFVLANDVTQVFYVKDMSSKGKKAKGLDEPKRHVVLPGKRKIVGVEDKTDEDYDQFDGQPPFTVTIDPSILLSNEDTPYSRSDHKEGTIVRRKYVRSTVTADVLP

SEQ ID NO: 118574 - protein, 117 aa, Oryza sativa
  unsure (1)..(117): unsure at all Xaa locations
  Clone ID: PAT_MRT4530_21872C.1.pep
VHIKGRCIGXXTRFAIDRMEMGVDKWTVKCSCGATDDDGERMLSCDTCHMWMHTRCAGISDFDRVPKRYVCKSCKLTHKPKSSGPRLMYSSAPNKRCKTGTGSFSNAAEGLLWPQIS

SEQ ID NO: 118575 - protein, 52 aa, Oryza sativa
  Clone ID: PAT_MRT4530_21873C.1.pep
MMNAGSVEVSGGGIRWQDNELVVQVQRMGHFGQCSGGGPAEVLIDVTGEPVD

SEQ ID NO: 118576 - protein, 294 aa, Oryza sativa
  Clone ID: PAT_MRT4530_21874C.1.pep
MLHEQHAPPPQPEPEVSLQLSAPATAADDVAAGDDEEVTVVTTYRDIHPLTPPSPTTTTTPPTRLGSAAYSWDTASSHRSVSSEEQFMTMSREFTAMVAAGTTMQTGPNDGNNGGDQLTSIGEDELEETNPLAIVPDSHPIATPARSRASQLEVVPAAGPSPAPPVEARQVKKEEVETKVSAWQTAEVAKINNRFKREEVVINGWETEQVEKASAWLKKIEIALARHQKIERKLDEQRAKALERTQNDIAKARRKAEEKRASAEAKRGLKLAKVLELANFMKAVGRVPTKRSFF

SEQ ID NO: 118577 - protein, 560 aa, Oryza sativa
  Clone ID: PAT_MRT4530_21875C.1.pep
MGAAVAGEQRYNNANGGHWEEEGIKVTLTTTYATTNGNERWPATSFEGWRGTVLEGDDFPAMCGDNGGVDGHHLAAANPKEATATEGDDGMSSRASPEIKTWQRFGLHGDGDFWRERVAGVELFTAKPREVAALTGDGRVDGARRLERLPEVFVFPMSFDAVSRRETSPAAALEEEMATVTQAPPPSTPSMVGNPDGGAPAAAADQSAPCATGGETLVGEGRLRKGKMVAEDQSPPSVSGGAPADLPPGGDTDTLLLGVRRQEDAIAMMTPSMKENVRKCKLAGLRAAAPAARRRPRPVEKKLIGGAAILGAGRPPHVAADEATPPPGAKKPKPDHRAFFWTALGHDMASTTSAGSDTGATLDNIAVVDDNLRANLWYLVASPWRPPARVYGKKMTFTDRSVAQHRLLMSCKGWHNTHRGGDEPFPFEELLTPAEKAAADGDEGLRVQAYDRTGRDYDLKCKFLNCNDAYRLILEWSEFLKENHLDVKDKNAAMANEAMIDLWAFRSRWLSHGVDGHEDGRLGLVMVHYFRGDAPHADAAMNVHDALMHSEATPRTPTLP

SEQ ID NO: 118578 - protein, 981 aa, Oryza sativa
  unsure (1)..(981): unsure at all Xaa locations
  Clone ID: PAT_MRT4530_21876C.1.pep
MAPRKPNPASAIGPDPSKIDDDTTAYLGTSLVDEDELAKMVTSGLLAENQAFAPGKAVVPKPSDNRTVVFAVFFEAGLRFPCNVLWLEILCLFQVELPQLSPSALVRIAIFHWACRTARFEPRAGLFDAIFYATVNSKTAGSESAKALRWHRRAIAPNQKPKVTVDGAIEARFALLRKVCSRLSCCDLVKEFCMLRIFPLSXTWQVEVSPDEEVDGLTRLIMPEGANTLTLAQADTEARKMIGDVSVAEYSQLLMRQAAGRANRLYDGELPPRAKPFKADGDEGTSRKWMRGQVKLAPRKQKAPAATDSDADDXDTADDNDGEGEGEDEEEVEVAVXTAVDVPTDNCTETHGYTPTPSPDHAEIGVESNSSPLRLKDLEGAKTLVSIAAARVAKGGSVKKTSKKKGLVDVARIFSDDESSDGTPTSPASRSLGLSTAPGAAADAGETGGSTAAGTSASADRVVKSAARLFGSPVRKPVASPLAIQKGKKTVAETSVSDYSLAAPRFAPADFETXADLIPFIEGVSNLVSPAGSPSLFTELNEFDEGCSAIKSLAVRILVAHCSTEXTIRARLDGFKYRLRAKDDELGRKNLEMEGLANTLKETKAGNKRLQVEVEKGSEAKAEIKRLKAELKKEKEHSAALTDYYNLTEPKIEALREEVSKLEATAERDAQRFAQEMAKATESAKTACCTLRLALTDMGXKVRGVPSEDASAFDFSEWTQQAGLAVSDCVTAYGDCCARVSAAFTMGLLQQFGSEHIAEFPNFAKGDWEVSSQDVSPALHAWRKXFWQKDGRSTAKARLLEHLAKAEAADQAEEPAAKECGGDAGARVDIGQDHPEGLRRKXCVRPSFGNWRSKNEKFVAVKGLPKVRCPFRPVYREMVINGNSYKVLKVAGWMRTHPGWTLDDYDCVHVERREDMIRFWRNHXRTDRQEAIAQRRYSIVCVSPPSPLRVVYNVSSDDEPSLPNHTLGSGGCFGGEDVFFC

SEQ ID NO: 118579 - protein, 295 aa, Oryza sativa
  Clone ID: PAT_MRT4530_21877C.1.pep
SFKSTVLKEILQEPLWSKDEANAVVVEADAFKETDVIYRAISSMGHHNDMLQTAELVHQSSTDAASSLLVTALNEGRDVILDGTLSWEPFVQQTIAMARDVHRRRYRMGPGYKVDPDTGDITENYWEPADADAASPPPTRKPYRIEVAGVVCDAYLAVARGIRRAIVTGRAVRVRSQLVSHRRFAAAFRRYAGAVDGARLYSTNTMGAARLIARKDGVAGSLLVEPAEFACLDAVGGLNENATGVHDLYRGGATACGARSIWDDMIASPARADIQRELREAFRSVEHAPPNTNGA

SEQ ID NO: 118580 - protein, 58 aa, Oryza sativa
  Clone ID: PAT_MRT4530_21878C.1.pep
MAALVLSFHVVTVITIPKGVLEECRSPEDAVPSGTYAFLKLRQNSAQVTYVTAERVTM

SEQ ID NO: 118581 - protein, 138 aa, Oryza sativa
  unsure (1)..(138): unsure at all Xaa locations
  Clone ID: PAT_MRT4530_21879C.1.pep
MVGKLTATKPSRSDEILDGDEQVRIANQIRSQFDDLAPKRPIKPNRSEPDAVNPVDYTNSVQNIPELDKFEALRSRSHIVLSSEKLVDAQEEFVETRYYKEXXSIDKQHHATGSGFIMAVREGDDDGYEIQLPASNVD

SEQ ID NO: 118582 - protein, 1513 aa, Oryza sativa
  Clone ID: PAT_MRT4530_2187C.1.pep
MTSSFVDNRVDTGPIQGIPASTMLVWTQVGEIVFLVYTTVPISASPSITGNENAVVINPDGPMSKDPPTVAENGTSTSYELEKIPSAAEPCPFDKDCEPRRTTSEVTKSWCHIHKSRKHNLQACWVFLNVQAEIRACKERGIQRTSPTRDVYCPIHKTKNHDFSSCKVFFRAMKTTPPKVQQSGTSLEDTNKEQGATITSDRFIGVIDINPREPSVLHLLEDYGSSSSSTPRDMFAIGGTSTSAQANAEAENQTATPAQHLGTVNAILREAPYDLRPWRTHDRRQPTAPSAGCRAFNRSLRDVRWPERFRPEAIEKYDGSTDPEKFLQVYSTVLYAAGADDNALAHYLPTTLKGSARSWLMHLPPYSISSWADLWQQFIANFQGTYKRHAIENDLHALTQNQGESLRDYVRRFNECRNTIPNITDASVIRAFKTGVRDCYTTQDLATRRITTTRRLFEVVDRCAHADDALRRKNDKPKVGGEKKPAKDAPESSKKKSDKSGNRKAQAEVLASEYERPPKHPDPQGSDTKRIWCPIHKSDRHSLEECLIFKKSLERQLALEKGKRVRVVEKATEATTQDSDSAYPDSDLHVSHIFGGPTAYSSKREYKKVEREVCSTWQGAAPKMKWSEQKIEFLDEDYPKAAVIPGRYPIVVEPTIRNIKVARVLVDGGSSINLLFASTLDAMGIPRSELTPTDQHFHGITPQSSSKPLGKITLPVTFGQASNFRTEQIIFDVAEIDTAYNTIIGRTALAKFMAASHYAYQVLKMPGPKGTITIQGNAKLAVQCNKRSLDMVEHTPSPPATAEPPKKVIKTTKTPKPDGAIKIVPLCSANPDKTELALITFLRDNADVFAWYPSDMPGVPREVIEHKLMVRPDAKPVKQKLRRFAPDRKQAIREELDRLLKAGFIREVLHPEWLANPIMVRKSNGNMAKEDEEKTSFITPFGVFCYVKMPFGLITAGNTFQHTVQGALSDQLGNNVEAYVDDIVVKTKTGDLLIDDLRETFDNLRRYRLMLNPEKCTFGVPSGKLLGFLVSGRGIEANPEKIKAIENMKSPTRLKEVQKLTGCMAALSRFVARMGERGQPFFALLKKQDKFVWTQEAEEAFIALKRYLSNPPVLVAPQPNEELFLYIAATPYSVSTVIVVEREKVQRPVYYVSEALHDAKTRYPQIQKLLYAVIMMSRKLRHYLQAHRVTVVSAFPLGEVVRNKDVVGRIAKWVVELSQFDVHFVPRTTIKSQVLADFVADWTMPENRLDSQTDNETWTMAFDGALNSQGAGAGFILTSPSGDHFKHAIHLNFRVTNNTAKYEGLLAGMRAAAALGVKRLIVKGDSELVANQVHKDYKCSSPELSKYLAEVRKLEKRFDGIEVRHVYRKDNIESDDVARRASRREPLEPGTFLDILTKPSVKEANDEDSPVTPDISSGATEAERAVADIETMDDWRTPLIKFISSDELPEDDAEAEKITRQAKIYYMIGNDLYKKAPNEVLLKCVSSDDDKHLLLDIHEGVCGSVGDMGSGVS

SEQ ID NO: 118583 - protein, 78 aa, Oryza sativa
  Clone ID: PAT_MRT4530_21880C.1.pep
MHRLLSSSRTSHELSDVADMKLRSGFVYDRTWPWAIVLVVRVNLLLFGGREPAESSDSLVEMWTEDGDGVQRARDHVS

SEQ ID NO: 118584 - protein, 134 aa, Oryza sativa
  unsure (1)..(134): unsure at all Xaa locations
  Clone ID: PAT_MRT4530_21881C.1.pep
VGECSXEGMSDXXXEDFIPXXEXKELDQSEKCVDHGPXWWSFATAYIQLLLPXQYHHYVXIXEWHFTLGSLISTGSVLXEGTKSETLKDNSTLSFXXXFSTEIRRCIRCXQTKTIPLFLFSSDSVQKSDDALDV

SEQ ID NO: 118585 - protein, 166 aa, Oryza sativa
  Clone ID: PAT_MRT4530_21882C.1.pep
MYTDNLEHMDPNQAEELFDIASRYLLFPLKRVVADILLPYLEHVSPAELCHWLMLSDIYDVVKIREYCLDIIACNFEMFADTREFRALLLTLPPPSGDDSLRTTRPSEPGTAGNTDQGNLLDDLREKWLEAEAAELDERDESAKLFDNRLEMLMLVAEQEANDGNV

SEQ ID NO: 118586 - protein, 1266 aa, Oryza sativa
  Clone ID: PAT_MRT4530_21883C.1.pep
MDEPLYPIAILIDELKNEDIQLRLNSIRRLSTIARALGEERTRKELIPFLSENNDDEDEVLLAMAEELGVFIPYVGGVEHAHVLLPPLETLCTVEETCVRDKAVESLCRIGAQMKESDIVDWFVPVVKAELRTIYGQLCQDDMPMVRRAAASNLGKFAATVEQNYLKTEVMSIFDDLTQDDQDSVRLLAVEGCAALGKLLEPQDCVAHILPVIVNFSQDKSWRVRYMVANQLYELCEAVGPEHSREQLVPAYVRLLRDNEAEVRIAAAGKVTKFCRILSPQLAIQHILPCVKELSSDSSQHVRSALASVIMGMAPVLGKEATIEQLLPIFLSLLKDEFPDVRLNIISKLDQVNQVIGIDLLSQSLLPAIVELAEDRHWRVRLAIIEYIPLLASQLGVGFFDDKLGALCMQWLEDKVFSIRDAAANNLKRLAEEFGPEWAMQHIIPQVLEKINNPHYLYRMTILQAISLLAPVMGAEITCQQLLPVVINSSKDRVPNIKFNVAKVLQALIPILDQSVVEKNVKPCLVELSEDPDVDGTVKRWDSVERRDSADREAPPPSSRKRKGHEGGGNESDPEGGKRARASVEPPPPKEERPRRERRRFEDADANGKHGDERGKGDKDNSNHGAVNGDSRSGLVPNAGAQQPLNAAPVVVPSSVPMPSKVSSITTTNENEGVSIRSDEVTGKSSTDGSTSSAAGKSSNLSLDALAKAKKALQLKKELSEKLKKLPVLNNKLGVTSTDTQIPKKETQPVSSSGASEMAVGAALTEKMAATAGAVGIPGLANIPNLDAVKRAQELAAKMGFRQDPQFAPLINLFPGTSSELTVPQKPAKAPVLRLDAQGREIDEHGNVINMTKPTNLSTLKVNINKQKKEAFQIIKPDLDSLAKSSAHFDERMGINQNKLLRPRRPGFQFIEEGKLSRQAELQRIKNQFGEAQAKELKVKQAQLAKAKAEVVMNPNLIEVAPGRPPKQKQKEEIPEIEPWDAKILPSTTYDDFSMEKVNMEKITIYVEHPEPLEPPAEPAPPPPQPLKLTKKEQKKLRTQRRLAKEKDRQEMIRQGLLEPPKPKVKMSNLMKVLGAEATQDPTRMELEIRTAAAEREQAHVDRNIARKLTPSERREKKERKLFEDPNTLETIVCVYRIRDLSHPQTRFKVDVNAQENRLTGAAVIADGISVVVVEGGKKSIKRYNKLMLNRIDWAAAVDDDDDADEESDKPVNSCALVWQGSVAKPCFTRFSVHNCRSEAAAKKVFADASVPHYWDLAVNFSEDSS

SEQ ID NO: 118587 - protein, 201 aa, Oryza sativa
  Clone ID: PAT_MRT4530_21884C.1.pep
MALHALFEEKPTGLLLLLSEFCGRAELIVIQMRSSLQQQIHHRLSSSPPLPLATTNGADACGSAAGSPAFSRRGSAAGAGTAGGTAPLGDGPGGMRATATGSGRLGGSCARRRATGRDGGSRPDKYLRNCIGTCFASAPRTDIAAAGADGLLSPPPSTKERDVIKATGTAAVVRRRSDKVVRRRWVAAVVRRQSGEVVRRR

SEQ ID NO: 118588 - protein, 38 aa, Oryza sativa
  Clone ID: PAT_MRT4530_21885C.1.pep
NPIFNNTKIYTLLFSLIVILKSCGTSQKPPLFKSSQIS

SEQ ID NO: 118589 - protein, 587 aa, Oryza sativa
  Clone ID: PAT_MRT4530_21886C.1.pep
MASMDEPLYPIAILIDELKNEDIQLRLNSIRRLSTIARALGEERTRKELIPFLSENNDDEDEVLLAMAEELGVFIPYVGGVEHAHVLLPPLETLCTVEETCVRDKAVESLCRIGAQMKESDIVDWFVPVVKRLAAGEWFTARVSSCGLFHIAYPSAPDQLKAELRTIYGQLCQDDMPMVRRAAASNLGKFAATVEQNYLKTEVMSIFDDLTQDDQDSVRLLAVEGCAALGKLLEPQDCVAHILPVIVNFSQDKSWRVRYMVANQLYELCEAVGPEHSREQLVPAYVRLLRDNEAEVRIAAAGKVTKFCRILSPQLAIQHILPCVKELSSDSSQHVRSALASVIMGMAPVLGKEATIEQLLPIFLSLLKDEFPDVRLNIISKLDQVNQVIGIDLLSQSLLPAIVELAEDRHWRVRLAIIEYIPLLASQLGVGFFDDKLGALCMQWLEDKVFSIRDAAANNLKRLAEEFGPEWAMQHIIPQVLEKINNPHYLYRMTILQAISLLAPVMGAEITCQQLLPVVINSSKDRVPNIKFNVAKVLQALIPILDQSVVEKNVKPCLVELSEDPDVDVRYYANQALQACDQIMMSS

SEQ ID NO: 118590 - protein, 826 aa, Oryza sativa
  Clone ID: PAT_MRT4530_21887C.1.pep
MDRDRSSRRPRDDDDRHHRSRDDHHRRRHDADDDHRRHKRGGGGDDDDDCDRCRHHRDDEEESRSRRHGHHRDGGRRSLAPSGSPPPPAAKRERSSSRAPRDSVERRDSADREAPPPSSRKRKGHEGGGNESDPEGGKRARASVEPPPPKEERPRRERRRFEDADANGKHGDERGKGDKDNSNHGAVNGDSRSGLVPNAGAQQPLNAAPVVVPSSVPMPSKVSSITTTNENEGVSIRSDEVTGKSSTDGSTSSAAGKSSNLSLDALAKAKKALQLKKELSEKLKKLPVLNNKLGVTSTDTQIPKKETQPVSSSGASEMAVGAALTEKMAATAGAVGIPGLANIPNLDAVKRAQELAAKMGFRQDPQFAPLINLFPGTSSELTVPQKPAKAPVLRLDAQGREIDEHGNVINMTKPTNLSTLKVNINKQKKEAFQIIKPDLDSLAKSSAHFDERMGINQNKLLRPRRPGFQFIEEGKLSRQAELQRIKNQFGEAQAKELKVKQAQLAKAKAEVVMNPNLIEVAPGRPPKQKQKEEIPEIEPWDAKILPSTTYDDFSMEKVNMEKITIYVEHPEPLEPPAEPAPPPPQPLKLTKKEQKKLRTQRRLAKEKDRQEMIRQGLLEPPKPKVKMSNLMKVLGAEATQDPTRMELEIRTAAAEREQAHVDRNIARKLTPSERREKKERKLFEDPNTLETIVCVYRIRDLSHPQTRFKVDVNAQENRLTGAAVIADGISVVVVEGGKKSIKRYNKLMLNRIDWAAAVDDDDDADEESDKPVNSCALVWQGSVAKPCFTRFSVHNCRSEAAAKKVFADASVPHYWDLAVNFSEDSS

SEQ ID NO: 118591 - protein, 124 aa, Oryza sativa
  Clone ID: PAT_MRT4530_21888C.1.pep
MRRGGVDEGSERKEVGVAINAAAAGQVVRWRWRWRWRWMLDGLPPPVGPPMPPSMLEGSHVEGSGMEVEFQAQGERTTATATMSTTMRVLLERTMTVTQSAPDDVGHLGVAKLLPPHGVSTCST

SEQ ID NO: 118592 - protein, 49 aa, Oryza sativa
  Clone ID: PAT_MRT4530_21889C.1.pep
VFSRCHSVPLSCAPTRGHSCDLIQRLITPTRKLLLPPPPPGLGQQRLLS

SEQ ID NO: 118593 - protein, 1375 aa, Oryza sativa
  Clone ID: PAT_MRT4530_2188C.1.pep
MSKDPPAVAENGTSTSCEPEKIPSAAEPCPSDKDCEPTRTASEVAKSWCPIHKSRKHNLQACWVFLNVQTEIRACKERGIQRTSPTHDVYCPIHKTKNHDFSSCKVFLRAMKTTPPKDNNGGRRQNSREPERRPWNRTPEPSEPSSSSSSSSPSSSSDRRPRRTHDRRQPTAPSAGCRAFNRSLRDVRWPERFRPGAIEKYDGSSDPEEFLQVYSTVLYAVGTDDNALVNYLPTALKGSAHSWLMHLPPYSISSWADLWQQFVANFQGTYKRHAIEDDLHVLTQNQGESLRDYVRHFNEWRNTIPDITDASVIRAFKTGVRDRYTTQELATRKLALEKGKRVRVVEKATEATTQDSDSAYPDSDLHVSHIFGGSTTYSSKREYKKVEREPLGKIMLPVTFGQASNFRTEQITYDVTEFDTAYNAVIERTALTKFMAASHYAYQVLKMPWPKGTITIQGNAKLAVQCDKRSLDMVEYTPSPPATAEPPKKVIKTTKTPKPDGAIKIVPLSSVNPDKTLSDMPGVPREVIEHKRMVRPDAKPVKQKLRRFTSDRKQAIREELDKLLKAGFIREVLHPEWLANPVMVRKANEKWRMCVDFTNLNKACPKDHFPLPRIDQLVDSTTGCKLLSFLDAYSGYHQISMAKEDEKTTFITPFGVFCYVKIPFGLQHTVQGALSDQLGNNVEAYVDDIVVKTKTGDSLVDDLRETFDNLRRYRLMLNPEKCTFGVPSGNLLGFLVSGRGIEANPEKIKAIENMKSPTRLKDVQKLTGCMAALSRFVARMGERGQPFFALLKKQDKFVWTQEAEEAFIALKRYLSNPLVLVAPQPNEELFLYIATTPYSVSTVIVVEREKVQRPIYYVNEALHDAKTRYPQIQKLLSAVIMTSRKLRHYFQAHRVTFVSAFPLGEVVRNKDVVGRITKWVVELSQFDIHFIHEQPSSPRLDSQTDNETWTMAFDGALNSQGAGAGFILTSPSGDQFKHAIHLNFRATNNTAEYEGLLAGMRAAAALGVKRLIVKGDSELVANQVHKDYKCSSPELSKYLAEVKKLEKRFDGIEVPSNLARRASRRELLEPGTFLDILTKPSVKEANDEDSPVTPDIGSGATEADCAVADIETRDDWWTPLIKFISSNELPEDDAEVEKITRQAKIYCMIGNDLYKKAPNGVLLKYVSSDDGKHFLVDIHEGVCRVTDRSRGLERANGIVLQGIKTRVYDRLMSHDKKWVEELPSVLWVVRTTPTTSNKEKPFFLVYGSKAMLPTKLCHQSTRLQKYSDEDQEEQRNDDMNLLEEHQERVAVRAASYQQALRRCHEKRIRARILSIGDYVLRRVQSQAGRNKLSPKWEGPYTITQVLRPGSFKIADGDGRELANSWNIDQLHKFYV

SEQ ID NO: 118594 - protein, 1058 aa, Oryza sativa
  Clone ID: PAT_MRT4530_21890C.1.pep
MDRQWMYADRRSKEFIDGVHYFLRVAEANRQRGFICCPCNKCKNQKEYSASRTIHFHLFESGFMPSYNCWTSHGEQGVEMEEDEVEDDNIPDFAQYVGFEGNQTGEEEIAADGNDVADDLGQMLQDAREDCESEKEAHKLDKMLEDHRTSLYPGCEQGHKKLDTTLELLQWKAKNGVSDKAFGDLLKLVKNILPGGNKLPETTYEAKKIVCPLGLEVHKIHACPNDCILYRGEEYENLEACPVCKALRYKIRRDDPGEVDGQLTKKRIPAKVMWYFPIIPRLRRLFRNKGNARMLRWHAEERQQDRMLRHPADGSQWRNIERKFKEFGKDARNIRFGLSTDGMNPFGEMSSGHSTWPVTMCIYNLPPWLCMKRKYIMMPIIIQGPKQPGNDIDVYLRPLVEDLKQLWKKEGVPVWDEDKQEEFNLRALLFVTINDWPALSNLSGQSNKGYKACTHCMDETESTYLKHCRKVVYMGHRRFLAANHPVRKKGKHFEHKADHRTKPKHRSGKTVFAMVKDLKVVFGKGPGSQHIESEDGHAAMWKKNSIFWELPYWEFLDVPHAIDVMHLTKNLCVNLLGFLGIYGKSKDTLEARNDLKHMEQRSDLHPEPKEKGSHYLSPASYTLSKAEKGILPVNVRATITKLCSFMNAISQKVIDPDRLEALQNDVVQCLVSYELIFPPSFFNIIMHLLCHLVKEIGILGPVFLHNMFPFERYMGVLKKYVRNRTRPEASIAKGYGTEEVIEFCVEFIEDLRPIRVPESHHEGRLWRKGTLGRKAIMTVDNNLFRKAHFTVLQQSSLVAPYIEEHLALVRARNIGKSDAWITRHHIDTFPAWLRQHLMGNETINQQLAFLARGPSGSIATFQGYEINGYTFYTRAQDIKSTNQNSDVRIDAMGHDGTTGTYYGAIEEIWELDYGPLKVPLFRCQWVRLTGGGVTIDDSGMTTVDLNKVGYSDEPFVLANDVTQVFYVKDMSSKGKKGKGPDEPKRHVVLPGKRKIVGVEDKTDEDYDQFDGQPPFTVTIDPSILLSNEDTPYSRSDHKEGTIVRRKYVRTIVTADVLP

SEQ ID NO: 118595 - protein, 785 aa, Oryza sativa
  unsure (1)..(785): unsure at all Xaa locations
  Clone ID: PAT_MRT4530_21891C.1.pep
MDQQWMYADRWSKEFIDGVHYFLRVAEANRQRGFICCPCNKCKNQKEYFASRTIHFHLFESGFMPSYNCWISHGEQGVEMEENEVEDDNIPDFAQYVGFEENQTGEEEIAADGNDVADDLGQMLQDAREDCESEKEAHKLDKMLEDHRTSLYPGCEQGHKKLDTTLEFLQWKAKNGXLEVHKIHACPYDCILYRGEENKGNARMLRWHAEERQQDGMLXTPPMRKYIMMSIIIQGPKQPGNDIDVYLRPLVEDLKQLWKKEGVPVWDEDKQEFNLRALLFVTINDWPALSNLSGQSNKGYKACTHCMDETESTYLKHCRNVVYMGHRRFLAANHPVRKKGKHFEHKGDHRTKPKHRSGKTMFAMVKDLKVVFGKGPGSQPIESKDGHAAMWKKNSIFWELPYWEFLDVRHVIDVMHLTKNLCVNLLGFLGVYGKSKDTLEARNDLKHMEQRGDLHPKPKEKGSHYLSPASYTLSKAEKENNVRATITKLCAFMNTISQKVIDPDRLEALQNEVVQCLVSFELIFPPSFFNIMTHLLCHLVKEIRILGPVYLHNMFPFERYMGILKKYVRNRARPEASIAKGYGTEEVIEFCVEFIKDLRPIGVPELRHEGRLRGKGTLGRKEIMTVDNNLFRKAHFTVLQHSSLVAPYIEEHLALVCARNIGKSDAWITRHHIDTFPTWLRQHLMGNESINQQLAFLARGPSGSIATFQGYEINGYTFYTRAQDMKSTNQNSVVRVDAMGHDGTTATYYGAIEDIWELDYGPLKVPLFRCQWVRLTGGGVMIDGS

SEQ ID NO: 118596 - protein, 59 aa, Oryza sativa
  Clone ID: PAT_MRT4530_21892C.1.pep
KSQFNTRGFIKVVKKKVYISLWHLTFSDKKTGLPHLINNLNTPRVGCELFFPPPHFFFY

SEQ ID NO: 118597 - protein, 64 aa, Oryza sativa
  unsure (1)..(64): unsure at all Xaa locations
  Clone ID: PAT_MRT4530_21893C.1.pep
TRPATPPPSRPAPSSSLSRHGASPSLRFAPPPPPPPPRRRRLRASPPPSPPRAXPSPPPPPPSG

SEQ ID NO: 118598 - protein, 653 aa, Oryza sativa
  Clone ID: PAT_MRT4530_21894C.1.pep
MMWYFPIIPRLRRLFRNKGNARMLRWHAEERQQDGMLRHPADGSQWQNIDRKFKEFGMDARNIRFGLSTDGMNPFGEMSSGHSTWPVTMCIYNLPLAMHEEEVHNDADYYSRPKQPGNDIDVYLRHWLKILNSCGRRKVSPCGTRTNRRRFKLRALLFVTINDWPALNNISGQSNKGYKTCTHYMDETESTYLKHCRKVVKMGHRRFLAANHPVRKKGKHFEHKADHRTEPKHRSGKTVFAMVKDLKVVFGKGPGSQPIESEDGHRRCGKRNPIFWELPYWEFLDVRHAIDVMHLTKNLCVNLLGFLSVYGKSKDTLEARNDLKHMEQCSDLHPEPKEKGSHYLSPASYTLSKAEKESMFECLESIKVPSGYFTNIKRIISTKEKKFTNLKSHDCHVLMTQLLPVVIRDIFPDNVRATITKLCVFMNVISQKVIDPDRLEALQNDVVQCLVSFELIFPPSFFNIMTHLLCHLMKVISILGPVYLHNTFPFERYMGVQKKYVRNHARPEASIAKGYGTEEVIEFCVEFIEDLRPIGVPESRHEGRLREKGTLGRKAIMTVDNDLFRKAHFTILQHTSLVAPYIEEHLALGRARNIGKSDAWIARHHIDTFPTWLRQHLMGTPEINQQLAFLARGPSGSIATFQGYEDQWVHILH

SEQ ID NO: 118599 - protein, 1113 aa, Oryza sativa
  unsure (1)..(1113): unsure at all Xaa locations
  Clone ID: PAT_MRT4530_21895C.1.pep
MDRQWMYADRRSKVFIDGVHYFLRVAEANRHYKGFIYCPCNKCKNQKEYSASRTIHFHLFESGFMPNYNCWTSHEEQGVEMEEDEVEDDNIPDFAQYAGFEGNQTGEEERDADGNDVADDLGQMLQDAKEDXESEKGAHKLDKMLEDHRTSLYPGCEQGHKKLDTTLEFLQWKAKNGVSDKAFGDLLKLIKNILPEGNKLPETTYEAKKIVCPLGLEVQKIHACPNDCILYRGEEYENLEECPVCKALRYKFRRDDPGEVDGQLTKKRISTKVMWYFPIIPQLRRLFRNKGNARMMRWHAEERQXDGMLRHPXDGSQWRNIDRKFKDFGKDARNIRFGLSTDGMNPFGEMSSGHSTWLVTMCIYNLPPWLCMNRKYIMMPIIIQGPKQHGNGIDLYLRPLVEDLKLLWKKEXLGVPVWDEDKHEEFNLRALLFVTINDWPAVSNLSGQSNKGYKACTHYMDETESTYLKHCRKVVYMGHRRFLATNHPVWKKGKHFEHTADHRTKPKHRSGKTMFAMVKDLKVVFGKGPGSQPIESEDGHTAMXKKNSIFWELPYWEFLDVRHAIDVMHLTKNICINLLGFLGVYGKLKDTLEARNDLKHMEQRGDLHPEPKEKXSHYLSPASYTLSKAEKESMFECLESIKVPSGYSTNIKXIISTKEKKFTNLKSHDCHVLMTQLLPVIIRGILPDNXRATITKLYAFMNAISQKVIDLDRLEVLQNDVVQCLVSFELIFPPSFFNIMTHLLCHLVKEIGILGPLYLHNMFPFERYMGVLKKYVRNSARPKASIAKGFETXEVIEFCIEFIEDLRPIGVPESRHEGXLRGKGTLGRKAIMTVDNNLFCKSHFTVLQQSSLVAPYIEEHLALVRAKNIGKSDAWITRHHIDTFSAWLRQHLMVNETINQQLAFLARGPSGSITTFQGYEINGYTFYTRAQDMKSMNQNSVVRIDAMGHDGTTGTYYGAIEDIWELDYGPLKVPLFRCQWVRLTGGGVTIDDSGMTTVDLNKIGYLDEPFVLANDVTQVFYVKDMSSKGKKGKGPDEPKRHVVLPGKRKIVGVEDKTDEDYDQFDGQPPFTVTIDPSILLSNEDTPYSRSDHKEGTIVRRKYVRSTVTADVLL

SEQ ID NO: 118600 - protein, 173 aa, Oryza sativa
  Clone ID: PAT_MRT4530_21896C.1.pep
MPPSSPAPTREVSLALVPMKVHRRESPEVATGWSFLRKKFLPDRKPASHDRSKMSVVQWAMRLPSRYSSASPVCSEYRTTTPDGITSASRIWRDRVAVPSRSNSGKSSVVIEELDNSSDKEIPEELIALREKFPSVYSTFSHSELAKITSDFSPECIVGQGGTSQVYKGCLEN

SEQ ID NO: 118601 - protein, 694 aa, Oryza sativa
  Clone ID: PAT_MRT4530_21897C.1.pep
MEEDEAEDENIPDWAQYTGFEGNQTGEVDLDAGDNDAADDLRQMLQDAKEDCESEKEAHKLERMLEDHRTSLYPGCEQGHKKNKGNARMMRWHAEERQQDGMLRHPVDGPKQPGNDIDVYLRPLVEDLKLLWKKEGVPVWDEDKQEEFNLRALLFVTINDWPALSNLSGQSNKGYKACTHCMDETESTYLKHYRKVVYMGHRRFLTANHPVQKKGKHFEHKADHRTKPKHRSGKTVFAMVKDLKEFLDVRHAIDMMHLTKNLCVNLLGFLDVYGKSKDTLEARNDLKHMEQRGDLHPEPKEKGSHYLSPASYTLSKAEKESMFECFESVKVPSGYSKNIKRIISTKEKKFTNLKSHDYHVLMTQLLPVIIRGILPDNIRATITKLCAFMNAISQKVIDPDRLEALQNDVVQCLVSFELIFPPSFFNIMMHLLCHLVKEIGILGPVYLHNMFPFERYMGVLKKYVRNRARPEASIAKGYRTEEVIEFCVEFIEDLRPIGGYEINGYTFYTRAQDMKSTNQNSVVRIDAMGHDGTTGTYYGAIKDIWELDYGPLKVPLFRCQWVRLTGGGVTIDDSGMTTVDLNKVGYLDEPFVLANDITQVFYVKDMSSKGKKGKGSEEPKRHVVLPGKRKIVGVEDKTDEDYDQLDGQPPFTVTIDPSILLSNEDTPYSCSDRKEGTIVRRKYVRSTVTTDVLP

SEQ ID NO: 118602 - protein, 854 aa, Oryza sativa
  Clone ID: PAT_MRT4530_21898C.1.pep
MEEDEVEDDNILDFAQYAGFEGNQTGEEERDADGNNVADDLGQMLQDAKEDCESEKGAHKLDKMLEDHRTSLYPGCEQGHKKLDTTLEFLQWKAKNGVSDKAFGDLLKLVKNILPEGNKLPETTYEAKKIVCPLGLEVQKIHACPNDCILYRGEEYENLEACPVCKALRYKIRRDDPGEVDGQLTKKRIPAKVMWYFPIIPRLRRLFRNKGNARMMRWHAEERQQDGMLRHPADGSQWRNIDRIFKDFGNDARNIRFGLSTDGMNPFGEMSSGHSTWPVTMCIYNLPPWLCMKRKYIMMPIIIQGPKQPGNDIDVYLRPLVEDLKLLWKKEAIHQVRKKGKHFEHKADHHTKPKHRSGKTVFAMVKDPKVVFGKGPGSQPIESEDGHAAMWKKNSIFWELPYWEFLDVRHLIDVMHLTKNLCVNLLGFLGVYGKSKDTLEALVIRGILPDNVRATITKLCAFMNAISQKVIDPDRLEALQNDVVQCLVSFELIFPPSFFNIMTHLRCHLVKEIGILGPVYLHNMFPFERYMGVLKKYVRNRTRPEASIAKGYGTEEVIEFCVEFIEALHPIGVPESRHEGRLRGKGTLGRKAIMTVDNNLFRKAHFTVLQQSSLVAPYVEEHLALVRAKNIGKSDAWITRHHIDTFSTWLLQHLMGNETINQQLAFLARGPSSSIATFQGYEINGYTFYTRAQDMKSTNQNSAVRIDAMGHDGTTGTYYGAIEDIWELDYGPLKVPLFRCQCVRLTGGGVTIDDSGMTTVDLNKDMSSKGKKGKVTDEPKRHVVLPGKRKIVGVEDKTDEDYDQFDGQPPFTVTIDPSILLSNEDTPYSRSDHKEGTIVRRKYVRSTVTANVLP

SEQ ID NO: 118603 - protein, 123 aa, Oryza sativa
  Clone ID: PAT_MRT4530_21899C.1.pep
MVAWTLRPAAAGRAIRRAAYHSDGAPPPRKLRGPRFSSFNRNNHEIDALLEEVKNTPVNMITDDLMIRTVRHSFLARQEILYQNVLRSWVVVAAVLTGYSWGYNKFAESSTVGSEPPKEHEGK

SEQ ID NO: 118604 - protein, 318 aa, Oryza sativa
  Clone ID: PAT_MRT4530_2189C.1.pep
MACAGWRPVLFLLHHHMAFFGLRISPSVSVPSPRRRSAGEVALLAVVVVAALLTATTHAASATIESRPADALRSEVDELRLRVLHLESLLEENTKTLKSKANNLEENSNLIGTMEHDIEILMNKYESTKKSQSKSYPESNVKALEDEVQLLWRVVRKMNENADSIESLANGAEKRVESLSSEVKKMEGVIAEQWIQIRQLEQAFVLTKMMTSKVHQRSRLSETAYKWPGKDLVLKVSRFCKAICGQHIRDVDKPNVFFLGGSISRSCISAPYKQLKIFMLLAQNFHHKVQIFLQDAMRSNSYSRGFATEIITFCLIEI

SEQ ID NO: 118605 - protein, 58 aa, Oryza sativa
  Clone ID: PAT_MRT4530_218C.1.pep
HYKRYYHLILHARQRLLITSTSKRPLLFFFFSKLYLNCKPLLGIFNSAGVHHTNYCPN

SEQ ID NO: 118606 - protein, 987 aa, Oryza sativa
  Clone ID: PAT_MRT4530_21900C.1.pep
MPSYNFWTSHGEQGVEMKEDEVEDDNIPDFAQYAGFEGNQTGEEERDADGNDVADDLGQMLQDAKEDCESEKGAHKLDKMLEDHRTSLYSSCEQGHKKLDTTLEFLQWKAKNGVSDNAFGDLLKLVKNILPEGNKLPETTYEAKKIVCPLGLEVQKIHACPNDCILYRGEEYENLEACLVCKALRYKIRRDDPEEVDGQLTKKRIPAKVMWYFPIIPRLRRLFRNKGNARMMRWHAEERQQDGMLRHLADGSQWRNIDRKFKDFGKDARNIRFGLTAIALGPLWKKEGVPVWDEDKQEEFNLRALLFVTINDWPALSNLSGQSNKGYKACTHCMDETESTYLKHCRKVVYMGHCRFLAANHPVRKKGKHFEHKADHCTKPKYRSGKTVFAMVKDFKVVFGKGPGSQPTESEDGHAVMWKKNSIFVELPYWEFLDVCHAIDVMHLTKNLCVNLLGFLGVYGKSKDTLEARNDLKHMEQRGDLHPELKEKGSHYLSPASYTLSKAEKESMFECLESIKVPSRYSTNIKRIISTKEKKFTNLKSHDCHVLMTQLLPVVIRGILPDNVRATITKLYAFMNAISQKVINPDRLEALQNDVVQCLVSFELIFPPSFFNIMMHLLCHLVKEISILRTVYLHNMFPFERYMGVLKKYVRNCARPEASIAKGYGTEEVIEFCVEFIEDLRPIGVPESRHEGRLRGKGTLGRKAIMTVDNNLFRKAHFTVLQQSSLVAPYIEEHLALVRARNIGKSDAWITRHHIDTFAAWLRQHLMGNETINQQLAFLARGPSGLIATFQGYEINGYTFYTRAQDMKSMNQNSVVRIDAMGHDGTTGTNYDTIEDIWELDYGPLKVPLFQCQWVRFTGGGVMIDDSGMTTVDLNKVGYSDEPFVLANDVTQVFYVKDMSSKGKKGRGPDEPKRHVVLPGKRKIVGVEDKTDEDYDQLDGQPPFTVTIDPSILLSNEDTPYSSSDHKEGTIVRRKYVRSTVTSDVLP

SEQ ID NO: 118607 - protein, 153 aa, Oryza sativa
  unsure (1)..(153): unsure at all Xaa locations
  Clone ID: PAT_MRT4530_21901C.1.pep
VSFWHVRELLSVSAFTYLEWLVNSVSFNHTXEFLAYASEDPFIDITNVRPXRSIPQIPFKAAMPSVEWNPECSLLAFAGDRKCKSQAYPGVLSISGSESAKPMVTIAPSATIHCICPPPFCYACLPAVWVMTVTSISLKCCPLCLKCICTLLL

SEQ ID NO: 118608 - protein, 817 aa, Oryza sativa
  unsure (1)..(817): unsure at all Xaa locations
  Clone ID: PAT_MRT4530_21902C.1.pep
MKYILKGQTPNFDTFPKLRDHWDEFVAYKTGEQGQAMMERNKENAAKKKYHHHLGSGGYSVAMPKWEEMEASLLERGIEPATANWPERSKFWYXGTLNPADGSLVFGDQIREVARRLTDAVEVSSQGTFRPDRERDELLLALQTPEHPGRTRGKWVIPWKIGFKEDIHTYRSRMRSKRDTEAKIANLEFRVSSYELSMQEEVARKVDERMATHRSNDPQPXGNRSSCASTGQVGSQSMDAMQTQDESTCPVDDITQRTPCELHIPFKNLSIKVASGMAIPMDPSGTYHCRLIPAGYSKVEVELVEGAYEDLELDYPGGDGETHLRDTSHAIILWRRWYIILPGRQAASRAPSPPAPPSPPQHPAPSPPHAPAPSPPQAPAPTPPRAPTPTPPRAPTPTPPQAPLPSPSKSRAPQAPPPAHTRATKKAKVDAAKNKDSGYDCTQEELDAYVASEVKRQFKPRSPEKKIPIDPSVMNFFRGMSAPAKEAIKLSDYERTLKKASSRKSKPVPQLGEQPNQEIEPLVTGKEMTIEEFITDTGLTTDQLLGVAPIEKAEVKYMYELGKPLVKPELLQSLPTQMYKFHQLYIEISATGREMIRARIRDTDFLQGDDILWINFKGIYELYQLDALDVSIMSCWILMEIQRARRRGVFDTGFIDPRKVNVTMLDQYPQATEDNLVHLLKVQHYKTFILLPYNTEFHWVLLLFDLSACTVNVYDSMDKKESTFDKVFKLIDRIWYRFRHLVRGKWRERLRRKFKFPFIRIRDNLTTHKEFIAAVQEQLMGFINEQILDPKGEFYYDGNTIHRSLASELATTTTSKS

SEQ ID NO: 118609 - protein, 119 aa, Oryza sativa
  Clone ID: PAT_MRT4530_21903C.1.pep
TACQHGQASGTNSPISQKKKRSSSIDHSPTGMAPPARRSGESDRDARSVVAGQRPPPAGRVSSSCSLREELPGLLLLLLDPHHLAVDQVEPNPRRRGDPLVPDGGGPRGRELQALRHRS

SEQ ID NO: 118610 - protein, 1013 aa, Oryza sativa
  Clone ID: PAT_MRT4530_21904C.1.pep
MDWQWMYADRRSKEFIDGVHYFLRVAEANRHKGFICCPCNKCKNQKEYSTSRTIHFHLFESGFMPSYICWTSHGEQGVEMEEDEVENDNIPDFGQYAGFEGNQTGEEERDADGNDVANDLGQMLQDAKEDCESEKGAHKLDKMLEDHRTSLYPGCEQGHKNLDTTLEFLQWKAKNRVSDKAFGDLLKLVKNILPEGNKLPETTYEAKKIVCPLGLEVQKIHACPNDCILYRSEEYENLEACPVCKALRYKIRRDDPGEVDGQLTKKRIPAKVMSYFPIIPRIRRLFRNKGNARMMRWHAEERQQDGMLRHPADGPKQPGNDIDVYLRPLVEDLKLLWKKEGVPVWDEDKQEEFNIRALLFITINDWPALSNLSGQSNKGYKACTHCMDETESTYLKHCRKVVYMGHRRFLAAHHSVRKKGKHFEHKADHRTKPKHRNGKTMFAMVKDLKVVFGKGPGSQPIESEDGHAAMWKKNSIFWELPYWEFLDVRHAIDVMHLTKNLCVNLLGLLGVYGKSKDTLEARNNLKNMEQRGDLHPEPKEKGSHYLSPASYTLSKAEKESMFECLESIKVPSGYSTNIKRIISTKEKKFTNLKSHDCHVLMTQLLPVVIRGILPDNVRAIITKLCTFMNAISQKVIDPDRLETLQNDVVQCLISFELIFPPSFFNIMTHLLCHLVKEISILGPVYLHNMFPFERYMGILKKYVRNRAHPEASIAKGYGAEEVIEFCVEFIKDLRPIGVPESRHEGRLQGKGTLGRKAIMTVDNNLFRKAHSTVLQQSSLVAPYIEEHLALVRARNIGKSDAWITRHHIDTFPAWIRQHLMGNKSINQQLAFLARGPSGSIATFQGYEINGYTFYTRAQDMMSMNQNSAVRVNAMGHDGTTGTLTGGGIMIDDSGMTTVDLNKVGYSDEPFVLANDVTQVFFVKDMSSKGKKGRGPDEPKRHVVLPGKRKIIGVEDKTDEDYDQLDGQPPFTVTIDPSILLSNKDTPHSHSDHKEGTIVRRKYVRSTVTADVLP

SEQ ID NO: 118611 - protein, 120 aa, Oryza sativa
  Clone ID: PAT_MRT4530_21905C.1.pep
GQRRRRLRGGVAGGGAPLTVAPTNSGDGNSDGTARGGRVAAGGTNVRLQKSCIFTGLEKPDDPNLKVNALMVILMITPAQGGWGFVVRDTDGQVVEADAGMEAYRTALFYASEVGRGVLP

SEQ ID NO: 118612 - protein, 737 aa, Oryza sativa
  Clone ID: PAT_MRT4530_21906C.1.pep
MKTSDRAAPDDTYPNHMDRQWMYTDRRSKEFIDGMHYFLRVAEANRQRGFICCPCNKCKNQKEYSASRTIHFHFIESGFMPSYNCWTSHGEQGVKMEEDEVEDDNIPDFAQYVGFEENQTGEEEIAADGNDVADDLGQMLQDAREDCESEKEAHKLDKMLEDHRTSLYPGCEQGHKKLDTTLEFLQWKAKNRVSDKAFGDLLKLVKNILPGGNKLPETTYEAKKIVCPLGLEVHKIHACPIDCILYRGEEYENLEACPVCKALRYKIRRDDPGEVDGQLTKKRIPAKAPKHPGNDIDMYLRPLVEDLKQLWKKEANYLVRKKGKHFEHKADHRTKPKHRSGKTVFAMVKDLKVVFGKGPGSQPIESEDGHAAMWKKNSIFWELPYWEFLDVRHAIDMMHLTKNLCVNLLGFLGVYGKLKDTLEARNDLKHMEQRGDLHPEPKEKGSHYLSPASYTLSKAEKKKVIDPDILEALQNKVVQCLVSFELIFPPSFFNIMTHLLYHLVKEIRILGHVYLHNMFPFERYMGVLKKYVCNRARPEASIAKGYGTEEVIEFCIEFIEDLRPIGLLTSRSTWLNGYTFYTRAQDMKSTNQNSVVRVDAMGHDGTTGTYYDAIEDIWELDYGPLKVGYSDEPFVLANDVTQVFFVKDMSSKGKKGRGPNEPKRQVVIPGKRKIIGVEDKTDEDYDQLDGQPPFTVTIDPSILLSNEDTPYSRSDHKEGTIVRRKYVRSTVTADVMP

SEQ ID NO: 118613 - protein, 28 aa, Oryza sativa
  Clone ID: PAT_MRT4530_21907C.1.pep
LARSFVYIYSVCLIGFFRIYQGRVCFVN

SEQ ID NO: 118614 - protein, 140 aa, Oryza sativa
  unsure (1)..(140): unsure at all Xaa locations
  Clone ID: PAT_MRT4530_21908C.1.pep
VGPSGELRLAATAPPSSPGAATSWSPTSSAGAAAPPPRTGSAPPLSRRPGRRTASTRHAEASPSAPPPPPPTTRRRPSSRVPPASSAAVVARSXGTPPRRDPAAAAATATTTTTATTTACPHVAARTSTTPPPPPAACPA

SEQ ID NO: 118615 - protein, 424 aa, Oryza sativa
  unsure (1)..(424): unsure at all Xaa locations
  Clone ID: PAT_MRT4530_21909C.1.pep
MTTKFADLPRVVTSEKKEYPVDPSLPDIKNSIYASDEFRMYSFKIRPCSRAYSHDWTECPFVHPGENARRRDPRKYHYSCVPCPDFRKGVCRRGDXPSPRASATATMEMAAAMGLMPGSPSSVSAVMSPFTPPMSPSGNGMPPSLGWQQPNVPTLHLPGSSXQSSRLRTSLSARDMPADDYSLMQDIDSQLINDLCYSVLGGMFSPSHKAAFLNQFQQQQQALLSPINTVFSPKSVDNQQLPSHSSLLQASLGISSPGRMSPRCVESGSPMNSHLCAALAQREKQQQTMRSLSSRDLGPSAARASGVVGSPLSSSWSKWGSPSGTPDWGVNGEELGKLRRSSSFELRSGGDDPDLSWVHTLVKESPPEKQVTTAESINFVGPSPLMPPSVSNGEGPSLNAPLDGHDQAAVIGALLEQMQLDQHI

SEQ ID NO: 118616 - protein, 93 aa, Oryza sativa
  Clone ID: PAT_MRT4530_2190C.1.pep
KKFSLGPWIVLISCWQEPVAPTSPHLISNKPQLLSSTPRSPSSLPPGSPGPKKVCPLPSQGLSLSHRVKGHQAQFTNPSAVVRGRQSHRISFS

SEQ ID NO: 118617 - protein, 749 aa, Oryza sativa
  Clone ID: PAT_MRT4530_21910C.1.pep
MNGTPISASAAAGVDGVGAAVALAAATKKSAAAAAAVAEMAKTLTVDTDDAFAGLLELAADDDAEGLRRALERAPPAAADEAGLWYGRRKVLEHRTPLMVAATYGSLAVLRLLLSLPSVDVNRRCGSDGTTALHCAASGGSPSCVEAVKLLLAAGADADATDASGYRPADVISVPPKMFDAKIALQDLLGCPKAGHGVLRVVTRAANSMLSPVSSPTAEDARSPSAAVMMTTKFADLPRVVTSEKKEYPVDPSLPDIKNSIYASDEFRMYSFKIRPCSRAYSHDWTECPFVHPGENARRRDPRKYHYSCVPCPDFRKGVCRRGDMCEYAHGVFECWLHPAQYRTRLCKDGTSCNRRVCFFAHTTDELRPLYVSTGSAVPSPRASATATMEMAAAMGLMPGSPSSVSAVMSPFTPPMSPSGNGMPPSLGWQQPNVPTLHLPGSSLQSSRLRTSLSARDMPADDYSLMQDIDSQLINDLCYSRIGSSTGNHTSRTKSLNPSNLDDLFSAEMVSSPRYSNADQGGMFSPSHKAAFLNQFQQQQQALLSPINTVFSPKSVDNQQLPSHSSLLQASLGISSPGRMSPRCVESGSPMNSHLAAALAQREKQQQTMRSLSSRDLGPSAARASGVVGSPLSSSWSKWGSPSGTPDWGVNGEELGKLRRSSSFELRSGGDDPDLSWVHTLVKESPPEKQVTTAESINSVGPSPLMPPSVSNGEGPSLNAPLDGHDQAAVIGALLEQMQLDQHIGSLAT

SEQ ID NO: 118618 - protein, 673 aa, Oryza sativa
  Clone ID: PAT_MRT4530_21911C.1.pep
TLKGYLTICEEKGQMDGAAVSVATGVMGSLLAKLSALLGEERGLLKGVKGDIRFLRDELSTMNVFLMNMASVEENMDVQVKDWRNKVRELSYDIEDCIDLFMHKLNRGDDKVNIVLKMAKKIRMLWSRHQIANQIQELKARVKEESDRRLRYYFSECNAHVDGTKIDPRLPALYVEEEKLVGIHGPMEEIIELLMKEDGSGQKLKVVSIVGFGGLGKTTLANQVYNKIKDQFDCSAFISVSQSPNIKKILFDMLKDVTSRDNSDDDKQIKVVGVKGDKSDDERQLIGKLRVFLENKRYFIIVDDIWSASAWEHVRLALPENSLCSRIITTTRNVNVAKSCCSGFQGSVYNIQPLNEQDSKKLFLKRLFHSDSNFPTHLEEVSHAIIKKCHGFPLAIICLASLLASKSDTKDQWEQVHNSLSSAFSSQGMSDILLLSYYDLPYHLKTCLLYLSVFPEDYKIDRDELIWRWIAEGFITEVKGQTLDQVGGSYFNELINRNMIQPIDIKYDGTANACRVHDMVLNLIISISSEENFLTVVDEQGYKYLGNKIRRLSFQSNSVENDVNVVQKIMDNLSQLPDQFGNLHYLQTLDIRGSGIEKFPPTVVRLHNLARLLVGNKVQLPDGIGDLQSLQVLSSARLYKPLKLVEDLRRLTKLRTLEIVLHGSDTLGAHEMG

SEQ ID NO: 118619 - protein, 328 aa, Oryza sativa
  Clone ID: PAT_MRT4530_21912C.1.pep
MMGPNVSSEKKALAAAKRRAYVTFLAGDGDYWKGVVGLAKGLRRVRSAYPLVVAVLPDVPGEHRRKLVEQGCVVREIQPVYPPESQTQFAMAYYVINYSKLRIWEFVEYERMVYLDADIQVFDNIDHLFDLHKGAFYAVMDCFCEKTWSHTPQYDIGYCQQRPDKVAWPERELGPPPPLYFNAGMFVHEPGLGTAKDLLDALVVTPPTPFAEQDFLNMFFREQYKPIPNVYNLVLAMLWRHPENVDLDQVKVVHYCAAGSKPWRFTGKEENMNREDIKMLVKRWWDIYNDESLDYKEEEDNADEASQPMRTALAEAGAVKYFPAPSAA

SEQ ID NO: 118620 - protein, 191 aa, Oryza sativa
  Clone ID: PAT_MRT4530_21913C.1.pep
MAAPGACLASRSPPAFLAGGFLAARPAAVSPIPSRSGKSIAPSRRFIVSNKLAWVEDELVEITESQEPSSASSKKRPPLRRGKISPQLPVPEHIPRPSYVGSNRPQELSSVRQIHSAEGIAGMRAACKLAARALDFAGTLIKPSVTTNEIDREVHNMIIEAGAYPSQLGYGGFPKSICTSLNECVCHGVPD

SEQ ID NO: 118621 - protein, 107 aa, Oryza sativa
  unsure (1)..(107): unsure at all Xaa locations
  Clone ID: PAT_MRT4530_21914C.1.pep
MGKDKHHRDWILPRCCGCIADCILTLAILGGFIVXVIYLVIHPSKPSLYLQDVQLRNIDLFDPAIYLNLQATIVLRNPNDRVGVLXKTLHAVTTFXEEPITAPLELT

SEQ ID NO: 118622 - protein, 62 aa, Oryza sativa
  Clone ID: PAT_MRT4530_21915C.1.pep
RALSRPRDAADDTDQDGVLLVTIFLVVVAVGGCRVEQFGREGEAAREPVRASPACVQARPRH

SEQ ID NO: 118623 - protein, 121 aa, Oryza sativa
  Clone ID: PAT_MRT4530_21916C.1.pep
MVVASSSSTAAHKNYMIHHYHLVQDSCFMQDTEGVEEEVRGVCNAVLFVYAHNKNEIKGSSSGATGKLAAHTHFIEHILSVLDFLNVLYCDQTNKMKTVTCGICRHNYGRTGLAWIINGLH

SEQ ID NO: 118624 - protein, 67 aa, Oryza sativa
  Clone ID: PAT_MRT4530_21917C.1.pep
MPQAEVVAARAKTCEGCSMLVGCAVTGMQRARPCWHGRGSEADAGFSTRQGQVVWWTVPVRAVPSGV

SEQ ID NO: 118625 - protein, 107 aa, Oryza sativa
  unsure (1)..(107): unsure at all Xaa locations
  Clone ID: PAT_MRT4530_21918C.1.pep
ISCGNISSRCNVTFRLXPDRVRLHLIAFIGYRLSSQTNTCLFCTLCPHSCAPGKNFPVGHTSQIAPGQARLTLEFFGDWLPKKKLQLVDMSILLILLSPRPGCYTSL

SEQ ID NO: 118626 - protein, 158 aa, Oryza sativa
  Clone ID: PAT_MRT4530_2191C.1.pep
MAVRVTASTAPVHRRRTYSKLRSSRGSEGEEATGEGRRAARVPVSGHQLRGLPRRRFRLPLCNINSTIGAQTPPSRSTVHRLKTLVAYGWGEKGPRPLDDEMLALADDHPIDASHTLLVLSPLYPDSPRPSTTVAGQRHAVDVCPPRAIDTGPPHSFN

SEQ ID NO: 118627 - protein, 65 aa, Oryza sativa
  Clone ID: PAT_MRT4530_21920C.1.pep
MADEVGSGDVGEWGSKRRRKLGKRLGRGGQGGRKPIPRGLGARARAGGVGIRVTWGGNGGLAQLG

SEQ ID NO: 118628 - protein, 55 aa, Oryza sativa
  Clone ID: PAT_MRT4530_21921C.1.pep
APLFAGGRSTRWRGSIVLPRSPFYMFRSPGAAPILVLYDELRSLWNRGSYDLRHV

SEQ ID NO: 118629 - protein, 196 aa, Oryza sativa
  unsure (1)..(196): unsure at all Xaa locations
  Clone ID: PAT_MRT4530_21922C.1.pep
SYGEGGQKLYQQNLDIEVCREALLYSLKHRVALVAFSQDDCXPTLDDHPXVDFFHVMYHEPKAKIISDVDHFLSTIDIQKFVFLETPEVISSVLRPHWARRVDGKAQVVQAQGDVLEVVPLGTSKGNGVKILLESLCASPDEVMALGDGKNDKEMLQLAGLGVALCNGCEVTKVVADVIGASNDESGVAQAIYKYL

SEQ ID NO: 118630 - protein, 180 aa, Oryza sativa
  Clone ID: PAT_MRT4530_21923C.1.pep
MADPSKLQITPCGMLVQGNQINFTKLYLHHTPAGPEQNQSAVTSNDKKTGLGCIVVNNWSVYDGIGSDAKLVAYAKGLHVFAGAWHNSFSLVFEDERLKGSTLQVMGLIVEEGDWAIVGGTGQFAMATGVILKKMQEQKQYGNIIELTIHGFCPLLKGSQCPVTKIGPWGSSHEGTVQDI

SEQ ID NO: 118631 - protein, 232 aa, Oryza sativa
  Clone ID: PAT_MRT4530_21924C.1.pep
MDRKRIKDVLEKHLDRSSPSTSRGAAVAKERDRLAAAGGKLPAPLGKAGKVSDGAHVEPKKGHNCKLTVISVASGQRDMNVSLISLCIDMNVCGFSISEEFETDSEDSDVSGSEGEDTSWISWFCSLRGNEFFCEIDDDYIQDDFNLCGLSNQVPYYDYALDLILDIESSNGDVFTEEQNELIESSAEMLYGLIHARYILTSKGLAAMLEKFKNYDFGRCPRGNQIFLGLAQ

SEQ ID NO: 118632 - protein, 57 aa, Oryza sativa
  Clone ID: PAT_MRT4530_21925C.1.pep
KHIHCFRVLICVSPYDSTSVSYSVTLIYAVFSFFKRFRCFFSKLAIQPLYLFLFSMV

SEQ ID NO: 118633 - protein, 57 aa, Oryza sativa
  Clone ID: PAT_MRT4530_21926C.1.pep
HAEIKDSDGTNWSTKCCQTFNCEIITVDNISSNIIQIIIKFLRTNKKADSISPLLYH

SEQ ID NO: 118634 - protein, 106 aa, Oryza sativa
  Clone ID: PAT_MRT4530_21927C.1.pep
LSGYDPPPRKFKNYDFGRCPRVYCCGQPCLPAGQSDIPRSSTVKIYCPKCEDLHYPRSKYQGNIDGAYFGTTFPHLFLMTYPHLKPQKPSQQYVPKVFGFKLHKQS

SEQ ID NO: 118635 - protein, 104 aa, Oryza sativa
  Clone ID: PAT_MRT4530_21928C.1.pep
AAAVTEVLPIEEKQVANASSRKREVSMLFFGYRLVFYAIDRIFSKRNLSLSPPLLAYLRRRQDEWRLNKGGHGGDLHRSGGEGILVRLLSDSSLSLSPTPPGLE

SEQ ID NO: 118636 - protein, 56 aa, Oryza sativa
  Clone ID: PAT_MRT4530_21929C.1.pep
KGKEPAMGGAGNGGGKLGRRPWKVAGVGASVPGDLRRYSRGKLGAIEEEGMGIKTP

SEQ ID NO: 118637 - protein, 1039 aa, Oryza sativa
  Clone ID: PAT_MRT4530_2192C.1.pep
MTMRTDYKESNRTGDADEIVVEGFDEISRRVGSVDFGFINSGGCVGDEMRCPLPLPRGPFYIVGYLDPQGLMSPSPTWRPPDLRYKRDPPRGPKASNLKAYTTTTAYEVGDYKGQVAGSSYQRTPIPSISGLQVPTVDSGAPASTPAPSKESLLRQCCCGLKSAKSSSRFTPRCQSRAGPSMTGNENAVVVNPDDPMSKNSPAVAENGTSTSYEPEKVPSAAKPCPSDKYYEPTRTASEVTKSCSPIHKSRKHNLQACWVFLNVQAEIRACKERGIQRTSPTRDIYCPIHKTKNHDFSSCKIFLRAMKTTLPKGTYKRHAIEDDLHALTQNQGESLRDYVQRFNECRNTIPDITDASLIRAFKTGVRDRYTTQELATRRITTTRRLFEVVDRCAHGDDALRRKNDKPKAGGEKKPAKDTPEPSKKKSGKSGKRKAQAVVLASEYERPPKHPDPQGNDTKRIWCPIHKSDRHSLKECLIFKKSLERQLALEKGKRGTASKMKWSEQKIEFSDEDHPKAAVIPGRYPIVVEPTIWNVKVARVLVDGGNSINLLFASTLDAMGIPRGELTPTDQPFHGITPQSSSKPLGKITLPMTFSQASNFRTEQITFDVAEFDTAYNAIIGKTALAKFMAASHYAYQVLHPEWLTNLVMVRKANGKWRMCVDFTDLNNACPKDHFPLPRIDQLVDSAAGCKLSSFLDACSGYHQISMAKKDEEKTAFITPFGVFCYVKMPFGLITAGNTFQRTVQGALSDQLGNNVEAYVDDIVVKTKTDDSLIDDLRETFDNLIRYRLMLNPEKCTFGVPSGKLLGFLVSGRGIEANPEKIKAIENMKSLTRLKEETGEAFIALKRYLSNPPVLVAPQPNEELFLYIAATPYSVSTVIVVEREKVQRPVYYVSEALHDVKTRYPQIQKLLYAVIMTSRKLRHYFQAHRITVVSAFPLGKVVRNKDVVGRIAKWVVELSQFDVHFVPRTAIKSHVLADFVADWTMPENSQGASEGFILTSPSGDQFKHAIHLNFRATNNTAEYEGLLARMIAAAALGVK

SEQ ID NO: 118638 - protein, 318 aa, Oryza sativa
  Clone ID: PAT_MRT4530_21930C.1.pep
MEEQKHTDKAKAKLSMLKSKVICCKLYISESQNAKVVDAITRIGQKDPEVVLLSKFEDDHYNRVRYTLASYIINENSTGEVKFSPMRRVLLEMIEKAFSTINLETHTGTHPRIGVIDDMSFHPLNQATMEDAAQLAKTVASDIGNFLQVPVFLYGAAHPTGKPVTAVRRELGYFQPNYMGIQWMGQVLPDILPVKPDEGPDHVSRERGAIMIGAAPLPLNYNVPVLSKDIPTIRRITRRVTGRGGGLPTVQALALSHGDDCTEIACFLDPDHVSADQVQQQVEQIAAEQGLEVEKGYFTDFSKDAMLEKYFKIVLSVD

SEQ ID NO: 118639 - protein, 95 aa, Oryza sativa
  unsure (1)..(95): unsure at all Xaa locations
  Clone ID: PAT_MRT4530_21931C.1.pep
NTPLRMKEXVVALMPFQQKVMXRGCVKDIATKIHHKALRKXISVTILLSPIVCTYYYSMDYIEQETLSHRYLYVQYVEIATIFVIFMIHCHSPMI

SEQ ID NO: 118640 - protein, 54 aa, Oryza sativa
  Clone ID: PAT_MRT4530_21932C.1.pep
SFFGALPTDVLANAYRMSKEEAQRLKHNRGDEFGAFTPLQGKSSQAVYNGAESS

SEQ ID NO: 118641 - protein, 59 aa, Oryza sativa
  Clone ID: PAT_MRT4530_21933C.1.pep
DTVSVCSLSADTVSTRFKPELPSCAMSLFTITHVFNAIAVSPGLQLYSIIMSSSLTHPA

SEQ ID NO: 118642 - protein, 205 aa, Oryza sativa
  Clone ID: PAT_MRT4530_21934C.1.pep
HEGESIRSILPKNNKGGRIIVTTRFQAVGSTCSPLETDRLHTVDFLTDDESQNLFNTSICESKIRKDSNKVDEQVPEEIWKICGGLPLAIVTMAGLVACNPRKACCDWSKLCKSLFPEQETPLTLDGVTRILDCCYNDLPADLKTCLLYLSIFPKGWKISRKRLSRRWIAEGFANEKQGLTQERVAEAYFNQLTRRNLVRPMEHG

SEQ ID NO: 118643 - protein, 131 aa, Oryza sativa
  unsure (1)..(131): unsure at all Xaa locations
  Clone ID: PAT_MRT4530_21935C.1.pep
XXRXXDXKSTNQNSVVRIDAIGHDGTTGMYYGAIEDIWELDYRPLKVSLFRCQWVRLTGGGVTIDGSKRKIVEVEDKTDEDYDQFDGQPPFTVTIDPSILLSNEDTPYSPSDHKEETIVRRNYVWSTVTAN

SEQ ID NO: 118644 - protein, 91 aa, Oryza sativa
  Clone ID: PAT_MRT4530_21936C.1.pep
TSGTASATATAASSAITTAAAADEAFSLLTGSPEDDARTKTASRAAAGEAAFIGAAGDETRARGLPSPPATDREAATAVAVAAMDRPRCLL

SEQ ID NO: 118645 - protein, 703 aa, Oryza sativa
  unsure (1)..(703): unsure at all Xaa locations
  Clone ID: PAT_MRT4530_21937C.1.pep
MDRQWMYADRWSKEFIDGVHYFLRVAEANRQRGFICCPCNKCKNQKEYSASRTIHFHLFESGFMPSYNFWTSHGEQGVEMEEDEVEDDNIPDFAQYVGFEGNQTGEEERDADGNDVADDLGQMLQDTKEDCESEKGAHKLDKMLEDHRTSLYPGCEQGHKKLDATLEFLQWKAKNGVSDKAFGDLLKLVKNILPEGNKLPETTYEAKKIVCPLGLEVQKIHACPNDCILYRGEEYENLEACPVCKALRYKIRRDDPGEVDGQLTKKRIPAKVMWYFPIIPRIRRLFRNKGNARMMRWHAEERQQDVMLRHPADGSQWRNIDRKFKEFGKDARNIRFGPKQPDNDIDVYLRPLVEDLKLLWKKEGVPVWDKDKQEEFNIRALLFVTINDWPALSNLSGQSNKGYKACTHCMDETESTYLKHCRKVVYMGHRRFLAANHPVRKKVKHFEHKADHRTKPKHRNGKTVFAMVKDLKVVFGKGPGSQPIESEDGHAAMWKKNSIFWELPYWEFLDVRHAIDVMHLTKNLCVNLLSFLGVYGKSKDTLEARNDLKHMEQRGDFHPEPKEKGSHYLSPASYTLSKAEKESMFEYLESIKVPSGYSTNIKRIISTKEKKFTNLKSHDCHVLMTQLLPVVIRGILPDNVWATITKLCAFMNAISQKVIDPDRLEALQNEVVQCLVSFELIFPXPSFFNIMAHLLCHLVKKKK

SEQ ID NO: 118646 - protein, 1013 aa, Oryza sativa
  unsure (1)..(1013): unsure at all Xaa locations
  Clone ID: PAT_MRT4530_21938C.1.pep
MEENEVEDDNIPDFAQYVGFEGNKTGEEEIAADGNDVADDLGQMLQDAREDSESEKEAHKLDKMLEDHRTSLYPGCEQGHKSDKAFGDLLKLVKNILLGGNKLPETTFDAKKIVCPLGLEVHKIHACPNDCILYRGEEYENLEACPVCKALRYKIRRDDPGEVDGQLTKKRIPAKVMWYFPIIPWLRRLFRNKGNARMMRWHAEERQQDGMLRHPADGSQWRNIDRKFKYFGKDARNIRFGLSTDGINPFGEMSSGHSTRPVTMCIYNLPXLCMKRKYIMMPIIIQGPKQPGNDIDVYLRPLVEDFKLLWKKEGVPMWDEDKQEEFNLQALLFVTINDWPALSNLSGQSNKGYKACTHCMYETESTYLKHCRKVVYMGHRRFLAANYPVXKKGKHFEYKADHRTKPKHRSGKTVFAMVKDLKVVFGKGPGSQPIESEDGHAAIWKKNSIFWELPYWEFLDVRHAIGVMHLTKNLCVNLLGFLGVYGKSKDTLEARNDLKHMEQRVDLHPEPKEKGSHYLSPASYTLSKAEKESMFECLESIKVPSGYSTNIKRIISTKEKKFTNLKSHDCHVLMTQLLPVVIRGILPDNVRATITKLCAYMNAISQKVIDPDRLEALQNDVVQCVVSFELIFPPSFFNIMTHLLCHLVKEISIFGPVFLHNMFPFERYMGVLKKYVRNRARPEASIAKGYGTEEVIEFCVEFIEDLRPIEVPESRHEGRLRGKGTLGRKAIMTVDNNLFRKAHFTVLQQSSLVTPYIEEHLALVRARNIGKSDAWITRHHIDTFPAWLRQHLMGNESINQQLAFLARGPSGSIATFQGYKINGYTFYTRAQDMKSTNQNSAVRVDAMGHNXTTDTYYGAIEDIWELDYDPLKVHLFRCQWVRLTGEGVMINDSGMTTVDLNKVGYSDEPFVLANDVTQVFYVKDMSSKGKKGRGPDEPKRHVVLPGKRKIGGVEDKTDGDYDQLDGTTPFTMTIDPSILLSNEDTPYSRSDHKEGTIVRRKYVRSTVTADVLP

SEQ ID NO: 118647 - protein, 991 aa, Oryza sativa
  unsure (1)..(991): unsure at all Xaa locations
  Clone ID: PAT_MRT4530_21939C.1.pep
MEEDEVEDDNIPDFSQYVGFEGNQTGEEEIAADGNDVADDLGQMLQDAREDCESEKEAHKLDKMLEDHRTSLYPGCEQGHKKLDTTLEFLQWKAKNGVSDKAFGDLLKLVKNILPRETNCPRQREVDGQLSKKRIHAKVMWYFPIIPWLRRLFRNKGNARMLRWHAEERQQDGMLRHPADGSQWRNIDRKFKEFGKDARNIRFGLSTDSMNPFGEMSNGHSTWPVTMCIYNLPPXCMKRKYVMMPIIIQGPXQPGNDIDVYLRPLVKDLKQLWKKEGVPVWDEDKQEEFNLRALLFVTINDWPALSNLSGQSNKGYKACTHCMDETESTYLKHYRKVVYMGHRRFLAANHPVRKKGKHFEHKADHRTKPKHRSGKTMFDMVKDLKVVFEKGPGSQPIESEYGHAAMWKKNSIFWELPYWEFLDVRHAIDVMHLTKNLCVNFLGFLGVYGKSKDTLEADSRGFTGACVAVAQACNDLKHMEQRGDLHPEPKEKGSHYLSPASYTLSKAEKESMFECLESIKVPSGYSTNIKRIISTKEKKFTNLKSHDCHVLMTQLLPVVIRGILSDNVRATITKLCAFLNAISQKVIDPDRLEALQNEVVQCLVSFELIFPPSFFNIMTHLLCHLVKEISILEPVYLHNMFPFERYMGVLKKYVCNRARPEASIAKGYGTEKVIEFYVEFIEDLRPIGVPESRHEGRLRGKGTLGRKAIMTVDNNLFRKAHFTVLHHSSLVAPYIEEHLALVRARNIGKSDAWITRHHIDTFPTWLRKHLMGNESINQQLAFQERGPSGSIATFQGYEINGYTFYMRAQDMKSTNQNSAVRVNAMGHDGTTATYYGAIEDIWELDYGPLKVPLFRCQWVRLTGGGVMIDDSGITTVDLNKVGYSDEPFVLTNDVTQVFFVKDMSSKGKKGRGPDEPKRQVVLPGKRKIVGVKDKTDEDYDQLDGQPPFTVTIDPSILLSNEDTPYSRSDHKEGTIVRRKYMRSTVTADVMP

SEQ ID NO: 118648 - protein, 1742 aa, Oryza sativa
  unsure (1)..(1742): unsure at all Xaa locations
  Clone ID: PAT_MRT4530_2193C.1.pep
SNQLDYDLVDPRTSVPQYPLYPVYGYPPSTVACQVGGLGAQDSTTMTSSFIDNIINTGPIQGVPTSTMLLWTQVGEIVFPVYTTVPISADPSMTDPMSKDPPAVAENGTSTSYEPEKVPSAAKPCPSDKNREPTRTTSEVTKFWCPIHKSRKYNLQACWVFLNVQAEIRACKEHGIQRTSLTRDVYCPIHKTKNHDFLSCKVFLRAMKTTLPKVQQSGTSLKDTDKEQGATLTSDRFIGVIDIDPHEPSVLHLLEDYGSSSDSTPRDVFAIDGTSTSAHANAEAENQTVTPAQHLGTVNAILREAPYDPVLNDDLARWTERLRESVANLSNAFEEAATRAQPERPTTDGADGEPPEQRTSPRRATPPPRGTSDLCDHLNGRREARRARDNENRSRHRVSSRHRENEERGGRSNEDQHHHNRHNRRDHDNREQRTPDDAGRGRQHDGDDNGDRRQDNNGGRRQNSREPERRPRNRTPEPSESSSSSSSSSSDRHRRRTHDRRQPTAPSAGCRAFNRSLRDVRWPKRFXPGAIEKYDGSTDPEEFLQVYSTNPGESLRDYVRRFNECRNTVPDITDTSVIRAFKTGVRDRYTTQELATRRITTTRRLFEVVDRCAHADNALRRKNDKPKARGEKKPAKDAPKSSKKKSGKSRKRKAQPEVLASEYERPPKHPNPQGSDTKRIWCPIHKSDRHSLEECLIFKKSLEKQLALEKGKRVRVVEKATEATTQDSDSAYLDSDLHVSHIFGGSTAYSSRVAPKMKWSEQKIEFSDEDRPKATVIPGRYPIVVEPTIRNNKVVRVLVDGGSSINLLFASTLDAMGIPQSVLTPTDQPFHGITQFSSKPLGKITLPVTFRQASNLRTQQITFDVAEFDTAYNAIIGRTALAKFMAASHYAYQVLKMPGPKGTITIQGNAKLAVQCDKRSLDMVEHTPSPPATAEPPKKPSDMPGVPREVIEHKLMVRPDAKPVKXKLRRFAPDRKQAIREELDKLLKAGFIREVLHPEWLANPVMVRKANGKXRMCINFTDLNKACPKDHFPLPRINQLVDSTAGCMAKEDEKKTTFITPFGVFCYVKMPFGLITAGNTFQRTIQGALSDQLGNNVEAYVDDIVVKTKTGDSFIDDLRETFDNLRRYRLMLNPKKCTFGVPLGKLLGFLVSGRGIEANPEKINAIENMKSPTRLKEVQKLTRCMAALSRFVARMGERGQHFFALLKKQDKFVWTQAAEEAFIALKRYLSNPPVHVAPQPNEELFLYIAATPYSVSTVIVVEREKVQRPVYYVSEALHDAKTRYPQIQKLLYTVIMTSRKLRHYFQANRVIVISAIPLGEVVRNKDVVVRIAKWVVELSQFDVHFVPRTAIKSQVLDSQTDNETWTMAFDGVLNSQGASAGFILTSPSGDQFKHAIHLNFRATNNTAEYEGLLVGIRAAAALGVKRLIVKGDSELVANQVHKDYKCSXPELSKYLAEVRKLEKRFDGIEVRHVYHKNNIESDDLARRASRREPLEPSTFLDILTKPSVKEANDEGSDELPEDDAEAEKITRQAKIYCMIGNDLYKKAPNGVLLKCVSSDDGKHLLLDIHKGVCGSHAVGRTLVGKAFRQGFFWPTALKDACDMVQRCEGCQFHSKHTKLPAQALQTIPLTWPFSCWGLDILGPFLRGQGSYKFLFVAIDKFNKXIEATSTGEIKADNAIKFIKGIFCRYGLAHRIITDNGSQFISADFQDYYVGLGVNVTPGISIQNSKRLHQIVITQGIKE

SEQ ID NO: 118649 - protein, 354 aa, Oryza sativa
  Clone ID: PAT_MRT4530_21940C.1.pep
MAKEAFVNGFLSVFMHVGLTLVLLVYLPIAFACRALGRLLVRPFVSGEDLRGKVVLVTGASSGIGEHLVYEYAKKGACVALTARTEIALRAVAKTARDLGAPDVLVVPADITKVDDAKRAVEETVAHFGKLNHLVANAGIWSSCFFEEITNITAFHNVIDLNFWGAVYPTYFALPYLKASRGNIVVTSSVAGRVPTARMSFYNASKGAVIRFYETLRAELGSHVRVTILTPGYVVSNLTMGKGIQKDGHVGIDEEARDINVGPLPVGKTETLAKVVVAAVRRGDYYVTWPGWYWPFHMVMCTAPELVDWFSRTFYVSKSSDHDGDALSKKILEAVGGKKFLYPKTIRSHAIAAS

SEQ ID NO: 118650 - protein, 919 aa, Oryza sativa
  unsure (1)..(919): unsure at all Xaa locations
  Clone ID: PAT_MRT4530_21941C.1.pep
EVEDDNIPDFAQYVRFEGNQTGEEEXMLMDTKEDCESAKGAHKLDKMLEDHRTSLYPGCEQGHKKLDTTLEFLQWKAKNGVSDKAFGDLLKLVKNILPKGNKLPETTYKAKKIVCPLGLEVQKIHACPNDCILYCGEEYENLEACPVCKALRYKIRRDDPGEVDGQLTMKRIPAKVIWYFPIIPRLRRLFRNKGNARMMRWHAEERQQDGMLRHPADGSQWRNIDRKFKXKFGKDARNIRFEEVHNDADXIQGPKQPGNDIDVYLRPLVEDLKLLWKKDGVLVWDEDKQEEFNIRALLFVTINDWPALSNLSGQSNKGYKACTHCMDETESTYLKHCRKVVYMGHRRFLAANHPVRKKGKHFEHKADHRTKPKHRSGKTVFAMVKDLKVVFGKGPGSQPIESEDGHAVMWKKNSIFWELPYWKFLDVHHAIDVMHLTKNLCVNLLGFLGVYGKSKDTLEARNDLKHMEQRGDLYPEPKEKGSHYLSPASYTLSKAEKESMFECLESIKVPSGYSTNIKRIISTKEKKFTNLKSHDCHVLMTQLLPVVISGILPDNVRATITKLCAFMNAISQKVINPDRLEALQNDVVQCLVSFELIFPPSFFNIMTHLLCHLMKEISILGPVYLHNMFPFERYMGVLKKYVRNRARPETSIAKGYGTEEVIEFCVEFIEDLRPIGVPESRHEGRLRGKGTLGRKAIMTVNNNLFRKDHFTVLQQSSLVAPYIEEHMALVRARNIAQDMKSMNQNSVVRDDAMGHDGTTSTYYGAIEDIWELDYGPLKVPLFRCQWVRLTGGGVMIDDSGMTTVDLNKVGYSDEPFVLANDVTKVFFVKDMSSKGKKSRGPDEPKRHVVLPGKRKIVGVEDKTDEDYDQLDGQPPFTVTIDPSILLSNEDTPYSCSDHKEGTIVRRKYVRSTVTADVLP

SEQ ID NO: 118651 - protein, 1110 aa, Oryza sativa
  unsure (1)..(1110): unsure at all Xaa locations
  Clone ID: PAT_MRT4530_21942C.1.pep
MDRQWMYADRRSKEFIDGVHYFLRVAEANRQKGFICCPCNKCKNQKEYSASRTIHFYLFESEFMPSYNCWTSHGEQGVEIEEDEVEDDNIPDFAQYVGFEGNQTGEEERDADGNDVADDLGQMLQDAKEECESEKGAHKLDKMLEDHRTSLYPGCEQGHKKLDITLEFLQWKAKNGVSDKAFGDLLKLIKNILPKGNKLPETMYEAKKIVCPLGLEVQKIHACPNDCILYRGEEXENLEACPICKALRYKIRRDDPGEVDGQLTKKRIPAKVMWYFPIIPRLRRLFRNKRNARMMRWHAEERQQDGMLRHPADGSQWRNIDRKFKDFGKDARNIQFSLSTDVINPFREMSSGHSTWPVTMCIYNXPPWLCMKRKYIMMPIIIQGPKQPGNDIDVYLRPLVEDLKLLWKKEGVPVCDKDKQEEFNLRALLFVTINDWPALSNLSGXSNKGYKGCTHCMDETESTYLKHCRKVVYMGHRRFLAANHPVWKKGKHFEHKADHRTKPKHRSGKTVFAMVKDLKVVFGKGPGSQPIESEDGHAAMWKKNSIFWELPYWEFLDVRHAIDVMHLTKNLCVNLLGFLGVYGKSKDTLEARNDLKHMEQRGDLHPEPKEKGSHYLSPASYTLSKAEKESIFECLESIKVPSGYSTNIKRIISTKEKKFTNLKSHNCHVLMTQLLPVVIRGIHPDNVWATITKLCAFMNAILXKVIDPDRLEALQNDVVXCLVSFELIFPPSFFNIMTHLLCHLVKEISILGPMYLHNMFPFERYMGVLKKYVRNHARPEASIAKGYGTEEVIEFCVEFIEDLRPIGVPESRHEGRLRGKGTLGRKAIMTVHNNLFRKAHFTVLQQSSLVAPYIEEHLALVRARNIGKSDAWITRHHIDTFPAWVRQHLMGNESINQQLALLARGPSGSIATFQGYEINGYTFYTRAQDMKSTNQNSAVRVDAMAHDRTTGTYYGAIEDIWELDYGPLKVPLFRCQWVRLTSGGVMIDDSGMTTVDLNKVGYSDESFVLANDVTQVFYVKDMSSKGKKGRGPDEPKRHVVLPGKRKIVGVEDKTDEDYDQLDGQPPFMVTIDPSILLSNEDTPYSRSDHKEGTIVRRKYVRSTVTADVLP

SEQ ID NO: 118652 - protein, 61 aa, Oryza sativa
  Clone ID: PAT_MRT4530_21943C.1.pep
ALVERPSFFFFFDKLNKPMGETRAERAKIHSFIQLDKANETSFIVGIKNTDWATTHLTQGR

SEQ ID NO: 118653 - protein, 880 aa, Oryza sativa
  unsure (1)..(880): unsure at all Xaa locations
  Clone ID: PAT_MRT4530_21944C.1.pep
MKTSDRAAPDDTYPNHMDRQWMYTDRRSKEFIDGMHYFLRVAEANRQRGFICCPCNKCKNQKEYSASRTIHFHFIESGFMPSYNCWTSHGEQGVKMEEDEVEDDNIPDFAQYVGFEENQTGEEEIAADGNDVADDLGQMLQDAREDCESEKEAHKLDKMLEDHRTSLYPGCEQGHKKLDTTLEFLQWKAKNRVSDKAFGDLLKLVKNILPGGNKLPETTYEAKKIVCPLGLEVHKIHACPIDCILYRGEEYENLEACPVCKALRYKIRRDDPGEVDGQLTKKRIPAKRKYIIMPIIIQGPKQPGNDIDMYLRPLVEDLKQLWKKEANYLVRKKGKHFEHKADHRTKPKHRSGKTVFAMVKDLKVVFGKGPGSQPIESEDGHAAMWKKNSIFWELPYWEFLDVRHAIDVMHLTKNLCVNLLGFLGVYGKLKDTLEARNDLKHMEQRGDLHPEPKKKGSHYLSPASYTLSKAEKEIIIRGILPDNVRATITKLCAFMNAISQKVIDPDRLEALQNEVVQCLVSFELIFPPSFFNIMTHLLCHLVKEIRILGPVYLHNMFPFKRYMGVLKKYVHNRARPEASIAKGYGTEEVIEFYVEFIEDLHPIGIPESRHEGRLRGKGTLGRKAIMTVDNNLFRKAHFTILQHSSLVASYIEEHLALVRARNIXINQQLAFLARGPSGSIATFXGYEINGYTFYTRAQDMKSTNQNSAVRVDAMGHDGTTATYYGAIEDIWELEYGPLKVPLVRCQLVRLTGGGVMMDDSGMTTVDLNKVGYSGEPFVLANDVTQVFFVKDMSSKGKKGRGPDEPKRQVVLPGKRKIVGVKDKTDEDYDQLDGQPPFTVTIDPSMLLSNEDTPYSRSDHKEGTIVRRKYVRSTVTADVMP

SEQ ID NO: 118654 - protein, 116 aa, Oryza sativa
  unsure (1)..(116): unsure at all Xaa locations
  Clone ID: PAT_MRT4530_21945C.1.pep
RSPLSSPPPTPPPSTRTPPLPDPSAEMDALSAQSAWALALAGVGLMVAATDXARLERWLYAAFLRPGSPAPRYGSGGRTAPRRIAALGRRAPMSWLGEPQWRSEKEDSGDLYPQLA

SEQ ID NO: 118655 - protein, 72 aa, Oryza sativa
  Clone ID: PAT_MRT4530_21946C.1.pep
PYRNLGYKFLPSRTNMTRAARNLPEWSFLKRRPLDFPERSILIRRPLVGTDLPNTFIPNLGFLKTQRLNPPS

SEQ ID NO: 118656 - protein, 484 aa, Oryza sativa
  unsure (1)..(484): unsure at all Xaa locations
  Clone ID: PAT_MRT4530_21947C.1.pep
VDSRGSPIIPRLRHLFRNKGNARMMRWHTEERQQDGMLRHLADGSQWRNIDRKFKDFGKDARNIRFGLSTNGMNPFREMSSGHSTWPITMCIYNLLPWLCMKRKYIMMPIIIQGPKQPSNDIDVYLRPLVEDLKLLWKKEANHPVRKKGKHIEHKADHRTKPKHRSGKTVFAVVKDLKVVFGKGPGSQPIESEDGHAAMWKKNSIFWELPYREFLDVRHAIDVMHLTKNLCVNLLGFLGVYGKSKDTLEARNDLKRMEQRGDLHPEPKEKGSHYLSPASYTLSKAEKESMFECLESINVPSGYSTNINRIISTKEKKFTNLKSYDCHVLMTQLLPVVIRGILXPDNVRATITKLCAFMNAISQKXISILGPVYLHNMFSFERYMGVLKKYVRNHARPEASIAKGYGTEEVIEFRVEFIEDLRPIGVPESRHEGRLRGKGTLGRKAIMTIDNNLFRKAHFTFLQQSSLVAPYIKEHLALVHARKH

SEQ ID NO: 118657 - protein, 129 aa, Oryza sativa
  Clone ID: PAT_MRT4530_21948C.1.pep
MALQWMILACVVAAEAAVAVMLTLPAPRAVRKQIVGLTSMLLQPFAGILPFAAFQLLDIYWKNEHRLMCTSEICTADERIRFEKSIFKAQRNVILCVSACLLYWCIFRICKYNKDIKALEETEKRLKEE

SEQ ID NO: 118658 - protein, 1049 aa, Oryza sativa
  Clone ID: PAT_MRT4530_21949C.1.pep
MEFGFPANSKMDRQWMYANRRSKEFIDGVHYFLRVAEANRQRGFICCPCNKCKNQKEYSASRTIHFHLFESGFMPSYNCWTSHGEQGVEMEEDEVEDDNIPDFAQYVGFEGNQTGEEEIAADGNDVADDLGQMLQDAREDCESEKEAHKLDKMLEDHRTSLYPGCEQGHKKLDTTLELLQWKAKNGVSDKAFGDLLKLVKNILPGETNCPRQRLEVHKIHACPNDCILYRGEEYENLEACPVCKALRYKIRRDDPGEVDGQLTKKRIPAKVMWYFPIIPRLRRLFRNKGNARMLRWHAEERQQDGMLRHPADGSQWRNIDRKFKEFGKDARNIRFGLSTDGMNPFGEMSSGHSTWPVTMCIYNLPPWLCMKRKYIMMPIIIQGPKQPGNDIDVYLRPLVEDLKQLWKKEGVPVWDEDKQEKFNLRALLFVTINDWPALSNLSGQSNKGYKACTHCMDETKSTYLKHCRKVVYMGHRRFLAANHPVRKKGKHFERKADHRTKPKHHSGKTVFAMVKDLKVVFGKGPGSQHIESEDGHAAMWKKNSIFWELPYWEFLDVRHAIDVMHLTKNLCVNLLGFLGVYGKSKDTLEARNDLKHMEQRGDLHPEPKEKGSHYSSPASYTLSKAEKESMFECLESIKVPSGYSTNIKRIISTKEKKFTNLKSHDCHVLMTQLLPVVIRGILPDNVRATITKLCAFMNAISQKVIDPDRLEALQNEVVQCLVSFKLIFPPSFFNIMTHLLCHLVKEIRILGPMYLHNMFPFERYMGVLKKYVRNRACPEASIAKGYGTEEVIEFCVEFIEDLRPIGVPESRHEGRLREKGTLGRKAIMTVDNNLFRKAHFTVLKHSSLVAPYIEEHLALVHARNIAQDMKSTNQNSVVRIDAMGHDGTTGTYYGAIEDIWELDYGPLKVPLFRCQWVRLTGGGVMIDDSGMTTVDLNKVGYSDEPFVLANNVTQVFYVKEMSSKGKKGRGPDEPKRHVVLSGKRKIVGVEDKTDEDYDQFDGQPPFMVTIDPSILLSNEDTPYSRSDHKEGTIVRRKYVRSTVTADVLS

SEQ ID NO: 118659 - protein, 53 aa, Oryza sativa
  Clone ID: PAT_MRT4530_2194C.1.pep
SGSLPFTSPLCIVIESLAPAVITATIMSGLSPNALSVVPVVLSSRHPERHLSL

SEQ ID NO: 118660 - protein, 932 aa, Oryza sativa
  Clone ID: PAT_MRT4530_21950C.1.pep
MAVAIFYLLHKKNEIHGYTAFTIYVVLTYCFLDFLMPCVAAVGAALGMELEPQFDRPYLSASLLDFSGRRWNLMASAMLRPAVYDRVRARLGAPGGVLSTFLVSGLMHEVIAYYISFRAPTGQMDRQWMYADRRSKEFIEGVHYLLRVAEANKRNGFICCPCNKCKNQKEYSASRIIHFHLFESGFMPSYNCWTSHGEEGVEMEEDEAEDENIPDWAQYAGFEGNQTGEVDRDAGDNDTADDLGQMLQDAKEDCESEKEAHKLERMLEDHRTSLSPGCERGHKKLDTTLEFLQWKAKNGVSDKAFRDLLKLIKNILPEGNKLPETTYEAKKIVCPLGLEVQKIHACPNDCILYHGEEYENLEACPVCKALRYKIRREDPGEVDGQPTKKRIPAKEGVPEWDEDKQEEFNLRALLFVTINDWPAFSNLSGQSNKGYKACTHCMDETESTYLKHYRKEFLDVCHAIDVMHLTKNLCVNLLGFLGVYGKSKDTLEARNDLKHMEQRSDLHPEPKEKGSHYLSPASYTLSKAEKESMFECLESIEVPSGYSTNIKRIISTKEKKFTNLKSPDCHVLMTQLLPVVIRGILPDNVRATITKLCAFMKANLQKVIDPDRLEALQNDVVQCLVSFELIFPPSFFNIMTHLLCHLVKEIGILGPVYLHNMFPFERYIGVLKKYVRNRARPEASIAKGYGTEEVIELCVEFIEDLRPIGVPESCHEGRLRGKVVLGRKARMTVDNNLFRKAHFTVLQQSSLVAPYIEEHLALVRARNIAKDMKSTNQNSVVRIDAMGHDGTTGTYYGAIEDIWEVDYGPLKEQTDWHTRISSRFGPAQELSRSPRPTRKGALVQKYKIKVVPDDPGTSSSKDDEGKQAPDGSAQPSDKGSTDGFPANQGDNLQGVHGVQGDGSQGVQGDGVQGGGVNQDGNAAQLQFNNFQD

SEQ ID NO: 118661 - protein, 89 aa, Oryza sativa
  unsure (1)..(89): unsure at all Xaa locations
  Clone ID: PAT_MRT4530_21951C.1.pep
MPPVVMNSLVKAALHRVVGALRRGGIRRRQRXGGICEWQHWHEETEADSWRGTELRNGGKAALDDGRHRWRRPRGKDVAAMTSQLEVMA

SEQ ID NO: 118662 - protein, 89 aa, Oryza sativa
  Clone ID: PAT_MRT4530_21952C.1.pep
MSPQKFLISCWPSQSSPRQLSILVLLFNPCRIAFPSDGNATLAYVLLLTLKLQLNSCAFCSQSVSVHVLKKKKKKKKKKKNKKKKKTPK

SEQ ID NO: 118663 - protein, 47 aa, Oryza sativa
  Clone ID: PAT_MRT4530_21953C.1.pep
MAGVPLATIAVLDDLSMRIYELQRRKGQGSQWVGPPMERGNCVRVVA

SEQ ID NO: 118664 - protein, 108 aa, Oryza sativa
  Clone ID: PAT_MRT4530_21954C.1.pep
MAKSVTSGGRHRGVTGAASLSTAARPFPALGDGTRRRREGRESHREAAGAARFVVVAFLFILSSPCARCGLVRVGVGVGGGDGGEIARKTTTGVGDGKERREAYVDVN

SEQ ID NO: 118665 - protein, 70 aa, Oryza sativa
  unsure (1)..(70): unsure at all Xaa locations
  Clone ID: PAT_MRT4530_21955C.1.pep
MAQGEDIRVLHFYLVFVSKFHKLAKEVGQDGSPRHTNPEKERSSRQWKVAGWPLSVPQQXGFGGFRLKEN

SEQ ID NO: 118666 - protein, 795 aa, Oryza sativa
  Clone ID: PAT_MRT4530_21956C.1.pep
MIEGRRHSVDIPISRALLAVMRSRSLRDPETNSLAKFSAKKTIWEGCSLEEDDLEGSNYGRHSFSYNMYDHLQRRREEFGDSARSGRLVNSPINIIKANARVKAALHNQTCSSVISGMSRATKDRASSLMIEGEQLGRREGATFQESARSLLQKYRPKAFSELAGQNVVAQSLSSAVLKGKLAPIYLFHGPHGIGKTSAARIFAASLNCHSSGGNQPCGHCEECMAIFSGNSSSVIEIDASKLDCKSRVAALLRNACEVPASSHFKVLIVDDCQHMDKEGWYSVYSSLEGIPDSSIFVMITSDIDKLPSNSVGWCQSYRFCKVDEAEIALRLSRICINEGMEFEAEALELIARKANGSIRDAVQMLDQLTLLGKRISKSVTYDLIGDVSDEELLDLLNLAFSSDAATIVRRARELLSSKVDPLQLLAQLANLIMDILAGRHQSDSQEVRKVTAAEIDVHKLRNALEILSETEKQLKTTKNQSTWLTAALLQFNMREPYCLDDAAVSSMFTESQTDDGAAILKDESLDTSSHLCYQNKIGCLDMNLGDPDVLETIWIKALENCTSKPLHSLLRKDGKLSSLYTTQGVAVAELQFCHPEDVPTTESFWNPFVVSLQNLLKCNVDIRINLSPISTSNRVVSKNSSVSLVMQSREDQETEDPVAAGCRTVASSRKECPSPLAVQPKEKPSHILGCLHATDGDAVDTESRILSYQKISVIPEASTPGNGSFKAGGHTPKVDEARARRGCFSKLLQRRAGAPYQNGALPRRGLFKCCFCKIRPDCKTKVEETDGFQGHSKN

SEQ ID NO: 118667 - protein, 240 aa, Oryza sativa
  Clone ID: PAT_MRT4530_21957C.1.pep
MAKCLRTPERGPAAAAAAAEIEKARSKLGLGAAAANSSWSRTAKRRLSSPLGPAAAAASSGLCGARIWKTAAAGRRPCGGALDHRCRTKTTTSSSGPCGGVLRAVRRRPRRQQRGADLEDGGGGKTAMRRRPQPPMSDEDDNGSSVRVVATWSGNGALRFPRRRGRELPGGSLRLFPAAQVRAPRRRRVPSEGGGGGRSARGGIPQPHELSPSLFRVQWALRQEFGRAPCFFVGEAKNPP

SEQ ID NO: 118668 - protein, 124 aa, Oryza sativa
  Clone ID: PAT_MRT4530_21958C.1.pep
GRPVLQPAVPVPADAGPPPSGPSSAAWPGLGANGAVEVRAGDQVTVTMQDAGAYSFSMIRTGSTTHTVNTDSRRIPLAGQDVGGGSYVVTVPSDYGIATPGYYMLFALSEAGVPAVAKFFRVGL

SEQ ID NO: 118669 - protein, 47 aa, Oryza sativa
  Clone ID: PAT_MRT4530_21959C.1.pep
GVHDPESVPPSGCRKVAKVYLGNLDIPLDLDRFEPLLLDPMDYLHLQ

SEQ ID NO: 118670 - protein, 2185 aa, Oryza sativa
  Clone ID: PAT_MRT4530_2195C.1.pep
MSGLKSHDCHVILNRILPLALRGLLPENIYEPLVELSQFFKKLNSKALSVEQLEEMDAQIPIILCKLEKEFPPSFFDVMMHLPVHLAREALIGGPTIYRWMYLFERQIHCLKSLVQNMARPEGSIAEGYIADEFMTLSSRYLDDVETKHNRPGRIHDTSIGNKFNLSIFSCAGRPIGSRKTRDLDMLESEQAHIYILRNCDEVQEYISEYCNSTEGSSMVQFTSTWNKKFINWFKEKIYQQHQHDKSEVMEDLLSLSRGPLKNITCFTGYDMNGFRYRTERRDSRRCTQNSGVMVLGDDVEYYGVLTEILEIQYLGGRRVPLFRCNWVDVFNKDRGIRIDKYGLTSVNLQRLLQTDEPFVLASQAAQVFFVKDNQIKGWHLIEKMQPRDTYQVVVMISGRYGRNRVSALQNNNSKFISPGLLQQQVARRTAPSTADDLFGSPENMVSATAIVQEGKSKPVYVRQSNLKYQKHTAVPQPGEEDDSDEESIDTWLRRAREYNNSKTLTCIVDMGDANDDTTEEDGVHNSNQAAKRRLRPQTNSRAPSDGSQSVKRSSCGKNKYISNSNNGSHASDDAHNSILAAKRRRSTQPNLQDTEQDTEQDVIERVQVQSLNGTLQNGTKMVQHKGHGKNKCKEVAKLKENQKIKVEFYNNRALSNSLSRHLGRIVRDRNITPVKVKKWSDISNTEQEHIFASITDKFENEDPDIKIDVYKDEIMEHAKSLWINWRGDLHRHFVKPAKTMQQATKNKPKDFDPSDWQWLVQEHFYSKDFIAMSLRNSRNRAGLKMPHRTGSKPFKEIIYNMGGKENRPPTLDELFFETRKKGDTLVDVESSRMHAELVDVVSSDPNLSNVEVMDKCYNGNKRRDHLIGFGGGVKARDVRGPALSKAELHARLRATERENKMLREENSQVVESVNQMQNEWAEMRRDYYANCENRSDTGSQRRHERIHSERDDYDANEDGQLNVIFVVLLDKCGNQYITSGHQKMMVEGIDMKKMIMVTGVRTTMVDDDRFLENLNVALGIARRSRVSEIAILPRSWQQGESLLLEDDALRRKNDKPKAGGEKKPAKDAPESSKKKSGKSGKRKAQAEVLASEYERPPKHPDPQDGDTKRIWCPIHKSDRHSLEECLIFKKSLERQLALEKGKRVRVVKKATETTTQDSDSAYPDSDLHVSHIFGGSTTYSSKREYKKVEREPLGKIMLPVTFGQASNFRTEQITFDVAEFDTAYNAIIGRTALAKFMATSHYAYQVLKMPGPKGTITIQGNAKLAVQCDKRSLDMVEHTPSPPTTAEPPKKVIKTTKTPKPDGAIKIVPLSSANPDKTPSDMPGVPREVIEHKLMVRPDAKLVKQKLRRFAPDRKHAIREELDKLLKAGFIREACPKDHFPLPQIDQLVDSTAGCELLSFPDAYSGYHQISMAKEDEEKTAFITPFGVFCYVKIPFGLITVGNTFQCTVQGALSDQLGNNVEAYVDDIVVKTKTGDSLIDDLRETFDNLRRYRLMLNAEKCTFGVLSGKLLGFLVSGRGIEANPEKIKAIKNMKSPTRLKDVQKLTGCMAALSRFVARMGERGQPFFALLKKQDKFVWTQEAEEAFIALKRYLSNPPVLVSPQPNEELFLYIAATPYSVSTVIVVEREKVQRPVYYVSEALHDAKTRYPQIQKLLYAVIMTSRKLRHYFQAHKVTVVSAFLLGKVVRNKDVVGRIAKWVVELSQFDVHFVPRTTIKSDSHIDNETWTMAFDGALNSQGAGAGFILTSPSGDQFKHAIHLNFRATNNTAEYEGLLAGMRAAAILGVKRLIVKGDSELVANQVHKDYKCSSPELSKYLAEVRKLEKRFDGIEVRHVYRKDNIEPDDLAWCASRREPLEPGTFLDILTKPSVKEANNEDSPVTPDISPGATKAECAVVDIETTDDWRTPLIKFINRDELPQDDAEAEKITRQAKIYCMISNDLYKKAPNGVLLKCVSSDDSKHLLLDIHEGVCGSHAAGRTLVGKAFRQGFFWPTALKDACDMVERANGIVLQGIKTRIYGRLMSHDKKWVEELPSVLWAMRTTPTTSNKETPFFLVYGSEAMLPTELRHQSTRVQKHSDEDQEEQRNDDVNLLEEYREQVAARAASYQQALRRYHEKRIRARILSIGDYVLRRVQSQAGRNKLSPKWEGPYTITQVLRPGAFKIADGDGRELANSWNIDQLHKFYV

SEQ ID NO: 118671 - protein, 47 aa, Oryza sativa
  Clone ID: PAT_MRT4530_21960C.1.pep
KKEKKKIKGKIKINFNVFLKKKKKKKKKKKKKKKKKKKKKKKKKNKN

SEQ ID NO: 118672 - protein, 997 aa, Oryza sativa
  Clone ID: PAT_MRT4530_21961C.1.pep
MARTTNANAGAGGGHRQGVPRVPPSRRDAGREDGVAEDGSTGAPAATTVIPGCAAARAVGAAGSKWRRKGTSGREAPYEEDSGRVRSAFGLDAVLSYTPQVVMVFTENDNKGREDGTHTQGHNLSLTWPPPKDDIRGDGHDEAGHRIARDAAAATGARSVDVAGRNPRKEKSGRAARPDAVDLGKQDPSGVSPTSGVSSPALAPSCLSEDGNFHRENVEMQAERANGWRRKERKAAVEASEVEVKRPGNQKGHGLLDQSGDSVGNNHVLISSSNHERKKRPMYNSEAAKEKNRVQSSSNDRFHRLNNDKIKECSSAEKVPKLSDVNTKEKSEIDQLTKGAILANEDQYEWDDLFFDDGGSKFLTVENKCEVEGVEASDKNDMGTRGLAHPAKVEQARKDMGLRSPVCCFLGHSGLLLIDTPGHETFRNFRCIGSRLCDIAILVVDVILGLQMQTLESLDLLKKHKIDFIIALNKVDNIDGWKQYPNASFEKALALQSESVRMGFEKRLSDIVSQLNAQGIVSGLYYINKDKDDKFKNIVPTSSISCEGISDLLLLLSDRAQKMNERLTIRDKIECTILDVKFIEGHGTTIDVVLSSGVLHLRDQIIMCGSQGPIKTHIRALLTPNKMKELQVKSPYQHHKEIKCARGITISAPGLEYSIAGTCLYVVRPGDDQQDVVNNVLSDIATSSNWIDKSKEGVYVQASSLGSLKAITEFLKSPAMNIPVCDFRLGPVLRKDVMKARFMVRKKTQYATILAFNVKVSPDAQKLASQDGVKIILADVIDHLFEQFRKYIFPRNEKTEEVVFPCVLKIIPDCVFNRKGPIVLGVDMLYGVAKVGTPLCIPSKGFIRIGKIASIQNSHKQVDVAREGEKVAIKIVGSNQDEANNSFGRTFGLDDELVSYITKESIDVLKEHHREIADEVMLSSLPEADDVLPSIIRNYIASEEFQFETQFCSLYIEKFYSVYEVQKHSCYFDEELKMKPRGGYSFSQRRGVCPGKI

SEQ ID NO: 118673 - protein, 91 aa, Oryza sativa
  Clone ID: PAT_MRT4530_21962C.1.pep
MESCSALASLSSPPLQRPPSSPPPPSWPSPGAAPVPAHTPATVHHHRHFGTRPLPSQPPHQRGTELSEGALVDAIEAAGAGADSLAVSSSK

SEQ ID NO: 118674 - protein, 183 aa, Oryza sativa
  unsure (1)..(183): unsure at all Xaa locations
  Clone ID: PAT_MRT4530_21963C.1.pep
MASTRAPSLSSVPLPSSPVAVPCEQEKEIGERERERERESPSPLMGWLRRQWARAEVAVVVDGGRRMGGHWSSXQARATMAAAGLRAGVGVAATTGWRGPNNSPWPPLLWTSVSALLDAAAAPGLGVPTTTVGRSPRPFVPLRFTCRGGAISKMEEEATLLEKRRSLDALRRHLALFPYRLLL

SEQ ID NO: 118675 - protein, 107 aa, Oryza sativa
  unsure (1)..(107): unsure at all Xaa locations
  Clone ID: PAT_MRT4530_21964C.1.pep
MFPLHTHLGILLLLLFSLXNPSCSAAVNDTLAEVQVLTVGETLISRHGKIGLGFYKPAHPAGNASESGNITSPGRYLAIWTNKSPASTTGWVAHRERPITDLEIRLT

SEQ ID NO: 118676 - protein, 972 aa, Oryza sativa
  Clone ID: PAT_MRT4530_21966C.1.pep
MDRQWMYADRRSKEFIDGVHYFLRVAEANRQRGFICCPCNKCKNQKEYSASRTIHFHLFESGFMPSYNCWTSHGEQGVEMEEDEVEDDNIPDFAQYVGFEGNQTGEEEIAADGNDVADDLGQMLQDAREDCESEKEAHKLDKMLEDQRTSLYPGCEQGHKKLDTTLELLQWKAKNGVSDKAFGDLLKLVKNILPGGNKLPETTYEAKKIVCPLGLEVHNIHACPNDCILYRGEEYENLEACPVCKALRYKIRRDDPGEVDGQLTKKRIPAKVMWYFPIIPRLRCLFRNKGNARMLRWHAEERQQDGMLRHPADGSQWRNIDRKFKEFGKDARNIRFGLSTDGMNPFGEMSSGHSTWPITMCIYNLPPWLCMKRKYIMMPIIIQGPKQPGNDIDVYLRPLEGVPVWDEDKQEEFNLRALLFVTINDWPALSNLSGQSNKGYKACTHCMDETESTYLKHCRKVVYMGHRRFLAANHPVRKKGKHFEHKADHRTKPKHRSGKTVFAMVKDLKVVFGKGPGSQHIESEDDHAAMWKKNSIFWELPYWEFLDVYTEARNDLKHMEQRGDLHPEPKEKGSHYLSPASYTLSKAEKESMFECLESIKVPSGYSTNIKRIISTKEKKFTNLKSHDCHVLMTQLLPVVIRGILPDNVRATITKLCAFMNAISQKVIDPIRILGPMYLHNMFPFERYMGVLKKYVRNRARPEASIAKGYGTEEVIEFCVEFIEDLRPIGVPESRHEGRLRGKGTLGRKAIMTVDNNLFRKAHFTVLQHSSLVAPYIEEHLALVRARNIAQDMKSTNQNSAVRVDAMGHDGTTATYYGAIEDIWELDYGPLKVPLFRCQWVRLTSGGIMIDDSGMTTVDLNKVGYSDDLFVLANDVTQVFYVKDMSSKRKKGRGPDEPKRHVVLPGKRKIVGVEDKTDEDYDQLDGQPPFTVTIDPSILLSNKDTPYSRSDHKEGTIVRRKYVRSTVTADVMP

SEQ ID NO: 118677 - protein, 1169 aa, Oryza sativa
  unsure (1)..(1169): unsure at all Xaa locations
  Clone ID: PAT_MRT4530_21967C.1.pep
MGRRPRRRQPPWASLVLLLPVVPEIDDAEALAIKPRKDQRSPVSRSSVSAPDNADPTPPPICKLLIHLHPYRINNILKLLNSSNRQRNRQQRLRVYRWTLGADMDRQWMYADRRSKEFIDGVHYFLRVAEANRQRGFISCPCNKCKNQKEYSASRTIHFHLFESGFMPGYNCWTSHGEQGVEMEEDEVEDNNIPNFAQYVGFEGNQTGEEEIAADGNDVADDLGQMLQDAREDCESEKEAHKLDKMLEDHRTSLYPGCEQGHKKLDTTLELLQWKAKNEVSDKAFGDLLKLVKNILPGGNKLPETTYEAKKIVCPLGQEVHKIHACPNDCILYRGEEYENLEACPVCKALRYKIRRDDPGEVDGQLTKKRIPAKVMWYFPIIPRLRHLFRNKGNARMLRWHAEERQQDGMLRHPADGSQWRNIDRKFKEFGKDARNIRFGLSPKQPGNDIDVYLRPLVEDLKQLWKKEGVPVWDEDKQEEFNLRALLFVTINDWPALSNLSGQSNKGYKACTHCMDETESTYLKHCRKVVYMGHRRFLAANHPVRKKGKHFEHKADHRTKPKHRSGKTVFAMVKDLKVVFGKGPGSQHIESEDGHAAMWKKNSIFWELPYWEFLDVRHAIDVMHLTKNLCVNLLGFLGVYGKSKDTLEARNDLKHMEQRGDLHPEPKEKGSHYLSPASYTLSKAEKESMFECLDSIKVPSGYSTNIKRIISTKEKKFTNLKSHDCHVLMTQLLPVVIRGILPDNVRATITKLCAFMNAILQKVIDPDRLEALQNEVVQCLVSFELIFPPSFFNIMTHLLCHLVKEIRILGPMYLGNMFPFERYMGVLKKYARNRARPEASIAKGYGTEEVIEFCVEFIEDLRPIGVPESRHEGRIRGKGTLGRKAITTVDNNLFRKAHFTVLQHSSLVAPYIEEHLALVRARNIGKSDAWITRHHIDTFPAWLRQHLMGNESINQQLAFLASGPSGXSIATFQGYEINGYTFYTRAQDMKSTNQNSAVRVDAMGHDGTTATYYGAIEDIWELDYGPLKVPLFRCQWVRLTGGGVMIDDSKMTTVDLNKVGYSDEPFVLANDVTQVFFVKDMSSKGKKGRGPDESKRQVVLPGKRKIVRVEDKTDEDYDQLDGQPPFTVTIDPSILLSNEDTPYSRSDHKEGTIVRRKYVRSTVTADVMP

SEQ ID NO: 118678 - protein, 45 aa, Oryza sativa
  Clone ID: PAT_MRT4530_21968C.1.pep
YGWVSPGAMNCLAWNCRGMGNTAIVRDMCSLVKEADARLLFLKPS

SEQ ID NO: 118679 - protein, 905 aa, Oryza sativa
  Clone ID: PAT_MRT4530_21969C.1.pep
MDRQWMYADRRSKEFIDGVHYFLRVAEANRQRGFICCPCNKCKNQKEYSASRTIHFHLFESGFMPSYNCWTSHGEQGVEMEEDEVEDDNIPDFAQYVGFEGNQTGEEEIAADGNDVADDLGQMLQDAREDCESEKEAHKLDKMLDDHRTSLYPGCKQGHKKLDTTLELLQWKAKNGVSDKAFGDLLKLVKNILPGGNKLLETTYEAKKIVCPLGREVHKIHACPNDCILYRGEEYENLEACPVCKALQYKIRRDDPGEVDGQLTKKRIPAKRKYIMMPIIIQGPKQPGNDIDVYLRPLVEDLKQLWKKEGVPVWDEDKQEEFNLRALLFVTINDWPALSNLSGQSNKGYKACTHCMDETESTYLKHCRKVVYMGHRRFLAANHPVRKKGKHFEHKADHRMKPKHRSGKTVFDMVKDIKVVFGKGPGSQHIESEDGHAAMWKKNSIFWELPYWEFLDVRHAIDVMHLTKNLCVNLLGFLGVYGKSKDTLEARNDLKHMEQRGDLHPEPKEKGSHYLSPASYTLSKAEKEIVIRGILPDNVRATITKICAFMNAISQKVIDPDRLEALQNEVVQCLVSFELIFPPSLFNIMTHLLCHLVKEIRILGPMYLHNMFPFERYMGVLKKYVRNRARPEASIAKGYGTEEAIEFCVEFIEDLRPIGEHLALVRARNIGKSDAWITRHHIDTFPAWLRQHLMGNESINQQLAFLARGPSGSIATFQGYEINGYTFYTRAQDMKSTNQNSAVRVDAMGHDGTTATYYGAIEDIWELDYGPLKVPLFQCQWVRLTGGGVMIDDSGMTTVDINKVGYSDEPFVLANDVTQVFFVKDMSSKGKKGRGPDEPKRQVVLPGKRKIVGVEDKTDEDYDQLDGQPPFTVTIDPSIILSNEDTPYSCSDHKEGTIVRRKYVP

SEQ ID NO: 118680 - protein, 378 aa, Oryza sativa
  Clone ID: PAT_MRT4530_2196C.1.pep
VFYGLEYAHALDDLKAVVAELYKSHSRSVEVQYADVLCSVMSPSSAAEVEHGQSDGSTHSDDLSIQSDVATFVNNCCNVEGSTRKYSLGGLTWSTSIDDNMEDYLLYWIGQDNSAFANIVLTFNKCDIVRYDTVANQPSRDVSHLMKILRRRYYLVEKAKDANIVGILVGTLGVAGYLHIIEQMKDLIKAAGKKSYTLVMGRPNSAKLANFPECEVFVYVSCAQTALLDSKDFLAPVITPFEAVLAFSRGREWTGEYLLDFKDLITTDKPEISSTTEEARFSFIKGGYVEDNCLEDNEEQPETSLALAEVTEKALSIKNQNNDAVLYQGGAKSAIDYLKARSYRGLTGEYEGPAPDSVLTGRTGRAAGYNNEKKEITQ

SEQ ID NO: 118681 - protein, 83 aa, Oryza sativa
  Clone ID: PAT_MRT4530_21970C.1.pep
HRSRLIAIYEANMKCYHHRHTHHISLNRIAPSSSSSNGFSMHRGIPGRKAKPSLPYNACLLSSSAAADACSLPGQRCSPCRRA

SEQ ID NO: 118682 - protein, 885 aa, Oryza sativa
  Clone ID: PAT_MRT4530_21971C.1.pep
MEDDEVEDDNIPDFAQYVGFEGNQTGEEERDADGNDVADDLGQMLQDAKEDCESEKGAHKLDKMLEDHRTSLYPGCEQGHKKLDTTLEFLQWKAKNGVSDKTFGDLLKLVKNILPEGNKLPETTYEAKKIVCPLGLEVQNIHACPNDCILYIGEEYENLEACPVCKALRYKIRRDDPGEVDGQLTKKRIPAKVMWYFPIIPRLRRLFSNKGNARMMRWHAEERQQDGMLRHPADGSQWRNIDRKFKEFGKDARNIRKYIMMPIIIQGLKQPGNDIDVYLRPLVEDLKLLWKKEGVPVWDEDKQEEFNLQALLFVTINDWPALSNLSGQSNKGYKACTHCMDETESTYLKHCRKVVYMGHHRFLAANHPVWKKDKHFEHKADHRTKPKHRSGKTVFAMVKDLKVVFGKGPGSQPIESEDGHAAMWKKNSIFWELPYWEFLDVRHAIDVMHLTKNLCVNLLGFLGVYGKSKDTLEARNDLKHMEQRGDLHPEPKEKGSHYLSPASYTLSKAEKESIFECLESIKISILGPMYLHNMFPFERYMGVLKKYVRNHARPEASIAKGYGTEEVIEFCVEFIEDLRPIGVPESRHEGRLRGKGTLGRKAIMTVHNNLFRKAHFTVLQQSSLVAPYIEEHLALVRARNIGKSDAWITRHHIDTFPAWVRQHLMGNESINQQLALLARGPSGSIATFQGYEINGYTFYTRAQDMKSTNQNSAVRVDAMAHDRTTGTYYGAIEDIWELDYGPLKVPLFRCQWVRLTSGGVMIDDSGMTTVDLNKVGYSDESFVLANDVTQVFYVKDMSSKGKKGRGPDEPKRHVVLPGKRKIVGVEDKTDEDYDQLDGQPPFMVTIDPSILLSNEDTPYSRSDHKEGTIVRRKYVRSTVTADVLP

SEQ ID NO: 118683 - protein, 797 aa, Oryza sativa
  Clone ID: PAT_MRT4530_21972C.1.pep
MPQRNWRKSESGERVLRRGGEGGDTLAGGEQTPALGNASLNCCIDLSLDSLPDDEHWALVDSHDGLLLLCTKFSNRMDIPDNSAVCDPVSGRCAPTRTTSVVDEERWEKREEGSMEEEDPYEYDEEDRKRDDSGMDTKEDCESEKGAHKLDKMLEDHRTSLYPGCEQGHKKLDTTLEFLQWKAKNGVSDKAFGDLLKLVKNILPEGSKLPETTYEAKKIVCPLGLEVQKIHACPNDCILYRGEEYENLEACPVCKALRYKIRRDDPGPKQPGNDIDVYLRPLVKDLKLLWKKEGVPVWDEDKQMEFNIRVLLFVTINDWPALTNLSRQSNKGGKTVFAMVKDLKVVFGKGPGSQHIESEDGHAAMWKKSSIFWELPYWEFLDVHHAIDLMHLTKNLCVNLLGFLGVYGMSKDTLEARNDLKHMEQRGDLHPEPKEKGSHYLSPASYTLSKAEKENNVRATITKLCDIMNAISQKVIDPDRLEALQNDVVQCLVSFELIFPPSFFNIMTHLLCHLVKEIGILGPVYLHNMFPFERYMGVLKKYVRICARPEAIITKGNGTEEVIEFCVEFIEDLRPIGVTVGIAKSSPSSSRPPFPPRIAGAPPSSSTRTSPPLQPRRRRRPLIVRRRLGHRAPDCEVAEISPWGSLGSPYLVYKGGYEINGYTFYTRAQDMKSTNQKSDVRIDAMGHDGTTGTYYSAIEDIWELDYGPLKDMSSKEKKGRGPDEPKRHVVLPGKRKIVGVEDKTDEDYDQLDGQPPFTVTIDPSILLSNEDTPYSCSDHKEGTIVRRKYVRSTVTAD

SEQ ID NO: 118684 - protein, 151 aa, Oryza sativa
  Clone ID: PAT_MRT4530_21973C.1.pep
LRSRASLVRSGSSRFLLVSVAMEVGDGGGDAIATSDGGGDEVAARDCDGDADTTRGDGGGADPVRGGSGGADQVRGGGDDVVAARRDGGGADAARGDGGGADPVLSGGCGADAARGDVAARPFDALDWAVFVVLADVDSPVGCLSKGDPGG

SEQ ID NO: 118685 - protein, 873 aa, Oryza sativa
  Clone ID: PAT_MRT4530_21974C.1.pep
MDRQWMYADQRSKEFIDGVHYFLRVAEANRQRGFICCPCNNCKNQKEYSASRTIHFHLFESGFMPSYNCWTSHGEQGVEMEEDEVEDDNIPDFAQYVGFEENQMGEEEIAADGNDIADDLGQMLQDAREDCESEKEAHKLDKMLEDHRSSLYPGCEQGHKKLDTTLEFLQWKAKNGVSDKAFGDLLKLVKNILPGGNKLPETTYEAKKIVCPLGLEVYKIYACPNDYILYRGEEYDNLEACPICKALRYKIRRDDPREVDGQLTKNKGNARMLRWHAEECQQDRMLRHPADGSQWRNIDRKFKEFGKDARNIRFGLSTDGMNPFGEMSSGHSTWPVTMCIYNLSPWLCMKRKYIMMPIIIQGPKQPGRLYSLRFLATNHPVRKKGKHFEHKADHRTKPKHRSGKTVFAMVKDLKVVFGKGPGSQPIESEDGHVAMWKKNSIFWELPYWEFLDVRHAIDVTHLTKNLCVNFLGFLGVYGKSKDTLEARNDLKHMEQRGDLHLEPKEKGSHYLSPASYTLSKAEKESMFECLESIKKVIDPDRLEALQNDVVQCLVSFELIFPPSFFNIMTHLLCHLVKDIRILGPVYLHNMFPFERYMGVLKKYVRNCVHPEASIAKGYGTEEVIEFCVEFIEDLRPIGVPESRNEGRLRGKGTLGRKAIMTVDNNLFRKAHFTVLQHSSLVAPYIEEHLALVRARNIASDSIPQATLDGSDETNLFKTSPTEKNFNSGLTSAQGGVAPTRGTRGSVTQGERGAAGKRAPPSGGSWGRGDARSARLGLKPADRLWRGRWRARTVAGDGNRRRGKRRRMTAARRRRHTAAAAARPGTALGGRERGKEGEGRLTASWPAWGEKTTANGDGERPGNGDDRRTSSETS

SEQ ID NO: 118686 - protein, 78 aa, Oryza sativa
  Clone ID: PAT_MRT4530_21975C.1.pep
MRAHFSLFFSTECALSFFFFQEYQNESFGGFPKIGHLSSVPTNLLKSDLEIFKWPIGKSIGLSYNSSNTCTRKLCFQQ

SEQ ID NO: 118687 - protein, 600 aa, Oryza sativa
  Clone ID: PAT_MRT4530_21976C.1.pep
MKVTPTPHANGSKVAARLTRLLRCSPRDSNVIARSLQSAAAAVAVPVPTSSPARMLPPSAAATAGDGGGVPHFVGTMREERRKEKNEEMVAGQPLEMEEVEVAPPRAHEVRIKILCTSICHTDITFWRMEGNHPSIFGHEAVGVVESVGEHVQEVAVGDMVVPVFAAQCSECPDCLSDRSNLCSKLPNVAGLMPRDRTTRFSSVSTGEPIRHFLSVSSFAEYTVVDITHIVKLDVGFPPAMACLLSCGISTGVGAAWKVAAVEPGSSVAVFGLGAVGLAVAQGARMRGAKRIIGVDLNPDKFDVGKRLGMTDFINPNDTGGKTVSEVIKEMTGGGGADYCFECIGSTSVMAEAFQSTRNGWGKTILLGVSGNKAPISIPSHEILRGRSVIGSLFGGIKPKNDIPMLAQKYLDKELELEEFITHEMGFEEINRAFELLTQGKSIRCIIWMDGAKVIDNGEVFDSALASVAVVLESIRSEGQLWSLAGERGALSNVDYDHLLAPVKASPRPLSREGEEEEGDIAMVAAQSFVSTQDSASDTVVDYSGNEDKFHESNTTLVGWHWRHHWVYWLGPFIGAGLAGLLYEYLVIPSADATPHGGAH

SEQ ID NO: 118688 - protein, 1172 aa, Oryza sativa
  Clone ID: PAT_MRT4530_21977C.1.pep
MAKAANTIAARKAEKGIEGMGGHHRRDGWEPSCPLSRSAEKARVYPKSNFFSKMDRQWMYADRRSKEFIDGVHYFLRVAEANRQKGFTCFSCNKCKNQKEYSASRTIHFHLFESGFMPNYNCWTSHGEQGVEMEEDEVEDDNIPDFAQYAGFEGNQTGEEERDADGNNVADDLGQMLQDAKEDCESEKGAHKLDKMLEDHITSLYPGCEQGHKKLDTTLEFLQWKAKNGVSDKAFGNLLKLVKNILPEGNKLPKTTYEAKKIVCPLALEVQKIHACPNDCILYRGEEYENLEACPVCKALRYKIRRDDPGEVDGQLTKKRIPAKVMWYFPIIPRLRRLFRNKGNARMMRWHAEERQQDGMLRHPADGPKQPGNDIDVYLRPLVEDLKLLWKKEGVPVWDEDKQEEFNLRALLFITINDWPALSNLSGQSNKGYKACTHCMDETESTYLKHCRKVVYMGYRRFLAANHPVRKKGKHFEHKEDHCTKPKHRSGKTVFAMVKDLKVVFGKGPGSQPIESEDGHAAMWKKNSIFWELPYWEFLDVRHAIDVIHLTKNLCVNLLGFLGVYGKSKDTLEARNDLKHMEQRGDLHPEPKEKGSHYLSPASYTISKAEKESMFECLESIKLLSVVIRGILPDNVRATITKLCAFMNAISQKVIDPDRLEALQNDVVQYLVSFELIFPPSFFNIMTHLLCHLVKEIGILGPVYLHNIFPIERYMGVLKKYVRNRARPEASIAKGYRTEEVIELCVEFIEDLRPIGVPESRHEGRKGTLGRKAIMTVDNNLFRKAHFTVLQQSSLVAPYIEEHLALVRARNIVLFVSMPWDTMVQLTRITVPSRTWELDYGPLKVPLFRCQWARLTGGGVTIDDSGMTTVDLNKIGYSDEPFVLANDVTQVFYVEDMSSKGKKGKGPDEPKRHVVLPGKRKIIGVEDKTDEDYDQFDGQPPFTVTIDILLSNEDTPYSRSDHKEGTIVRRKNTYAMKFKTQLLLSLVPVPNPNRMADRDEEQILYDTIAEGSSQYWNEEEGNNDPNQYLNEEGNVERDAEGNKEGNDAEEASGSHPSAGQKRARGQRGAVKKIEGRHIIAEVDEDGRPSAPAEAAKNFVCHSGWVVRDNVPVSTVYWRKTRARGDNDSFVPDSEKEMLWTTMLETFTLPAGTENIVKQWTLKKMAEQFQSFK

SEQ ID NO: 118689 - protein, 41 aa, Oryza sativa
  unsure (1)..(41): unsure at all Xaa locations
  Clone ID: PAT_MRT4530_21978C.1.pep
SDRPPGGRDGAARDGRYRADGAVFGQTEPMAVIYXLAYFTT

SEQ ID NO: 118690 - protein, 66 aa, Oryza sativa
  unsure (1)..(66): unsure at all Xaa locations
  Clone ID: PAT_MRT4530_21979C.1.pep
KLENETLRIGCYTTRSKYQFFYXFFVNITCFPNLNVKFTYILKLGNSKGVFRSRGAKFWHVISGII

SEQ ID NO: 118691 - protein, 84 aa, Oryza sativa
  unsure (1)..(84): unsure at all Xaa locations
  Clone ID: PAT_MRT4530_2197C.1.pep
QQPIRHRLARRARRRHSPPPVFAAFPAPXRGRHHRRRPRRRPPNXPANFPAVSSGGGXVGKGXXKGXSELGFAPRXACAWAKRG

SEQ ID NO: 118692 - protein, 1135 aa, Oryza sativa
  Clone ID: PAT_MRT4530_21980C.1.pep
MDRQWMYADRRSKEFIDGVHYFLRVTEANRQRGFICCPCNKCKNQKEYSASRTIHFHLFESGFMPSYNCWTSHGEQGVEMEEDEVEDDNIPDFAQYVGFEGNQTGEEEIAADGNDVADDLGQMLQDAREDCESEKEAHKLDKMLEDHRTSLYPGCEQGHKKLDTTLELLQWKAKNGVSDKAFGDLLKLVKNILPGENKLSETTYEAKKIVCPLGLEVHKNHACPNDCILYRGEEYENLEACPVCKALRYKIRRDNPEEDDGQLTKKRIPAKVMWYFPIIPRLKRLFRNKGNARMLRWHAEERQQDGMLRHPADGSQWRNIDRKFKEFGKDARNIRFGLSTDGMNPFGEMSSGHSTWPVTMCIYNLPPWLCMKRKYIMMPIIIQGPKQPGNDIDVYLRPLVEDLKQLWKKEGVPVWDEDKQEEFNLRALLFVTINDWPALSNLFGQSNKGYKACTHCMDETESTYLKHCRKVVYMGHRRILAANHPVRKKGKHFEHKADHRTKPKHRSGKTVFAMVKDLKVVFGKGPGSQHIESEDGVYGKSKDTLEARNDLKHMEQRGDLHPEPKEKGSHYLSPTSYTLSKAEKESMFECLESIKVPSGYTTNIKRIISTKEKKFTNLKSHDCHVLMTQLLPVVIRGILPDNVRATITKLCAFMNTISQKVIDPDRLEALQNDVVQCLVSFELIFPPSFFNIMTHLLCHLVKEISILGPVYLHNMFPFERYMGILKKYVRNRARLEASIAKGYGTEEVIEFCVEFIEDLRPIGVPESRHEGRLRGKGTLGRKAIMTVDNNLFRKAHSTVLQQSSLVAPYIEEHLALVRARNIGKSDACITRHHIDTFPAWIRQHLMGNESINQQLAFLARGPSGSIATFQGYEINGYTFYTIAQDMMSTNQNSAVRVDAMGHDGTTGTYYGAIEDIWELDYGPLKVPLFRCQWVRLTGGGVMIDYSGMTTVDHNKVGYSDEPFVLANDVTQVFFVKDMSSKGKKGRGPDEPKHHVVLPGKRKIVGVEDKTDEDYDQLDGQPPFTVTIDPSILLSNEDTPYSRSDHKEGTIVRRKYVRSTVTADVLPRRVSDADADLVTTRRRATRCHDAARRRRATPMPCAAPRRRRAAPPPLHCRHTAVPLPPHRERERANERE

SEQ ID NO: 118693 - protein, 109 aa, Oryza sativa
  Clone ID: PAT_MRT4530_21981C.1.pep
MQPQKRMNKPEIPEVYDEFACRVVERAIAHSRFIVCWLMRRVGPQNQTTAYENGNRGRLSARKEVAAAASVSEEEEPTAIGACKEEIRPPAVEAATADVTLRFLRDVKN

SEQ ID NO: 118694 - protein, 1152 aa, Oryza sativa
  Clone ID: PAT_MRT4530_21982C.1.pep
MSGSGNSLDTVALIVGGGSDSSGIVGRKRRRCDLIRERWCCLCPVWCKEAQEVVVPGRGRNGARQRDGGGCALGTTEVLGRICNSSVEKAEERETVIPAISNTEKMGEKQQKSIPRDRKRKGELDPAADYVKDLWDAFYVTAESTHLDTSEVNNKKQLDNCNHDIHVYEDLGHVCHECGLVVRKADSLFHYQWKKASRKRTNVNEVCLKKVGSDAISLSEDFIFSDIAIHPRHAKNIRPHQLEGFKFLVNNLVTDEPGGCILVHAPGSGEIFMLISFIQGFMARHFTARPLVVLPEGILGTWKREFQQWQVEDIPLYDFDSIKADNRVEQLEVLKSWSSKRSILFVGSKHFTQIVCDDRDENAVAECRDTLLMVPSLLILDEGHTPSIDETDMLQSARKVQTPCKVVMSGTLFHNHVKEVFNTLDLVRPGFLKTETFWPIVTRMMGQLEISSARSITEISESMEDTLLNDDNFTRKVNVIRSLGELTKDVLHYCKGEDLNEFPVLLDFSVFLELSPKQKDILCKLEEDHGMLKTSAVGAALYVHPCLSEISEANDVDRDDRVDSLVNSINLGDGVKARFFLNILALANSAGEKLVAFSQYTLPMKFLERLLVKEMGWHVGKEIFVINGDTSMEDGQLAMDQFNGSADAKVLFGSIKAFGEGISLVGASRIVILDVHLNPSVTRQAIGSTFRPGQKKKVFVYRLVAADSPEEKAHETAFNKEVIPKLWFQWSGRCTTEDFKLNQVCIDGSRDELLETDVIRQDIKALYQSIDMGLVSEATVCFNNVSSSGLSVHDTGGNVIGQGDQDSEKNRYLSIASETMLVHFVHVFSFVCVPVNTTCSLSICREILWFLIGTREVPFSSVKFGISSWMGKITLIRIFRILYDEKGQIALLASKGSIKDKQEACKSWRYPSIHPWLTEAVVLAVTAATPPHLLAVAGPLPLPSLCSAVPFALLYYFGKGRKVVHTLKNWLQQVSVENKICGWGYNTTEVLGRICNCSVEKAEERETIILASGNMEKMEEKHQKSDQDFHFSDSTMAIPRERKQKGEVDPAADCLKDRWGAFYVAVESTQVQVETTKYMLLKPIIVNFFILIICFGQLDTSEVNNKKQLNNYNHDIHVYEDLGRVCHECGMVVRKADSLFHKRKKVHNLLKL

SEQ ID NO: 118695 - protein, 1122 aa, Oryza sativa
  Clone ID: PAT_MRT4530_21983C.1.pep
MATGAEEGGDAARVDGVDGAPVVGERNGGVDEVAGDAAKPKEAAPRGEMDRQWMYADRRSKEFIDGVHYFLRVVEANRQRGFICCPCNKCKNQKEYSASRTIHFHLFESGFMPSYNCWTSHGEQGVEMEEDEVEDDNILDFAQYVGFEGNQTGEEEIAADGNDVADDLGQMLQDAREDCESEKEAHKLDKMLEDHRTLLYPGCEQGHKKLDTTLELLQWKAKNGVSDKAFGDLLKLVKNILPGGNKLPETTYEAKKIVCPLRLEVHKIHACPNDCILYRGEEYENLEACPVCKALRYKIRRDDPGEVDGQLTKKRIPAKVMWYFPIIPRLRRLFRNKGNARMLRWHAEERQQDGMLRHPADGSQWRNIDRKFKEFGKDARNIRFGLSTDGMNPFGEMSSGHSTWPVTMCIYNLPPWLCMKRKYIMMPIIIQGPKQPGNDIDVYLRPLVEDLKQLWKKEGVPVWDEDKQEEFNLRALLFVTINDWPALSNLSGQSNKGYKACTHCMDETESTYLKHCRKVVYMGHRRFLAANHPVRKKGKHFEHKADHRTKPKHRSGKTVFAMVKDLKVVFGKGPGSQHIESEDGHAAMWKKNSIFWELPYWEFLDVRHAIDVMHLTKNLCVNLLGFLGVYGKSKDTLEARNDLKHMEQSGDLHPEPKEKGSHYLSPASYTLSKAEKESMFEFLESIKVPSGYSTNIKRIISTKEKKFTNLKSHDCHVLMTQLLPVVIRGILPDNVRATITKICAFMNAISQKVIDPDRLEALQNEVVQYLVSFELIFPPSFFNIMTHLLCHLVKEIRILGPMYLHNMFPFERYMGVLKKYVRNRARPEASIAKGYGTEEVIEFYVEFIEDLRPIGVPESRHEGRLWGKGTLGRKAITTVDNNLFRKAHFTVLQHYSLVAPYIEEHLALVRARNIGKSDAWITRHHIDTFPAWLRQHLMGNESINQQLAFLARGPSGSIATFQGYEINGYTFYTRAQDMKSTNQNSAVRVDAMGHDGTTATLTGGGVMIDDSGMTTVDLNKVGYSDEPFILANDVTQVFFVKDMSSKGKKGRGPDEPKRQVVLPGKRKIVGVEDKTDEDYDQLDGQPPFTVTIDPSILLSNEDTPYSRSDHKEGTIVRRKYVP

SEQ ID NO: 118696 - protein, 1056 aa, Oryza sativa
  Clone ID: PAT_MRT4530_21984C.1.pep
MGGHAKISIEFILVITYKSEMDRQWMYADRRSKEFIDGVHYFLRVAEANRQRGFICCPCNKCKNQKEYSASRTIHFHLFESGFMPSYNCWTSHGEQGVEMEEDEVEDDNIPDFAQYVGFEGNQTGEEEIAADGNDVADDLGQMLQDAREDCESEKEAHKLDKMLEDHRTSLYPGCEQGHKKLDTTLELLQWKAKNGVSDKAFGDLLKLVKNILPGGNKLPETTYEAKKIVCPLGLEVHKIHACPNDCILYRGEEYENLEACPVCKALRYKIRRDDPGEVDGQLTKKRIPAKVMWYFPIIPRLRRLFRNKGNARMLRWHAEERQQDGMLRHPADGSQWRNIDRKFKEFGKDARNIRFGPKQPGNDIDVYLRPLVEDLKQLWKKEGVPVWDEDKQEEFNLRALLFVTINDWPALSNLSGQSNKGYKACTHCMDETESTYLKHCRKVVYMGHRRFLAANHLVRKKGKHFEHKADHRTKPKHRSGKTVFAMVKDLKVVFGKGPGSQHIESEDGHAAMWKKNSIFWELPYWEFLDVRHAIDVMHLTKNLCVNLLGFLGVYGKSKDTLEARNDLKHMEQRGDLHPEPKEKGSHYLSPASYTLSKAEKESMFECLESIKVPSGYSTNIKRIISTKEKKFTNLKSHDCHVLMTQLLPVVIRGILPDNVRATITKLCAFMNAISQKVIDPDRLEALQNEVVQCLVSFELIFPPSFFNIMTHLLCHLVKEIRILGPMYLHNMFPFERYMGVLKKYVRNRARPEASIAKGYGTEEVIEFCVEFIEDLRPIGVPESRHEGRLRGKGTLGRKAIMTVDNNLFHKAHFTVLQHSSLVAPYIEEHLALVRARNIGKSDAWITRHHIDTFPAWLRQHLMGNESINQQLAFLARGPSGSITTFQGYEINGYTFYTRAQDMKSMNQNSAVRVDAMGHDGTTATLTGGGVMIDDSGMTTVDLNKFGYSDEPFVLANDVTQVFFVKDMSSKGKKGRGPDEPKRQVVLPGKRKIVGVEDKTDEDYDQLDGQPPFTVTIDPSILLSNEDTPYSRSDHKEGTIVRRKYVRSTVTADVMP

SEQ ID NO: 118697 - protein, 79 aa, Oryza sativa
  Clone ID: PAT_MRT4530_21985C.1.pep
MPDDVANRFPPRGGSTGRSAARVARFDRQNQNRSLFKGARRVVGNAIVARCTAARLSRHASGCDATRASPAAAANQPID

SEQ ID NO: 118698 - protein, 51 aa, Oryza sativa
  unsure (1)..(51): unsure at all Xaa locations
  Clone ID: PAT_MRT4530_21986C.1.pep
PSLCGARVGYLHDKLEKAWDVSLFCFFHLPPXKVXNSPCIISFHIYXXVKX

SEQ ID NO: 118699 - protein, 262 aa, Oryza sativa
  unsure (1)..(262): unsure at all Xaa locations
  Clone ID: PAT_MRT4530_21987C.1.pep
FKITLINTIYLKTEVVINMVNICFSLFICFSLFHIDRKVNSVNSSDLDSNISKVKQYKTTSLMMQHLHARVVDELILTKNVXEKKYKVAFCASSLVNASCANKAKQNNGVLISQDCSKCVLNEMKLKDALGRVKHMEEIVKQDKVLILMLIMLDILLLFWVLLGEKKEREIAFAKXHWQKSGFNSRSTVRPTLSKLPGPVRPQVQRRSDRPWGNFSHTSNRTFVKRQGKKYEXNEYRILGNSLDDKDVFDVSKIMGAESLET

SEQ ID NO: 118700 - protein, 71 aa, Oryza sativa
  unsure (1)..(71): unsure at all Xaa locations
  Clone ID: PAT_MRT4530_21988C.1.pep
MAEXQPRAAAXGGGETLXMEKIADKLHIGGDGSSSDXXADERKQXKPSXPPAPADVATESFVDSAAXAAAE

SEQ ID NO: 118701 - protein, 300 aa, Oryza sativa
  unsure (1)..(300): unsure at all Xaa locations
  Clone ID: PAT_MRT4530_21989C.1.pep
LFLKRKRGLLRQRLGFTVNRLHRGGLRNGRPRTTLSKMDGRDRLDLXRSTGNGDDDVSGDVTTGGGSGXACSPANDGAAAQTESIYGXRATRRTHRXPKRRRRRRSGXRRQRCSGDLRRKRRGGRGRRRLGDHDGGLPERRRXPERRRRTAGLAAATAAHGXTRRRHYKRRRAKARVAVGARRRRRRPTAAGSEKERLGFGRERGIRFEIESGTFQAILADDSKREKIEGIPEIISPQSIRAEKERGGGPHLSAAEREEGGRGELGWLGPGASRPRRGRERDLGRLSAQSQKERFKNLFL

SEQ ID NO: 118702 - protein, 128 aa, Oryza sativa
  unsure (1)..(128): unsure at all Xaa locations
  Clone ID: PAT_MRT4530_2198C.1.pep
GPPGPLLFLGGKPPNFVLSREAPLCAKFKFPGPPKFLWGKKWGFPQFPPHDFVRLXSGGGFLPDGVHVKLLGCPGPLFVWAPGKAFLSPPLIFFPFSFVGNEISAPFFFLLTRSFFPLFTPDSPRVWC

SEQ ID NO: 118703 - protein, 737 aa, Oryza sativa
  Clone ID: PAT_MRT4530_21990C.1.pep
MGISESDELRAFEATGIYRLAESGAAFLDPVRILNASYRRFRLVPSAYYSRSFGTSRQGGEAETERTGEASPERKKRKRKRQRQPKPRELNEVERMAEARHQEARPLLSSAHKSLLKAKDLLEFLPRMIKEDVRMLDVESNLEKNLVELGSSWRAPLCEMTLCFQKSSGEDSEEDNYNQGYNLIVVDPPWENGCVRQKVAYPTLPNRHFLYLPVQELAHPAGALLVLWITNREKLWKFVEEELFPAWGVKDHTVFYWLKVKPDGSLIGNLDLLHHRPYECLLVGYINLNKEAVRGSKFKFLEERRVIFFSQSLPMVEVDRNIMVSMAKAISRVTLFLTYTAFAILIGGVHLQNVRVEQQNGEAAASALCLYVWQRLCVTARGVGPKAPNPLIPRRAEAVAPAADRDVQPDATDLADEATTPAQRLASEMPGLRPESPAIPSPELRRVRTSFTGASSWVATTAMGKVVRSANAPVEPKAKVEDVEKQRRRGKGGCNGTVSSARCRSPPPSPVSPELGKTRCSWITVNSEPLYVAFHDEEWGVPVHDDQKLFELLTLSQALAEITWPIILNKRDEFREMFDGFNYASVSEFTDKKINLLSKSNGNMLLSEQKIRAVVTNAKQMHKVIQDFGSFSNYCWSFVKHKPVKSNFRYARQVPIKTPKSEAISKGLMRRGFQCVGPTTIYSFMQVSGIVNDHLSCCFRFQDCRDIKRNLRAEPGLIERRLNSPPSSEDSETSREA

SEQ ID NO: 118704 - protein, 456 aa, Oryza sativa
  unsure (1)..(456): unsure at all Xaa locations
  Clone ID: PAT_MRT4530_21991C.1.pep
MGAKLLLLLVASSLCLSAAIATQQTCPADLDSKCGDAASGDWEGEFFPGIPKIKYEGPSSKNPLAYKWYNAEEVILGKKMKDWMRMPTVVIPRSRGTAGDPFGVFTKFLCLYHGSLRMVGLHLXGFNFDAKLRRESTDVEDMFLAHISGMDTLARGLRNVVKLIEDGSLDELVRKRYQSFDSEIGALIEAGKGDFETLEKKVLEWGEPIVPSGKQELAEILFQAALXDGAVVLFIVLGIKPSTPLETECAFYHCLLRAIIYRYLYELNTKIKXKIECNHATLSGHSCHHELETARINGLLGNIDANTGDPQIGWDTDQFLTDISEATLVMSSVVKNGGLAPGGFNFDAKLLVPADIVFFFCVRRESTDVEDMFLAHISGMDTLARGLRNVVKLIEDGSLDELVRKRYQSFDSEIGALIEAGKGDFETLEKKVLEWGEPIVPSGKQELAEILFQAAL

SEQ ID NO: 118705 - protein, 132 aa, Oryza sativa
  Clone ID: PAT_MRT4530_21992C.1.pep
MALRSLVRPNLGLAQLAHAFPNGVAKNRVGNFYGKKKITIGTLKCLVASGANLEKQAINTRLVYERKVYGMYKGFRTPLEKVLLHVQLRIETTTNPKHASPSKKSRDPTKTDSESDTIDLIDQTTPVRPTHK

SEQ ID NO: 118706 - protein, 164 aa, Oryza sativa
  Clone ID: PAT_MRT4530_21993C.1.pep
MERDSQKHHEKNLPPSIPPQPASCIARCPHRPPPPNASPPITSSGGEGSAAASSPTTVVVCLPPPSCLMGARRPHRPPPLDGALPPPPLPQRSPPPAASPPARSGGGDAGSDGGGARHIPSHNSRCRPPPPCAPQLPPPSRRATANSEPPIAVAGRGGGRGLER

SEQ ID NO: 118707 - protein, 746 aa, Oryza sativa
  unsure (1)..(746): unsure at all Xaa locations
  Clone ID: PAT_MRT4530_21994C.1.pep
HTGTSTSTLSAHWRAAAWCAAFPLWSGLPRCMMKAKNMPGEFXGEAVTTAVYILNRAPTKSVRDKTPFESWHGQTPVVHYFHTFGCVVYVKEVKPHIKXLDDRSKVMVFLGYEPGSKAYRIYDPVAKRIVVSRDAVFDEAASWPWASPGEEDGGTSPQETFTVRYEVVAVDVPSRHSDSMSSPAHMGTPVPSISASPGVLAVEFVSLPAETPDVDDDSTGPRRFWMVAKILDTTSPIELDSDELHRPIGLKWVFKLKKDETGAIVKHKARLVAKGYVQRQGIDFDEVFAPVARMESVRLLLAIAAHLGSSVHHMNVKSAFLNGELEEEVYVAQPLGFIDDKHPHQVLRLNRALYGLRQAPRAWNAKLDVSLHELGFTRGITEHAVYTRGTGNARLIIGIYVDDLIITGAHSKTIQSFKEEMHSLFRMSDLGLLSYYLGIEVHQGNDGITINQSTYAQKLLKMGGLAASASVPMEPRLKLTKNSDRPSVDSTFYRGLVGSLRYLVHSRPDIAFAVGYVSRFMESPRNDHLTAVKHILRYVAGEEGIHLLGFSDSDLGGDAHDRKSTCGALFFLGSSPIVWQSQKQKVVALSSSKAEYIAATGAACLGIWLARLLAEVLGSDPGKALLKVDNKSAISLCKNPVFHDRSKHIDTREKLMEQKKKKKKKKKKGSVRRLEETLLLNFMQQEKRSFIADQTETTSPCPCRGEDGGMGWPGTRDRQIKKYEKWDVTRQLPLRMGMVKFGPFNH

SEQ ID NO: 118708 - protein, 1632 aa, Oryza sativa
  Clone ID: PAT_MRT4530_21995C.1.pep
MGEDRGLTTDEDIEVLTTIERWQQCRVVDNKLMAMVDGLMEDGAGSGEDDRGGWHNSAAPFAARACDDSGNIGAHSIGLQHNRVYSMSRGRNLGRIIVSSNSSKTWNGGLQREKEGVLDLLIEEDRELSGQPEDAQGLWDAVDTGDVPYQEDCQALSAILRAVPAEMVRPLAEKDSAKDAWDALKSMRVGADRVKESRAQKLRQTFESMRFKNGEHLEDFSLRLQSLEMICLKRRLFENCFASFPGGAVPHDAGGGRKSPAQRRLAEEKTWMGATLKILEDNKNNARQEGKACRFTTHVDIMAECRRDEMANLSIFVLCPRPTSPDNILAKADKAAVINSFHLSMTDEVLFSEKEAPAHSNKEAGQNSAGGRASSSRQPHRSRRERDGNGSDGKSGSSQAANRNVSKDKCRYCGKLGHWAKDCCKAKRDREKLAQANLLITEPAQAADEGEPTLLMAQVCELAPATDPVITDGEVTLKEERAHVSLQDEGKPVDLDWILDTGASNHMTGSRDAFSELHTTVRGTVKFGDASRVRIEGRGTVLFACKNGDHCALTGVYYIPKLRSNMVSLGQLDEARCKTVIEDGVLTLRDSQRRLLCRVRRGTGCLYVLHVELAQPVSLLAKGNDQAWVWHARYGHLNFDALRSLASRGMARDIPTLERVTQVCDGCLIGKQRRAPFPTAALHRATGRLDLVHGDICGPITPSTHGGVEVETGCKLRVLRTDRGGEFTSVEFGLYCANEGVARQLMAPYSPQQNGVVERRNQTVVAMARCMMKAKNMPGEFWGEAVTTAVYILNQAPTKSVRDKTPFEAWHGRTPAVHYFRTFGCIVYVKEVKPHINKLDDRSKAMVFLGYEPGSKAYRIYDPVAKRIVVSHDAVFDKAASWPWASPGEEDGVASSQETFTVRYEVAAVEVPSRHSDSMSSPAHSGPPAPSISASPGVPAVEFVSPPAETPDVDDDNVGPRRFRTVANILDTTSPIELDSDELHLAAAEEPSNHTEAAQDTLWQRAMQEELKSIVENNTWTLADLPAGKRPIGLKWVFKLKKDETGVIVKHKARLVAKGYVQQQGIDFDEVFAPVARMESVRLLLAIAAHLGWFVHHMDVKSAFLNGELEEEVYVAQPPGFVDDKHPHQVLRLNRALYGLRQAPRAWNAKLDVSLHELGFTRGITEHAVYTRGTGNARLIVGVYVDDLIITGAHSETIQSFKGEMHSLFRMSDLGLLSYYLGIEVHQGNDGITINQSTYAQKLLKMGGLAGCNSACVPMEPRLKLTKNSDRPSVDSTFYRSLVGSLRYLVHSRPDIAFAVGYFSRFMESPRDDHLTAVKHILRYVAGTVNYGCKFAHSGEEGIHLLGFSDSDLGGDVDDRKSTSGALFFLGSSPVAWLSQSKLPLSSSITTSSSKLYTPSCSSSTASASRGPQAAVDRCTPRADLRPHAPSPRQFRSSDASALRPPSPLFARMRHCPTPPVAAPPASRASLLRPPSPRFALRPRWTVSFHRRGVKEERTILKGITDKVRPWEVLAVLGPSGRGKSTLVSILGGRLAGRHAGMVLAGGRAPCRAVQRRAGFVAQDDVLHPHLTVCETLLFCAMLRLPTSAPATAEAATAEAVISELGLASCADTIVGNAGICAYLSAKYMVIL

SEQ ID NO: 118709 - protein, 748 aa, Oryza sativa
  Clone ID: PAT_MRT4530_21996C.1.pep
MEFYPLPGTTPATPIVYITQADQHEALLMNMKLTFMVVLMALMGSIIYSTGFLRLSFRRLPTCGGMFLYRYDLTRIVRFVLNFVFFQFVPLLSSAFSQSENRSKTELLLILLWMLLAEIIRKKGDRTVHAHGLRLRHTSHLVWIGYLICSKLPDDKSLSITFAVLWFLCFVKLVLSAVNRWFASYSFHTARNPLVIAGYMTKVMDKYNRDGDGRSAVPANDMSNCKFVVMGRRVVVAGGGHQHQATYCNENEQKHLHLCIAEPDDYSNSDSNKEWPLVTVKTIWEMREKHKNIFHGKIGDFLEDLCLSFSLFKMLRRQFEHYPMVEVGSDMARAMMLDGLLKLNFSSPGSNSSHDQLQRPFQVLLMELELLKNYYQQAAAPVVMSQPILFCTNFLSSIIFLYFFIDAVVDILIVNKDAAPLYCRIMGWGRTPVNSPSLILSLTMLLVLTVILIEAHDFLTSFVFSDWNIVRMLCSYDRPSRRWLQKIYSVVIYIRSCLLSSSKNKMTICQVSILDACGPIDKHFARTSQVTLPASATAQIIQALCSCHIINRSTGAINLPSGIDSNQMTTTEAILAWHLATELLETTTTMDKQKKECQIASVLSKRCGCRACPPSRRCRKKKIAKTAISGDQWENSFQDPTVRRGVKLFHWLREKPADEAWDELARLWVHLVIYLAPSNDVQGHAKALASWGADLITCLWALCTHAGITRQPPPEQHDVLVHDEQQIDVVVAHRQPTLNHDDDNSINV

SEQ ID NO: 118710 - protein, 144 aa, Oryza sativa
  unsure (1)..(144): unsure at all Xaa locations
  Clone ID: PAT_MRT4530_21997C.1.pep
AWLSASSRCRRPSPQAAASCIRPPVRLQQHQQVGAPRPPSIAVRPAPISARMRRRPASFGVRTRRHSARRRPSSPAXRHCPTPPVAAPPASRASLLRPPSPRFALHAPLLRHAPPPXPPRPPPPRPPPPRPSSPSSASRRAPTP

SEQ ID NO: 118711 - protein, 1414 aa, Oryza sativa
  Clone ID: PAT_MRT4530_21998C.1.pep
MAQDGKLDLLLKMMEEAEKEREEMDRKREESEALNLVELQLLKLAMESRIPLVEKQVSELGGSANDLAKRVNSLQASVEKCQREVQQNALYKGESSQGPTQFPNDDDLNGNSPNPFLFTPQQGWRNPPQFNSVSPFTPENSGCPIFDSGMASIGGNVPSMSCPQFDGENPQMWRDNCEIYFEVYGVHPANWVKVALLNFTGSASFWLQSVRNELVGISWLELCDRVCPQTGSVTEYVERFDSLMHQLLAYDNALTPRYFLTKFVDGLKDDIRGAVMLQRPEEILEGSRKPSYRKSDGTNFNKVFSRPTQPTVWPKSPAQTTGDDRKLIESGKIRVKGLIQGTKLLMLIDSGSSHSFLDENIVQTMQGVTSLPQPVKVKVASGEVLICDKQLPDYAWWLQGRCYRTNFKLLSLPGYDAILGIDWLQGLGVMRIIWVQKWLEYEINGSPVRIQGVMPKVDACPLISGDKLMGLCKMGALMHLFQITSETDIHKPEIPIMIQEVMNEFNSVFEEPQGLPPRRRCDHSIPLIPGSKPVNLRPYGYNPAQKDEIEQQVRDMLKSGVIHPSVSPYSSLALLVNKKDGTWRLCVDHRLLNAITIKSKYPLPVIDELLDELAGTGWFSKLDLRAGYHQIRLVAGEEPKTAFQTHFGHFEYRVMSFGLTGALATFQGAMNETLASVLRKCALVFFDDILIYSPTLEAHAQDLRTVLQLLQDHQWKVKLSKCSFALKELNYLGHTIGVAGVSTDPSKVQDIVNWAIPTTLKKLRGFLGIAGYYHKFVKNFGVISKPLTNLLRKGVEFVWTPEVHESFEQFKKALASAPVLALPDFTKPSVIETDASEIGIGAVLSQDKHPIAYMSKALGPRTRGLSTYEKECLAILLAIEHWRSYLQYAEFTILTDHKSLMNLTDQRLHTPWQQKAYTKLLGLQFKICYKKGIHNEAADARSRCDHNSSLEVVAISQHLNRAQQFMKSQADKKRSFRAFAVGDWVYLKLQPYVQTSVAARANHKLSFKFFGPYEIQEKIGVVAYRLVLPASSSIHPVFHVSQLKAAQGFKGDASVHLPVQSSTKQVPVAILDTRVRKSGMSVIPQVLIHWSDDVIANATWEDLEDLRTRFPRALAWGQSSFQGGNIVKAALGADADIAKEEKIEGRGRKNVKAAQVLTTIERWQQCRVVDNKLMAMVDGLMEDGAGSGEDDRGGWHNSAAPFAENSRERESEDSQSWALLSFGIRAMSAPASGSSRTHRRTGRRLSPSPPRVSGRQLVVQRIVKEDGSVYYPILRRSNYSDWAVLMRVNLQAQGLWDAVDTGDVPYQEDCQALSAILRAVPAEMVRPLAEKDSAKDAWDALKSMRVGADRVKESRAQKLRQTFESMRFKNGEHLEDFSLRLQSLEMICLKRRLFENCFASFPGGIAKWLYRLKP

SEQ ID NO: 118712 - protein, 118 aa, Oryza sativa
  Clone ID: PAT_MRT4530_21999C.1.pep
MEIKRVKIAVHVARIISMILAIGVMCVIYIPTSYVKPLSYRYVLVAMWFEVLMCCTWGMAIAALSTALFARQHRFCISVFKCTRFLVGFVLAVSVGFLSAVKALGMLWILGSQFPRAE

SEQ ID NO: 118713 - protein, 46 aa, Oryza sativa
  Clone ID: PAT_MRT4530_2199C.1.pep
KPLNCKKKRKRPSQKKKNMNLKSKKSKNPKRVFGQKKKKKKKEKQK

SEQ ID NO: 118714 - protein, 102 aa, Oryza sativa
  Clone ID: PAT_MRT4530_219C.1.pep
MAQHLLAAADKYGLHRLKMICLEILSSHIDANSVATILVLAEKHYCYGLKEACFEFLNSLAVLSAIAARGKESVGATADAGVRGNAENMQVARDQGTLLIND

SEQ ID NO: 118715 - protein, 100 aa, Oryza sativa
  Clone ID: PAT_MRT4530_21C.1.pep
TRSRVRSWTLSGAWWGFFFFFFWVFFFFFFGFLVFFGPVVSVFFGGSLAGGFHPGGGPLHCLAYIPAGVEPGAERVKAGGAKGGANGQEWGCAQGPLSRG

SEQ ID NO: 118716 - protein, 372 aa, Oryza sativa
  Clone ID: PAT_MRT4530_22000C.1.pep
MAEAAVRCLRDGRLDGEHAPALAVASNIQCGPLAAGAMLHLAAAVASNAAAGKAQARGLVIVAFDRSPEVYLDFMRRRGLDPNALNRCVRILDCYSDPIGWNQKIRSQQQQESGADLCSANKENVTIFRNVKDLDKLMCSTIDLGRGFAGEGKIYFSIAVDSISSMLRRASVSSISSFLSNLRSHDQISSIFWLIHSDLHEPKFSRAFECLSTMVASLEPAVVDSVYEEEIPGNISFLEENYSKAKFYLRLKRRNGRVKHLYEELHVEGNDVRFVSAPSVQFNLELSEKERSDKANVVLPFEHQGKGEPIHIYDGRRSLPEAQQDSNLTASALLDEVKFPKSAAPKGEIHYFRDSDDEQPDSDEDPDDDLDI

SEQ ID NO: 118717 - protein, 51 aa, Oryza sativa
  Clone ID: PAT_MRT4530_22001C.1.pep
RCACEFIGSDSHHSSLTTMSNKHFEWSLLVISYSRQKCIMVQEQLKQNQQF

SEQ ID NO: 118718 - protein, 711 aa, Oryza sativa
  Clone ID: PAT_MRT4530_22002C.1.pep
MLPTPRRVKNKAPAPVQLTAEHLIREARELHGDGSVTVCLPAESKKRRIVDADELAEHRLERRARFEAIVRRAGSGRGGCGDASSEWMRYARWEEFPGGGGGDPARARSVYERALAGGAPAYRDHGVWIKYAQFEARGGRVGHARNVLDRAVAILPRADRIWSEYLRMEDLLGATDNARVVFDRWTSWRPGADAWAAYAAFELRHGELDRARAVHERHVAALPCADAFILFAEFETKLKNLDRAPRVYEHAGSLLAAAGDNDDTAVLLAAFADFEERCGEPDRARAIYQHALRGEPPEPRAEELREKLLSLEKRFGDRHGVEDSIVTKRRSQYERAVTTNPLCYDAWFDLIRLEESANTGDANRIRDLYRRAVANVPPAAAAAEKRHWRRYIYLWINYALFEELDAEDVARARGVYRECLRTIPHKKFSFSNICVMAAELEIRDKNLAAARRLLGNAIGVAPRPKLSRRYIEIELQLGNVGRCRILSQKFIEHAPSSSHVWRSYAALEKKLGETDRARSVYDLAVSQPALDAPELVWTDYIQFEIDAGELDRARQLYERLLGKTQHLNVWVSYAEFEATACSGGAAIAGNAAEKAERVRRCRAVCRRADEHFRGCADDPAMKEARAMLLQQWLAKEAAFGDLGEVEPVEKKTPRRVKRKRSLLADGNGGGGGCEEFFDYIFGDEEDATAAAGFKLMKAAYEWKNSGHVITY

SEQ ID NO: 118719 - protein, 368 aa, Oryza sativa
  Clone ID: PAT_MRT4530_22003C.1.pep
MAAAEEGPEPLKYQTLALKVSIHCEGCKKKVKKVLHSIEGVYKTDIDVQHQKVVVIGNVSVDTLVKKLVKTGKHAEPWPEPAPPPPAAAAAANSPGGGGGGKKKKKNKNKNKNPANGQPGEPAPPAATAEVAAGGGGGGGSVPPENDDHGGSCDEASDDEGNKQGGGGGSPKTMVAGDGQGGGAGAVAPPFAMTPHGKQPVAPPGNGNGGGGGGGGGGKKKGKKGGGGGGGGNGNGNGNAAAAAANATGDGAGAVVEASPQDAPTKPSPGNAGPLAVVDGGVFYPPATPMSYPASYYGGGGGGHMPPYVMSYSTAHPLRSSAYYYPMAGGFGGGGGGGYLYSTAAAAPPPASSYYMFSEENANACSVM

SEQ ID NO: 118720 - protein, 207 aa, Oryza sativa
  unsure (1)..(207): unsure at all Xaa locations
  Clone ID: PAT_MRT4530_22004C.1.pep
MAVTRGGRSTVDWVHGPGRSGAPRVAHVAPTWRTRGSHAGGRTDGPDLPPGRSDGGCGSRPVRAGTAQAGPAAMARGGAARTQRRREAATGRRRGAAAEQGXEGLEGEREMGEGEGAGQRQRPWRCSPAHDAERVPAADSDGGGVDGTARTTANATASTAWLGTAASGDRSGGGGGGEEGDGTRALEGTGALGEIGKKREGRVGMLK

SEQ ID NO: 118721 - protein, 107 aa, Oryza sativa
  Clone ID: PAT_MRT4530_22005C.1.pep
DTTLTSGLLECDKESLAEEANRSCPSRYCDLGEDWKTLELGWESWIHKHELGRCKIGLADQTGSTLYLMNLWTCTGAKQISQAVVFVDLVRANTVLAPSAKRGFFIN

SEQ ID NO: 118722 - protein, 182 aa, Oryza sativa
  Clone ID: PAT_MRT4530_22006C.1.pep
MDLPQQQQHPEINLDENRGARVMLMEKTLLNPIFLVALMMYSLLIGNSLSGRTATPHGYGAPPPSPAGLATFMGVSFMCLSFVTVGMVHLVLVLHLTMLWHMEERVDNLLHRGGHLCRDQSLNDAEAIEAGWLDCLRVVGRLYVRALPPRGGARGSVVGQASRGDVRCGGPTMYRPVLVVLQ

SEQ ID NO: 118723 - protein, 177 aa, Oryza sativa
  Clone ID: PAT_MRT4530_22007C.1.pep
VKNSLLPSMAKLLKLNEDYFVRQFSDRPTTIARFNYYPQCPRPDLVYGMKPHSDATILTILMVDNDVGGLQVLKDGVWYDVPTKPHTLLINLGDHMEIMSNGIFKSSVHRVMTNPEKERISVVLFYFMNLEKEIEPALELIDERHPARYKRVKIMDYLAGLFEHFLQGTRVIDTVKI

SEQ ID NO: 118724 - protein, 375 aa, Oryza sativa
  Clone ID: PAT_MRT4530_22008C.1.pep
MEDVRSTLLVQELAGMRSKSVPRQYIVQQEDQPTIAATASFPIVDLGRLSQPDGDANEAVKLRQAMESWGLFMVTNHGIEDALMDNVMNVSREFFQQHLGEKQKYTNLIDGKHFQLEGYGNDQVKSDTQILDWLDRLYLKVDPADERNLSVWPKHPESFRDVLDEFLIKCDGVKNSLLPSMAKLLKLNEDYFVRQFSDRPTTIARFNYYPQCPRPDLVYGMKPHSDATILTILMVDNDVGGLQVLKDGVWYDVPTKPHTLLINLGDHMEMGDGGILDVVTTMVASFSEPRLCGVAIMSNGIFKSSVHRVMTNPEKERISVVLFYFMNLEKEIEPALELIDERHPARYKRVKIMDYLAGLFEHFLQGTRVIDTVKI

SEQ ID NO: 118725 - protein, 93 aa, Oryza sativa
  Clone ID: PAT_MRT4530_22009C.1.pep
MPAWPDSRAVPGLHPQHGRPARSSYQAFAGSAATRAAIAGVTPVTVGGDFGDGTAARSEAERAARSQAVSTHDDVEELRYVAGLVFVFLGWTW

SEQ ID NO: 118726 - protein, 188 aa, Oryza sativa
  unsure (1)..(188): unsure at all Xaa locations
  Clone ID: PAT_MRT4530_2200C.1.pep
MGELGVAMIEELVAVERRIKLGGGVVSARAETGGGDGRERPARGSSGQRPWRGRSHARRPARDDVANATAVCRRGRPPPPVAVVPLPPVSAAVLLPESPPSPSLPSAPLSXLPSRARLRHGGSAKPRQWRRPWCAVVRHRRRCPPPINTAPARSPLPQARLRPRPWPPHVGFPASAAPAKARSTRLWT

SEQ ID NO: 118727 - protein, 142 aa, Oryza sativa
  unsure (1)..(142): unsure at all Xaa locations
  Clone ID: PAT_MRT4530_22010C.1.pep
QTSRKDHNLCYLLQTCAAIAKIRAGLELAGDAAECRXGRGEDEGREKAAXGQVGLRQRQGRNGRRGMSEERTRARSDAGELVAVPRSCAANLVAISRSCATDLVIISRSTSRTSSSSSRFAPLRQVRCHPPLPRRGDETEDT

SEQ ID NO: 118728 - protein, 1209 aa, Oryza sativa
  Clone ID: PAT_MRT4530_22011C.1.pep
MSKVIATTLLLSVISHGAYPAMGSAWEEEDFARNCPPSWCSDSGPEIRFPHQLESSNSSSSSSCSASCARLACSGPDTILHHPFLGPCKVTAIDYKKAVFQIIPLVDSLSSYPLQKLIIDNLPEPDYHSSRCSLYNAQPGKIVCCSKVLTPSMSPTNDYDGNIADHAVVGPISCLSDPSHFSYLVDAYEDIYSLPLDCKAVSKGIVPISGAVTADGPTFKQLAERILNFAETTVSWSEGGIPDNCSRVKVIAEVHLKVEMFLRTYGTSKPTRYTFSEVKKIARCFKEKVGQGGFGTVYKGKLPNGVPVAVKMLENPTGDGEEFINEVATIGTIHHTNIVRLLGFCSEGTRRALVYELMPNESLEKYIFLRDPNTQELLSPDKMLDIALGIARGMEYLHQGCNQRILHFDIKPHNILLDYNFSPKISDFGLAKLCPRDQSIITLTKARGTMGYIAPELYSRNFGEISYKSDVYSFGMVVLEMVSGRRSWDPSIENQNEVYFPEWIYEKVITEQDFILSREMTEEEKQMVRQLALVALWCIQWNPRNRPSMTKAVNMITGRLQNIQSQGSHAQWRWEPGSRVDFGAGTGGAAAVCWSAAAARRSPPVRDQQHQLGDRHRPALHQDCTIVTCNFWADSTNYAAGATLNITNRCSFTVWPAAVPVGGGMRLDPGESWALDVPANSGAGRVWARTGCSFDANGNGSCQTGDCGGVLKCKNSGKPPQTLAEFTVDQTSVQDFFDISLTDGFNVPMDFLPVPAPEQRHGAPPCSKGPRCPANITSQCPSELKAPGGCNSACNVFKQDKYCCTGTTGTKTCEPTTFSLPFVRMCPDAYSYSLDDSSSTTFTCPSGTNYQIIFCPPTDLTSSSPVPPPAPIAIGPSGLDSSSKRGGRLVATIVVSVIGSTSVLTIIIASIIIIKRRIRRHQEMQEEEQEFEELPLQGMPRRFTFQQLQEATDQFRDKLGQGGFGSVFLGQIGGERVAVKRLDQSGQGMREFMAEVQTIGSIHHINLVRLIGFCAEKSQRLLVYEHMPKGSLDRWLYHQQGSPAPALDWWTRYKIITQVAKGLSYLHEECMMRIAHLDVKPQNILLDDNFNAKLSDFGLCKLIDRDKSQVITRMRGTPGYLAPEWLTSQITEKADVYSFGIVVMEMISGRKNLDTSRPQMSEVVKVLEGTTSIETDIDHDFVATNPVSFGVAGIVDSDPPVASNLSGPR

SEQ ID NO: 118729 - protein, 59 aa, Oryza sativa
  Clone ID: PAT_MRT4530_22012C.1.pep
KHFSNLLQVCSGCVPVSGVQLSKAGTVLARPRVVRTVGARVAPPRPRPRPSLLRPRRGP

SEQ ID NO: 118730 - protein, 630 aa, Oryza sativa
  Clone ID: PAT_MRT4530_22013C.1.pep
MGTILATAFLLSVLSHGSYIAMASSSWDDQDFFKHCPPSRCSKHGPEIRFPHRLQSSNTPSSCGSSHAKLICSGQDTILHHPFLGPCKVTAIDYKKAVMKIIPFGGSSSPCLLHKFNSTNLSADVNDQNQLYLTEPGRIVRCSKEFTTSRASMIDGYNTVIADKVVRLIPCLRDTTSHFSYLVSTRLYLYALPLDCMVVSKGNIPIPNPYTAGLTFKQMAERIINSAEITLDLLLGSIPYNCTRCEQQGQRCAFSSQRNQTFCMHHGSRVKVIAATSVAAFVAVSLVVATVLYLSLKQRYNEEVHLKVEMFLRTYGTSKPTRYTFSQVKKITRRFKEKVGQGGFGTVYKGKLLNGVPVAVKMLENPTGDGEDFITEVATIGRIHHANIIHLLGFCSEGTRRALIYEFMPNESLEKYIFLHDHNTPQELLSPNKMLDIALGIARGMEYLHQGCNQRILHFDIKPHNILLDYNFSPKISDFGLAKLCPRDQSIVTMTKARGTMGYIAPELYSRNFGEISYKSDVYSFGMLVLEMVSGRRSWDPSIKNQNEVYFPEWIYEKVITGQEFVLSREMTEEEKQMVRQLALVALWCIQWNPRNRPSMTKVVNMITGRLQNIQVPPKPFVSYESHPMP

SEQ ID NO: 118731 - protein, 67 aa, Oryza sativa
  unsure (1)..(67): unsure at all Xaa locations
  Clone ID: PAT_MRT4530_22014C.1.pep
PASGELGATEAGHPMAEVFPGCRRGDLERAAASLPAFCXVDIPNGPVGVCXWLGXPGAAGSRSLGYY

SEQ ID NO: 118732 - protein, 113 aa, Oryza sativa
  Clone ID: PAT_MRT4530_22015C.1.pep
MAKPPSFGRHPSSRMYSLCHGGPSLAVLTPLSLPCGFGVFAVGLRPVELNTLNLNPDWSHGFGRWFEVWIVVLMAIKDRYFEEKTHPSCDKMDLRAFRMRLHGLEDHMSAKTT

SEQ ID NO: 118733 - protein, 58 aa, Oryza sativa
  Clone ID: PAT_MRT4530_22016C.1.pep
VHFYATAKCIQWLRVMYSMTVAAASIGSSLESAASPVVRSQVSSSTSSRAGSACTLGR

SEQ ID NO: 118734 - protein, 107 aa, Oryza sativa
  unsure (1)..(107): unsure at all Xaa locations
  Clone ID: PAT_MRT4530_22017C.1.pep
GRPAAARRARSSPPVRLWRPWARRASPRPGTRXRTPRHEGSCDERARRRSPRPEEGRRRRRSPHYCPRARRRPRGRHRRRRCARRRAAYSCLSSKLPWETTSTACPV

SEQ ID NO: 118735 - protein, 120 aa, Oryza sativa
  Clone ID: PAT_MRT4530_22018C.1.pep
MAIVLLHSSARLELRKDGWLAELAGGLTEVYVDSGSPHAVNTSLAMLALLYSGQIERDPTPLYRAAKQLISMQLETGEFPQQEHVGCFNSSLYFNYPNYRNLYPIWALGEFWHRLVASKD

SEQ ID NO: 118736 - protein, 579 aa, Oryza sativa
  unsure (1)..(579): unsure at all Xaa locations
  Clone ID: PAT_MRT4530_22019C.1.pep
VATWLRKTFEVLLLTIEVDAKKRVEAEERTRPEYSYLKRTVESRIPAAEKKVKELRVAFQSLSSKVEKLEDKIQRSTVGDMHSGVGATTYPAVPKEQQFTPPPGQNFPSLNGKREHNFLSPVPYCFEISVRHEPTASVDLSDTIHPMLCPQFNGANPQMWKSNCERYFDIYNIHPNHWVKIATLNFCGNATLWSLQSIRIQIQGINWLTLTDLVCSRFTXDRHQALIRXWIHIYQSDSVCDYVKRCDGLMHRLLAYDRTMHXPFYLVTKFVEGLRDDIKPGVMMXRPHDLDIACALALLQEEXLERVKQILSYYVKSEPTKSXSEDTTSSSTYXITFKHHASMNKEDKFAALKXYKRSKGLCFTCGERWGXDHKCAXSVQLNVVQELLEAMQEESNYDQKMEVEDLSDQGNLMAISHEALWGTEYSKSRRLRGCIQGTDLLMLXVDSGRTHYFIDDQVGQKFPGIRKLNHPLSVRIANGGTIHCCQELPNCTWWMQGYNFRSDFGILPLGLYDVILGMDWLEFFSPMQIDCVQKWMQFXYQGSLVKIQGLLPQTSHCTTISLNNFMVWSRRACWQLFTN

SEQ ID NO: 118737 - protein, 72 aa, Oryza sativa
  Clone ID: PAT_MRT4530_2201C.1.pep
RANSKQGWVRERVSVAESWRKMKVAGTLEGELSIISCFYQSCLILCYFLRLILGEGSKISFHQIMIIKESSH

SEQ ID NO: 118738 - protein, 76 aa, Oryza sativa
  Clone ID: PAT_MRT4530_22020C.1.pep
KKASGLIHTKNYVYGKLAGHTGHSVEKIHEDLSREQRFDADGAIENGSIDTCGRHARSKTEGSTAQRRDMRNLGLG

SEQ ID NO: 118739 - protein, 700 aa, Oryza sativa
  Clone ID: PAT_MRT4530_22021C.1.pep
MAPSPVILVMAALFLQAATMAATTALTVSLPGCPSSCGSMVIPYPFGVGAGCHLAGFAVTCNRSYHPPKLFLRDADAAEVLEISLLNSTVIVSSAVRYDAAKGEGAWGRGLAGAFRLRERRNRLVVVGCNLQAVLLDGDDIAAACTTICGGAGATWPAAADGELADYSCAGVGCCQASIYLGLTSYGVRLSPFGTSTGPPPPPPTSSASSSNQSDSALVFVADNEWFGGNASKLGSAAATMRPGGGGMPVALAVLDWAIGKSGCPPHGPDDTACSSSNSYCRNSTSTSLGGYSCQCDNGYQGNPYVANGCQALLVAIGGTIGIGIPSVFVIGMAMTNMIKARRAKKLRAVFFKQNRGLLLLQLVDKVIAERMVFTLEELEKATNRFDEMRKLGSGGHGTVYKGTLPDRRVVAIKKSNITVRKEIDDFINEVVILSQINHRNVVRLFGCCLETQVPLLVYEFISNGTLSDHLHVEGPTLLSWKNRLRIALEAASALAYLHSSASVSIIHRDVKSANILLDGRLTAKVSDFGASRGIPVDQGGVTTVIQGTFGYLDPEYYQTSRLTDKSDVYSFGVILVEMLTRKKPTVFESSDNVSLIALFNLLMVQDNIYEILDPQVISEGMENVKEVAALASACLRLKGEERPTMRQVEIRLERLLGGDILQGLSAELHCLPPQLSNTDTTSKLYNMERDFLLSSSFPR

SEQ ID NO: 118740 - protein, 47 aa, Oryza sativa
  Clone ID: PAT_MRT4530_22022C.1.pep
MLFHFDWMQIKLKMNNARRTLESKVEWLMSVPEDVRVTPLIKSLFDF

SEQ ID NO: 118741 - protein, 847 aa, Oryza sativa
  Clone ID: PAT_MRT4530_22023C.1.pep
MKGLWKQSGLAGMACAADVGAAGAGRRARLAVYVLAVAFAAFTAYVAVSSSSPPPAGEGASWFGGVYASTAPYRAQVSGFFSSIFPTGSSTPSPEQQPPPPRRGEGGGQVSSHGIDEHARVRSGAAHSVPVDPAASTKHSGSGGGGGAASNNGGGGSAPPPGNLAGSGTPPAKGSGGDGGGAPANNSTSGGAPANSAVEQSSPAGDGGGSPSTASSSAGKSSSANTGEESVDKSNKQSGSGGEAPSNGDAVSDKKNSTAKADTEVAVKASSDNSTGTGSSAKGESNVGSNSSAGSGNGVASSVSSAAVNSTAVKTDAKDVVVATSTDSAGSVSDVKADLSNRSDTPPASGSGHSNHTSDVTVSPAKGNAKDGGADTNKASGNVASTSNQTASTAMVAKKAGGSPSKNQTSVASTNSKNQNQTSAGVASGGSSGTTSKQEETTSQGSVGSSKDHPAQAINSKTSNYSEVLVKGNGSSTKQASQKQPDKKVDWIKEMASCDMFHGNWVRDESYPLYPEGSCPHIDEPFDCYLNGRPDRAYQKLRWQPSSCNIPRLNPTDMLERLRGKRLVFVGDSLNRNMWESLVCILRNSVKDKRKVFEASGRHEFKTEGSYSFLFTDYNCSVEFFRSPFLVQEWEMKVSNGKKKETLRLDIVEQSSPKYKDADFLIFNTGHWWTHEKTSLGKDYYQEGNHVYSELNVVDAFHKALVTWSRWIDANVNPKKTTVLFRGYSASHFSGGQWNSGGSCDKETEPIRNEQYLSTYPPKMSILEDVIHKMKTPVVYLNITRMTDYRKDAHPSIYRKRNLTEDERRSPERYQDCSHWCLPGVPDSWNELLYAQLLIKQHQMLQQ

SEQ ID NO: 118742 - protein, 153 aa, Oryza sativa
  Clone ID: PAT_MRT4530_22024C.1.pep
MAPATATAVASPSTSSRLLHRSLLSPTPTAARCLRPPLCRGRLRTVRQVVANGDVSSPSSDVAAEESAAAPKIGKRVRVTAPVRVHHVSKAPDLDICGMEGVVKQYVGIWKGKRITANLPFKVEFELRVDGQDKPVRFFAHLREDEFELVEDE

SEQ ID NO: 118743 - protein, 81 aa, Oryza sativa
  Clone ID: PAT_MRT4530_22025C.1.pep
GLILRCSRTFLSIISGVVAGIWGFTGLMGFVFYLLVMMVASLGLLLKAKFSIHTYFDSWNRILIEGVFGGLMVSHTGAVTL

SEQ ID NO: 118744 - protein, 74 aa, Oryza sativa
  unsure (1)..(74): unsure at all Xaa locations
  Clone ID: PAT_MRT4530_22026C.1.pep
PLLLPXLLLSTXLXXDRFDQLXXRLFPPXXGVXKXLLXEXPXASAFRKRQTSXXVWTSLRGLLRVPPXTSSFFL

SEQ ID NO: 118745 - protein, 103 aa, Oryza sativa
  Clone ID: PAT_MRT4530_22027C.1.pep
FHLPAPVMSIHSENNYLMVGGLFLAKEKEAAPWNDNLGYKDQPGHKNQSFKAQIKNFFFSSQGGKYKWGRTIPWGQGCFLYLKNNHRQIIRWHLFKFRDELGG

SEQ ID NO: 118746 - protein, 64 aa, Oryza sativa
  Clone ID: PAT_MRT4530_22028C.1.pep
IYSSFMFILLRCVELIPQIRNQFPLACPNLFFVAFEIHLNRIVIHILIKECLKGKLVQVKKKKK

SEQ ID NO: 118747 - protein, 77 aa, Oryza sativa
  Clone ID: PAT_MRT4530_22029C.1.pep
DEPNRHRCPIRGRDRRRHPPLGMKTDRIRSETSSIIFVFIFFLGIEIGIGNPDTKTESNIIEYRYGANTNRNEYGNE

SEQ ID NO: 118748 - protein, 97 aa, Oryza sativa
  Clone ID: PAT_MRT4530_2202C.1.pep
MGGGRCARRHGGTPDPATVRRDRVMGGGTRGRPPGRTGNPRACGDVASLTPGSGSDRRGRRGLAVAAQGYLGLRPDLRKEAAQPTQIGSHLQGESAA

SEQ ID NO: 118749 - protein, 103 aa, Oryza sativa
  Clone ID: PAT_MRT4530_22030C.1.pep
MPWITNSIKTQTNPWDRERKRRRFTYGVTRVILTVEPDGFGGGRWLGFGRGERRSFFELGMNGDEKRRGRCGIEKKRIKTLGPPARPVRPALCGRLNRLVHTG

SEQ ID NO: 118750 - protein, 175 aa, Oryza sativa
  Clone ID: PAT_MRT4530_22031C.1.pep
MCSISFANTESEQVAQRVQQLAEESLQGSFQSCREKDILTEALGTKEHPGRTRGLGATVPWKAGFTDNSDLYKKHRRSKGECEETNVAQLKKEIYDELAAKIDSEVEERLQQALNQRSVASPVEPSPNTIQDSVVSPVPVEPSPNTNQGNCGAVAHSHPGGSIIHDRYPVDDIEE

SEQ ID NO: 118751 - protein, 103 aa, Oryza sativa
  Clone ID: PAT_MRT4530_22032C.1.pep
MPWITNSIKTQTNPWNRERKRRRFTYGVTRVILTVEPDGFGGGRWLGFGRGERRSFFDLGMNGDEKRKGRCGMEKKRVKTLGPPARPVRPALCGRSDHPGHAG

SEQ ID NO: 118752 - protein, 236 aa, Oryza sativa
  Clone ID: PAT_MRT4530_22033C.1.pep
MGVHVFTDRLAFVAADWCLRIHGWPIMPPLVGVFAFTVDRLRRRRLVSSPIRIQIQICIIGIHGFKPISYASGMDQSEHHHRLAFAAADWCPRLYGWLVTPPLLGVYVFTDRLAFATTDRCLCLHGWPIMPPLLGIYVFTDRLPSLPPTGALAYTHWQTLLPLLCKFCYFTNHDVYMGLDISARVAKFDVMLIYYKWFSNFQEFYSDIFNMYLHSSDGYSMTTSYSSRLYVQLFPN

SEQ ID NO: 118753 - protein, 522 aa, Oryza sativa
  Clone ID: PAT_MRT4530_22034C.1.pep
MAAATAADVAEDTASVYSGKLTLYVFLTCGVAATGGLIIGYDIGISGGVTSMDTFLGKFFPSVLHQEQTAQGTSQYCKFNSQPLTAFTSSLYLAALVASFFVASFTRALGRKWSMFGGGVSFLAGATLNGAARNVAMLIVGRILLGIGVAFCGLSTPIYLSEMAPPRLRGMLNIGLQLMITVGIFSANLVNYGAAKIRGGWGWRVSLGLAAAPACVIAVGSLFLPDSPSSLINRGRHEQARRVLRRIRGTDEVDDEYGDLVAAASEIEVYSGCSARRRPWRDVLQRRYRPQLAMAVLIPFFQQLTGINVIMFYAPVLFKTIGLGGDASLMSAVITGLVNIVATFVSIATVDSLGRRKLLFQGGCQMLVSQVIIGTLIGVVFGTSGDGNISRALAVCIVVFICVYVAGFAWSWGPLGVLLPSEIFPLEVRPAGQSISVAVNMLCTFAVAEAFLPMLCHMRFGLFYFFSGWVLVMTLFVSAFLPETKGVPIEKMTVVWRTHWFWGRFYCNQDADAHVQVANSKV

SEQ ID NO: 118754 - protein, 486 aa, Oryza sativa
  unsure (1)..(486): unsure at all Xaa locations
  Clone ID: PAT_MRT4530_22035C.1.pep
PNLLHSCCRDYGYPIPPPNSPWFPXTRRTMPPQISVLDCMVGWSHHRCWASTSSPXGLPLSPPTGISAYTVGWLQHRCWASTFSPXGLSSSPPTGVSAYKASLLCHRCWASTSSPTGXPSLPPTGALAYTVGWSHHRCWASTSSPTGXRLRRRRLVSPPARLAYYAAVVGHLCLHRPARXAAADWCLRLHGWPIMPPLLRILVFTDRXPSPPPTGVSACTASLLCRRCWASTSSPTGCLRRHRLPSPPPTGALAYMVGWSHHRCWASMSSPTGSPPCMTPTGDIVFTAGHVAATANRRYHLQLNLSTSAADWFLHFLGCMILPLVVGLIVFTADPLRLVYTATTTDGHHRLLLPTGYATADWSFYLHNCAFSLPVCFCCCRLVFTSSRQCNFFIIVERLHLYYLQHWQTLLPLLCKFCYFTNHDVYMGLDISARVAKFDVMLIYYKWFSNFQEFYSDIFNMYLHSSDGYSMTTSYSSRLYVQLFPN

SEQ ID NO: 118755 - protein, 103 aa, Oryza sativa
  Clone ID: PAT_MRT4530_22036C.1.pep
IQIQICIIGIHGFKPISYASGMDQSEHHHRLAFAAADWCPRLYGWLVTPPLLGVYVFTDRLAFATTDRCLCLHGWPIMPPLLGIYVFTDRLPSLPPTGALAYT

SEQ ID NO: 118756 - protein, 297 aa, Oryza sativa
  Clone ID: PAT_MRT4530_22037C.1.pep
NTYLSSFLLSYPNKTSQRKAHKNVTHARKQMQSTTIVVFSLLDVSKSTLVFGLGTFLLISSSYAKDLNYNTITAASYLGLVYLGLRFLSKSILNRYDDAERSGERYLVGEEEAIWLLRLVLPYINEVLLNLRSLFSGEPATTMKLALLLFAMARCGNFVTLWTLAKLVFFGVFIIPKVCSSYSTQLARYGKFWLERFRDGWESCSHKKAVVAAVFTLVWNVSSTVARVWAVFMLVVAMKCYQQRMMEYGWSSTVEDSQEATAAATGDDESPQEETPARSSPDNSNLAEFIFERVDYA

SEQ ID NO: 118757 - protein, 368 aa, Oryza sativa
  Clone ID: PAT_MRT4530_22038C.1.pep
METGIFIQVRAPELSVDNKVVFLFEFVPGEIRDDARSLRPTSDAFIGEPSGCDPSQGREGRRGGAGPAARSGRGGRGGGASAGPATRSGKVSDSVDSYEHIRAEEIRALVRNLFGCASHAVAVRECLVNATLRNILHMSVGEKWSGVYGSADGEVFRRTESSAVTMEWAMAELLRCPDAIATATDELDRVVGRARWVAESDLPDLPYVDAVVKGALRLHPVGPLLVPHHAMEDTVAACNDVPVGTHVLVNVCAIARNPTSWPDRLDVFLPERLRVTRRLRSVSPAAADLAKSYDAQLRHLSVTSTGAECRATTDGRLSRHANAQIVKICAVNEDAMMASSPCPVRRCRELCAEETAAQKGDGWKYGML

SEQ ID NO: 118758 - protein, 63 aa, Oryza sativa
  unsure (1)..(63): unsure at all Xaa locations
  Clone ID: PAT_MRT4530_22039C.1.pep
ETIKFIHEEMFYLCESPHQMEILMXGINSRMAWVGFISMGICISVAGFQVWHLKTFFERKKFV

SEQ ID NO: 118759 - protein, 467 aa, Oryza sativa
  Clone ID: PAT_MRT4530_2203C.1.pep
MAAAAGAGEPSPYAEAAGSDLANARAPSPVVGKHLPSGAVPRHAYVFDGEGGFADAAWDVAAAAPGAFTWHHIELPRQQPGGAAAKPLHHAQALIELLCPPLTLQEILAFVATGPHCGVVDGGGGGGAGALLLRVSSPGPVGSAFALRLAARVTDSSVVTVSVGGVPRLAFGTTQASLLSEVPLGVTASLSDEGHGGGRAVEGGVVIEERLLESLLAMNHADGAHTDNPVPRTVSNLLVHVLGTHVDHVHDIVTRLEMELDSIELHLDKGGHFMRKLLLDGRRFPKMHLDLQRLLQVVSHGDQVFPRVKEKCASKSWFASEDIVALEDLIGRLRRLKENLGFITNRVTTLQASLDSWQSEQINKSLYYLSFLSIIFLPLSIVTGVFGMNVGGVPWTEQKNPANLDGFFNVMLICVVILLILLLCFLFPSLYSHVSAWRTRRALARSSSQNKRHLKLFKGHKDGYMRL

SEQ ID NO: 118760 - protein, 109 aa, Oryza sativa
  Clone ID: PAT_MRT4530_22040C.1.pep
PVWQKGKPLFLQKVGFTLKTPKFCKRSGWWGPHFPFGAFTFFGPKFKRFHPPGLVVFSFMGIWAKAHPFLVFTAPFNLGFPPGVLGAPGPFPPLGGFFNRFLKKKGLGV

SEQ ID NO: 118761 - protein, 86 aa, Oryza sativa
  Clone ID: PAT_MRT4530_22041C.1.pep
MACLVKCGLRELQRSLLGPLQFLRVRWDLQRDLAGIADFGSFTLKERRAQDGACGGCLGWANSSRGPARPKQREMGKGNPEYGLDC

SEQ ID NO: 118762 - protein, 67 aa, Oryza sativa
  Clone ID: PAT_MRT4530_22042C.1.pep
SDHIIQSLYNLCLSPPCSNSPMQRTQWISQSLPLLCVTNRCPIGCHYVLSHYILDNARSPSSLFTAF

SEQ ID NO: 118763 - protein, 629 aa, Oryza sativa
  unsure (1)..(629): unsure at all Xaa locations
  Clone ID: PAT_MRT4530_22043C.1.pep
MAPRKPTKAGSTGEDPGNLGEGWSCFLGKSLVKEADLGELRSAVSINAKPNMEINGTLESRLILLRKVARRLSTRDLCEEFCLLRISPLARVWDVSVIEGEEVLGLPRLVLPAGVEMRALEDAEIEASKMIRALTTAEFARLLQRQADGRVNHVYTGEFPSQSKPSRAGDDEVGTSKKHKRAVVKGDQVRTRRSVKVAVESDGDEEEEEDVEAGSKDDGSHDIVVANTLLAISSTAAKPVMTARRKKKGKVVQVGNGFSDNEGSDGTPTSPVLRRAASRGRRMSPPPASDAEAATGGSVSAPAAGANVAKDERVDAVPSPVRQREGKAPAVEASVSDVTLTAPHFVPADFATRPEITPFVDGVCQVIAPTEGLGLFTKLNEFSESCAAVESLFVRGLAAHLSAKKSALERLDGYRLRLRKSEEDLRHKEDERRVVAETLKKANAENRSLRSDLEAARKQDAEQDRQLASAKENIKCLEARLVSAKDAAATLVPATESAKEACYTLQLALNDLGARAKGAPGEGGTVLDFSEWTQEAAGSVVEVAGAYGDCCARVSAGFVLSLLHTHGCDHIGNFPDFVKEEWPSNTQCSGAALRAFRKGFWEDGGRDGFGRMAAGXCAKIRLRENLERI

SEQ ID NO: 118764 - protein, 61 aa, Oryza sativa
  Clone ID: PAT_MRT4530_22044C.1.pep
LSCSLKNKINYAYLISCSHGDISFSPISQTIDPCIGHLYVENLLQWDLCLFLLYKHNRQVM

SEQ ID NO: 118765 - protein, 311 aa, Oryza sativa
  Clone ID: PAT_MRT4530_22045C.1.pep
MDQRIEHSYLPIRGLKLHIAHIGKGEAATLLFVHGFPEVWYSWRHQMIAAAAAGFRAIALDFPGYGLSEPPADLTQASWQGLMNDLLAILDSLSIPKVFLVAKDFGVKPAYDLALCHPDRVCGIVSLGVPPLVESLSFSGLPEGFYIHRWREPGRAEADFGRFDTRRILRTIYILFSRSEIPVAKQGQEIMDLADESTPMPQWFTEEDLSAYTDLYEKSGLMTAIQIPYRTKAAKAEGANPRFEMPMFVIMGQKDYILKFPALKEYMSSEKLKEIAPDYGITYIPEGSHFVQEQFPDLVNQLVIDFVSKHA

SEQ ID NO: 118766 - protein, 648 aa, Oryza sativa
  Clone ID: PAT_MRT4530_22046C.1.pep
MAGASSTSASARATPPARSLPPLGASGSQQEPAATASHHAAGAGASSRPMRRKGRKQKQLWPKTVLRKWLNIRSPESDFSADEGEATGDDDTDSEFEYEEMCHWERQLYDEERRLRGLGAETIGIYLIRIIIVFNTFIGKRVLFNSMFSSLFCHTLKIVKYGVDSAKLRDTTWVCVGTWNVAGRLPPDDLDIQDWLDMEEPADIYVLGFQEIVPLNAGNIFGAEDNRPVAMWEHIIRETLNKISPDKPKYKCHSDPPSPSRFKPSDDVEDELVSESDSESGGEVHPWNEQDFTVDDDSVHSNKYEHSTSGPTETTVNGNNFSRVPSMKIFDRSHNLSFKDYVSSLEEPIHQKMLTKTLSYSERLGMIWPEQPLDILAQRLPDSTKPFISEKALRSCLSFKSAHGDSNAFPDDCLVHDFNIKSALVKTKRPYFVRIISKQMVGVFISIWVRRSLRKHIQNLKVSTVGVGAMGYIAPSFVHFGRTISCTFTMRWIIWLGDLNYRINLSYEKTHEFISMKDWNGLFQNDQLKREFKKGHLFDGWTEGVISFPPTYKYKVNSEKYTSDEPKSGRRTPAWCDRILSFGKGMRLQAYRTVDIRLSDHRPVTAVYTSDVEVFCPKKLQRALTFTDAEVEDQFSFEEESTSGIFSF

SEQ ID NO: 118767 - protein, 92 aa, Oryza sativa
  unsure (1)..(92): unsure at all Xaa locations
  Clone ID: PAT_MRT4530_22047C.1.pep
AGFGTSSCRHQLATKNPYIXAXXPXLPGVXXATLXLXSNXXXHXXQXSGTXEXQXPXGXGXGXXXPEXXGAXTXGXXXXXNXGGXNXXXHXP

SEQ ID NO: 118768 - protein, 406 aa, Oryza sativa
  Clone ID: PAT_MRT4530_22048C.1.pep
MGSKKRSPQHPAAAAPPPAVGGGGGGEVSGDGGASTANGPVVPKPSEVAPFLTKVYDMVSDPATDNVISWAEGGGSFVIWDSHAFERDLHRHFKHSNFTSFIRQLNTYGFRKVHPDRWEWANEGFIMGQKHLLKTIKRRKKSSQESPSEIQKAPVKTAPGTENIEIGKYGGLEKEVETLKRDKALLMQQLVDLRHYQQTSNLEVQNLIERLQVMEQNQQQMMALLAIVVQNPSFLNQLVQQQQQQRRSNWWSPDGSKKRRFHALEQGPVTDQETSGRGAHIVEYLPPVPETSGQVNPVEGAICSANSQPVPSPAVATPMDMQTSNVADTLGSSEEPFADNSTLHEWDDNDMQLLFDDNLDPILPPFENDGQMGPPLSVQDYDFPQLEQDCLMEAQYNSNNPQYGND

SEQ ID NO: 118769 - protein, 189 aa, Oryza sativa
  unsure (1)..(189): unsure at all Xaa locations
  Clone ID: PAT_MRT4530_22049C.1.pep
KLRPNTAFPHETPFPHTDKKVPMANLNSYHLATWADSAKTRNPTGPGSSHENMWLHVRLKSITYEVKSLIDQGNLPNYNSTQLNSRLTQRPYPATITQIHYHLTRHGDSGTATSAAFSGDGAQLQXEQRRRQEEAEANPVAQHRAPGRIGDDPSXRAADTGVEXEENGAEGKEARPQGFTSGCGAVGRR

SEQ ID NO: 118770 - protein, 768 aa, Oryza sativa
  Clone ID: PAT_MRT4530_2204C.1.pep
MSSSSPSGHLLASVSSALAVLLLLLACVELGDAAAAVGVYRLIQYDLAGAPLGSRAAALNHHAAALPLPAAADLSRSALVAPLLDLPLAFLRDYLADKKYLGGLLILLPKKLNHEPNNEDKGQVKASLAELEQLLLHQQVPYPVYFAFQDDHFDNLLADIRKIASSGQPASATTGGYKLVVSTPEPRKVASPTISNIQGWLPGLKGEGETEQLPTIAIVSNYDTFGAAPALSVGSDSNGSGAVALLEIARLFSRLYSNPKTRGKYNLLFGLTSGGPYNYNGTNKWLRSFDQRVRESIDYAICLNSVGSWDNELWMHVSKPPENPYIKQIFEDFSDVSKEMGVSVGIKHKKINVSNPRVAWEHEQFSRFRVTALTLSELSSPPDFLESTGGLYDTRESADAESVIRTVRLVSESLANNLTVPVRHIYGLKGKNIDVFAENSSLAINPHYIQSWLDLLSRTPRVAPFLQKNDPFIAALKKELSEHTADVHVQSDVLDGMFTFYDATKATLNVYQVASVTFDLLFLLVIGSYLIILFSFLVITTRGLDDLINIFRRPPSRKELAVRRRGRPAKAEPGMTSETRTPGSCAWTGTPTVIVVTGLRVGVVVVELTVIRSKYGVFVYLFFCPFGDAASREVRSPPPLPAASTSPSSPSAFPDDEPDSGFSPDDPDLLRNRPVPDRLLVVSAGVAANLLFAFLIVYTQALTVGIPVQAQLPGVLVSEVIPGSVAASRPAASPNRQLLERGEGRWGERRKKMRRVNDKWGPCGPHHF

SEQ ID NO: 118771 - protein, 57 aa, Oryza sativa
  unsure (1)..(57): unsure at all Xaa locations
  Clone ID: PAT_MRT4530_22050C.1.pep
MIFPQDXINMVPLEYSRVKCYNDISVRLRMNSVTIIYQEYFCAIAGNYISSNVVKKY

SEQ ID NO: 118772 - protein, 76 aa, Oryza sativa
  Clone ID: PAT_MRT4530_22051C.1.pep
MAMQNAITEIKDGLDKVTKSVLALRAGFEAKKVRGETTTMTTTPSLSATWSELVFFLDGKVRYTYFEVSCRLLDLN

SEQ ID NO: 118773 - protein, 420 aa, Oryza sativa
  Clone ID: PAT_MRT4530_22052C.1.pep
VWAVEELLVPALPWRSSAEEEEAATRYLLLRSAYGRYLGATDAAPGEAARNATARAAAASSDVRQPHDREGCCGCCCCCCRLPFGLVEATQRDRDEEEPEVDAIMWLATRCGDQDVQEDRDARGVVLLRDRSGRYLRCNKSILACRRSISVDANFEDEDTLLWEVVRVPPSEDMPELPIATQPLREIQFVDEADLDNISEGENWATVQIRGRSVRLLREKIAELVGYDDFTMCVSAGRHGQFTPLLIDLPRRRETLQIVLVRPNTDVPVCKCYMLVSAGSKLTDYPKPIVGSRSKVHRIKTMSDALKHSGFVPVLVISSPKDAQITSSTSMAISNAMKFLRVGIKFKFFNLNLPKFIFFAITHLSKFKAANNHVSSKPQFGGGDLVAFCVLSTQLISIAYPPKMVELERKIGEDQYDSFI

SEQ ID NO: 118774 - protein, 362 aa, Oryza sativa
  Clone ID: PAT_MRT4530_22053C.1.pep
MAWRRGTSRGYRVGMEVFDDVVFARLRSHVYGSYLHADEDGRSVYHGSLRGGASQHNAVWAVEELLVPALPWRSSAEEEEAATRYLLLRSAYGRYLGATDAAPGEAARNATARAAAASSDVRQPHDREGCCGCCCCCCRLPFGLVEATQRDRDEEEPEVDAIMWLATRCGDQDVQEDRDARGVVLLRDRSGRYLRCNKSILACRRSISVDANFEDEDTLLWEVVRVPPSEDMPELPIATQPGFFVRVCFPQPLREIQFVDEADLDNISEGENWATVQIRGRSVRLLREKIAELVGYDDFTMCVSAGRHGQFTPLLIDLPRRRETLQIVLVRPNTESYDQLIFPNPNALPSAEATDEDDPTIE

SEQ ID NO: 118775 - protein, 633 aa, Oryza sativa
  Clone ID: PAT_MRT4530_22054C.1.pep
MPAAMAGGTGGAGGGGGRALDCRSFWKAGAFESASAPSREFHDALVAGDFDRARVHPKFLHTNATSHKWAFGAIAELLDNAVDEICNGATFIKVDKSVNLKDNSTMLVFQDDGGGMDPEGVRRCMSLGFSTKKSKKTIGQYGNGFKTSTMRLGADAIVFTRANRGSNVTLSIGLLSYTFLRRTMKDDIVVPMLDFKIQDGHIVPLVYGSQGDWDSSLKIILEWSPFSSKEELLQQFKDIVSHGTKVAIYNLWMNDDGLLELDFEDDDEASLHIIFVAIMACFLIDQRCKLYKDILLRDQDKASGGVTKAQKEIVQQHISHRLRFSLRAYTSILYLKKFENFQIILRGKPVEQIRIADELKFKKLVTYKPQVAHDSQVVSVKVDVGFAKEAPVLGIFGMNVYHKNRLIMPFWKVLQEGSSRGRSVVGVLEANFIEPAHDKQDFERTPLFIRLEAKLRQIILDYWKEKCHLIGYQPVDPQLRSQYKAALKDSGNPGPKSQQKASTSRRTGGHTSNLLPETYDDTEVIGLTANGSGSRVRSFGQAQENSMEPVGLDENSVDIGSEGALDPYIMEKLSEENIGLFTRREELRQRDTQLRQTVGELEQQLAETKKKCAQLADDLRIRKSQQQQQPPYI

SEQ ID NO: 118776 - protein, 358 aa, Oryza sativa
  Clone ID: PAT_MRT4530_22055C.1.pep
MASRRGTSRGHRVGMEVFDDVAFARLRSHMYGSYLHADEDGRSVYHGSLRGGASQHNAVWAVEEFLVEGEDEEVEEEAPVRYLLLRSAYGRYLGATDAAPFEAARNAAARDAAANSDVRQPHAREGCCGCCCCCRLPFGLVEATQRDRDEEEPAVDAIMWLATRCGSEDVQEDRDARGVVLLRDRSGRYLRCNKSILACRRSISVDANFEDEDTLLWEVVRVPPSGDMPELPIATQPGFFVRACFPPPLREIQFVDEADLDNISEGENWATVEIRGRSVRLLREKIAKHVGYDDFTMCVSAGRHGQFTPLLIDLPRHRETLQIVLVRPNTESYDQLIFPNPNALPSAEATDEDDPTIE

SEQ ID NO: 118777 - protein, 112 aa, Oryza sativa
  Clone ID: PAT_MRT4530_22056C.1.pep
IDRIPSAAIVDFVQSGFVAACFPPLLRVIEFVGEDDLDNIGEGEIWTTGRSVRLLREKIAELVGYDDFTMCVSAGRHGQFTPLLIDLPRRRETLQIVLVRPNTESYDQLIFP

SEQ ID NO: 118778 - protein, 406 aa, Oryza sativa
  Clone ID: PAT_MRT4530_22057C.1.pep
MEVFQEALRIWKSGSYLHADEDGRSVYIGSLPRAGGDSRHGTMWAVEPPIDAAAPLPQYARLRAAYGRYLGTPDSYGSPLPFLPVDAAQRDRDRVEMDAIMWQPVACSGSDVVGGRDARGVVLLRDRYGRYLRGSNNLLAPRRSVPVKPYVVNEHMFRWEVVRVPLSEARPELPIAAQSGFVAACFPPLLRVIEFVGEDDLDNIGEGEIWTTVETRGRSVRLLKEKIAKLVGYEDFTMCVSAGRHGQFTPLLMDANFEGEDTLLWEVVRVPPSGDMPGLPIATQPGFFVRACFPQPLREIQFVDEADLDNTSEGEIWTTVEIRGRSVRLLREKIAELVGYDDFTMCVSAGRHGQFTPLLIDLPRSRETLNIVLLRTNSEANDQMIFPNPNALPSAEATDEDNATIE

SEQ ID NO: 118779 - protein, 124 aa, Oryza sativa
  Clone ID: PAT_MRT4530_22058C.1.pep
GLLLFLVAVPPPRRRRRRRPEQNLRLLRRRRRRRRGRERGGGAGRDAAAARLPPDALPGLLQVLRAPAPRQQPHTRHLHLDFILPTPIRARSCCPCVLLAGVEAGDLTGWQERHAVLVLSKAKV

SEQ ID NO: 118780 - protein, 118 aa, Oryza sativa
  Clone ID: PAT_MRT4530_22059C.1.pep
MESSPACEGNGASATIGGNRMVAEVRAGSVSATAATARHGGGYRGGGAWPETAVLDFIGTVVQYDNANDGGTEKRVHPRMSGACDERSCKVCCRGQEGGHQAAGSCVAWCRSGASTAS

SEQ ID NO: 118781 - protein, 286 aa, Oryza sativa
  Clone ID: PAT_MRT4530_2205C.1.pep
DKIPKMINQPTCRVHTSYHQAVTTTGRLSSSDPNLQNIPIRTEAGRRIRQAFIARDGYKIVAADYSQIELRIMAHLANDEGMITAFANGQDIHQATAAEIFGLSLAEVTSEQRRSAKAINFGLIYGMSDFGLANQLAISRDEAKEYMARYFQRYPNVQQFMRDIRESASVKGYVETLFGRRLYLPEIKSNNAIRRKAAERLAINAPMQGTAADIIKIAMISIDKQIRADQNIKMIMQVHDELIFEVKQECIEYYTGLIKTEMEKAIAMKVPLIAEVGVGANWDEAH

SEQ ID NO: 118782 - protein, 178 aa, Oryza sativa
  unsure (1)..(178): unsure at all Xaa locations
  Clone ID: PAT_MRT4530_22060C.1.pep
MGNGGMGRAPIFGNPGKKKKNGPPGGAEFFFLKQKKKRGRPPWVWNWAKNPPAQRGKPKKPGGPPNLGGPPGLKTPPGFSGPLGGKKSPLPFXPGGKKKKNPQGPGGQFQSSKTPPPRGKGPLPPQGAXLRQSPPRENFFPPPGKRRGGQNFPGEKENLGWGGSLKRPVRGGAKTPFF

SEQ ID NO: 118783 - protein, 301 aa, Oryza sativa
  unsure (1)..(301): unsure at all Xaa locations
  Clone ID: PAT_MRT4530_22061C.1.pep
RGGGEARPPTAVTGGAGSGGYCRKAAAAAEGDGTRAKAGGAHGRGGKRKGERGFLTDXTTAGGRATTAARAAGRSWVEMESSPACEGNGASATIGGNRMVAEVRAGSVSATAATARHGGGYRGGGAWPETAVREGADVAGEVADLAGDVGRRESERGGFEIESRPLERARGPGDAGESAATWARGAGAEWRRDVERRRRRRGGFGGGMGGWSFGSSGRRWETTDRGGGLRPPRLIAINEGLFASHLSSDQFFSHRSGSFSRRQCDWCHDQDGDSNVLDFIGTVVQYDNANDGGTEKRVHPR

SEQ ID NO: 118784 - protein, 84 aa, Oryza sativa
  Clone ID: PAT_MRT4530_22062C.1.pep
MAISPVGPGTRRGPAPTGAGVDFNLRGVGAGAPVMSGGGGGGGGGTIRMFRFDRVPGLAGRSDVTLGEECSLLAHTRQLAAPSG

SEQ ID NO: 118785 - protein, 834 aa, Oryza sativa
  Clone ID: PAT_MRT4530_22063C.1.pep
MAARGTKRKFEAAEPLICSSPSSASPIDVGKLGEESVELELSEDSTKSYLFDAASGATAQDDVELVTRALSSVAAKSPEAVRQFIRRLTPEKMAGGGHTHWTEDELHAFLESCMEEIEARNITSSCPKTQGYANLQAKMLSKAGKHVSKQQVKNFWGACRRRFQTWTWLESMATGLGTNPYTGSIDASPEWWEAMEGDQTNWHARISSIFGHAQELSRSPRPMRKCARSFRNAPLRFIAEHHAVFRGRCVVGNRSSVPGTELEQQLQPANAELLDVEDLVDVPDAPQSPDPPSRSRPTRGRGKRVATPASGSRGSKRTRSDSTGEALHRLADLRVKSSESKAQKQREREAMSARACIELVKSDGHLFSSDVYHMGVLLFSDPYFCEFFLGDAITPEMREYYIRFHYAMKFPNGGGFFPPPSCSGGWFPPGGTRFDGGDGGTLGMMVLGEPTELQCVEWMSTTSGNTSGSKDGYTSEEDETIMELLADAFQRNVSTRAPRRVPQQSGMQWVMETMNNPEQCHNMFRMRADQIHALYNLLVSRVLNAVNEMAADIIKQVDPNNFPQHYRLAQDDAFLPFAGVVGAIDGTHVPLLVRRDNSIPHRNRHNETSRNVLTIIGWDERVMFVDVGWPGSVHDQRVLSEAVRRYPFAFPRLPWGKYLLVDSGYPSRYHVDDFEGNEAPPPVGKEETFNYMHSAMRNTVERDFGVIKSQWRVLRGIPLYGEEAAQTKIIVATFALHNFMTDSNDPHFMTQNPLYNGYPRVPQAPPLRSCISKNKYSKYKFHTVRHTGGQTFGGSGNGARADVARKMKEVDHLLAKLENEGVEINGKIASIIED

SEQ ID NO: 118786 - protein, 418 aa, Oryza sativa
  Clone ID: PAT_MRT4530_22064C.1.pep
MPPLILVMAALLLPAAADATSSVLLGINYGRVGNNLPPANAVPPMLSSLGVGRVRLYDADPATLRAFANTGVELVVGVPDECLAAVSTPSGAASWVRSVVQPALPATKIAVLTVGNEVLTGANSSSLSRSLLPAMQCLHDALAQLGLDKQVAVTTAHNLGVLATSYPPSSAYFRKDLLPLLCPILDFHARTGSPFLVNAYPYFAYAEDPTGVELEYALLEPTYAGVADPSSGLHYPNLLVAQVDAVYHAIAAANTAAARAVEVRVSETGWPSAGDANETGATPQNAARYNGNVMRLVADGKGTPLRPSVALRAYMFALFNENMKPGPTSERNYGLFKPDGTPVYELSYRLPKDNTNSGGGGGGIGGGSGTIGGGGEYNGHGEDGGYYSISASAKPADNLKSVVFIMLGAFANTRNVKA

SEQ ID NO: 118787 - protein, 57 aa, Oryza sativa
  unsure (1)..(57): unsure at all Xaa locations
  Clone ID: PAT_MRT4530_22065C.1.pep
TCKLSVSWXWSSQSCGVSCWTSXMLSGKPATARQSTQDESKLMMYRYYRIPKKKKKK

SEQ ID NO: 118788 - protein, 47 aa, Oryza sativa
  unsure (1)..(47): unsure at all Xaa locations
  Clone ID: PAT_MRT4530_22066C.1.pep
FFFFFSXFGFLSFXTYRXFDLVLFCXYLXSFLRFVVPRLKKKKNDPF

SEQ ID NO: 118789 - protein, 83 aa, Oryza sativa
  Clone ID: PAT_MRT4530_22067C.1.pep
MAAEKRRAGGWGAAGQLARAASASVEEGIKALQLYSKEVSSRLLDFVKSRSAAAKAAAAAAPSEGDAPAASSESEVVDPQPAE

SEQ ID NO: 118790 - protein, 63 aa, Oryza sativa
  Clone ID: PAT_MRT4530_22068C.1.pep
MGLRREGTDIGRSRVRAGGRASSAGAHGRKRPGGGRGGCGMEHRGRAMTLWAVRRGAAMRARV

SEQ ID NO: 118791 - protein, 159 aa, Oryza sativa
  Clone ID: PAT_MRT4530_22069C.1.pep
LESELADRDRRIQYWRTKFEVAELERTMVEVKKDQAVEALRGREVWFNSYLRSCYMAMAGVCRELQVPRRNPEESAARYISWLNGACAQLEGIGKRSDEALKQECRRSSRFVGGHVLACIRDHRPQLHLEFLHEGFSCSRRAAAEIDGLAKSMAPLAEK

SEQ ID NO: 118792 - protein, 210 aa, Oryza sativa
  Clone ID: PAT_MRT4530_2206C.1.pep
MGRPPCCDKANVKKGPWTAEEDARQAASVHLHPWHRKLDLRSSASRSDQNMVFLFISSFALSVMRRQGRFGGQRRRGDPPSDLLASVESVASATSRSIHVSKFSVGFPDDDPDSDFSPDDPDLLRNRPVPDRLLVVSAGVAANLLFAFLIVYTQALIVGVPVQAQLPGILVSEVIPGSAAAGRPRCRTAGCWREERGDGEREEEEDEGSE

SEQ ID NO: 118793 - protein, 76 aa, Oryza sativa
  Clone ID: PAT_MRT4530_22070C.1.pep
PLSPPPPPPLPPPDGPPAFPTPPPRPPPPPPPLRPPAAKPPRAPSTAAHPPRRPSPARSSTPRAPRPRPPPPRAVQ

SEQ ID NO: 118794 - protein, 937 aa, Oryza sativa
  Clone ID: PAT_MRT4530_22071C.1.pep
MASAALSLAVAVVAVAVAAVVAVARGALRRAAARREEVRRLARLAAVEAEVAEREAYCYARGRGGVAGAPLWTVPEVASPREDEEEEEEEEAAAVELEMPAARQAEAAAAAAAVKGVCVVSYNFLCMRILLFDSDTFKCQISHWRQGHKDECHPPRVDARPDNITVVSSVKKGVGMYNSFEQSVKSSVEPAVEVNKSVAAVPELSEANLVSDGVDNERKKMRGQKASITAKVSEDVLDNNRIRSVDSSSLPTSGKACNIQDATVNENFSKTSAGSSSSRVERSTTSEPELNHSNKQASGTDNLKSSRGLPSVSTVGTISSIHGSEKEAAMPNNRSLVKNIPRQQAAAKVVRHYPSEMTLFPYEHFVKLYNFDKVELRPFGLVNLGNSCYANAVLQCLAFTRPLTAYLTEGLHSRNCNLILSQNCVTYHGSKKEWCFMCEFEKLILEGRRGKSHLSPTGILSHLRDIGSSFGPGREEDAHEFLRYAIDTMQSASMKEAKKNGVYGLPEETTLVQLIFGGYLRSKIKCTMCQGSSEQCERILDLTVEIDGDINTLEEALHRFTSTEILDGDNRYNCSRCKSYERAKKKLTISEAPNILTIALKRYQSGNFGKINKAVRFTEYLNLSNYMSTADDISPVYQLYAVVVHHDVMNAAFSGHYVCYVKDTQGKWHKMDDSQVKPVSLEKVLSKCAYMLFYARCSPRAPNSVRKMILAQDSSCTKKAKQMVDPGPPSLEGGSYLSRHQGGQSCRDHIVYDLTYTFGGSSYTVVESPSPSDSSSLFSNSDAGSTSTFSSDSTDSTRNSTSMEEYDYIFGSSDQMYPVSTVVIPEEHELSYSRQRSSLNPSTSSQYVDQAAEVEMLHQHQHQAGRGGWDEGDVMPFFYSNQGKHHDSSRSSNISSSNRKLTEQRRTIGEVDHGPGEGHGSVLLRRAARERIAQAIY

SEQ ID NO: 118795 - protein, 101 aa, Oryza sativa
  Clone ID: PAT_MRT4530_22072C.1.pep
MVERSAVYFDPKVKTHTSLAHHSTTWVVASVRLGPESMQPASAMQAPPQLLLRYSNRHLRNAVAVPAYERERESHLDAEQVIFPVLNPFNHPGKMSGIPDL

SEQ ID NO: 118796 - protein, 82 aa, Oryza sativa
  Clone ID: PAT_MRT4530_22073C.1.pep
QDSCVVPFMLQAAHLVSDLLLPLSFKYAALPITCLFPFLYFMVSMYSLLHLIISSCVLSYSITWVAQRRLPNFGRTLFGFIS

SEQ ID NO: 118797 - protein, 145 aa, Oryza sativa
  unsure (1)..(145): unsure at all Xaa locations
  Clone ID: PAT_MRT4530_22074C.1.pep
MGDSQYSFSLTTFSPSGKLVQIEHALTAVGSGQTSLGIKAANGVVIATEKKLPSILVDETSVQKIQSLTPNIGVVYSGMGPDFRVLVRKSRKQAQQYYRLYKETIPVTQLVRETAAVMQEFTQSGGVRPFGVSLLIAXYDDNGPQ

SEQ ID NO: 118798 - protein, 94 aa, Oryza sativa
  unsure (1)..(94): unsure at all Xaa locations
  Clone ID: PAT_MRT4530_22075C.1.pep
MNILERIRGGGDRAAVGEGPREPEPWVEISESISRLCSFDAGRVSVKVIQDSRPIHDKMIDSFLNKFFPSXYPYSVNXGYLTYTKFRGFRIFLG

SEQ ID NO: 118799 - protein, 258 aa, Oryza sativa
  Clone ID: PAT_MRT4530_22076C.1.pep
MGDSQYSFSLTTFSPSGKLVQIEHALTAVGSGQTSLGIKGASREAIPSLYFYCVMRIEKGRGAANGVVIATEKKLPSILVDETSVQKIQSLTPNIGVVYSGMGPDFRVLVRKSRKQAQQYYRLYKETIPVTQLVRETAAVMQEFTQSGGVRPFGVSLLIAGYDDNGPQLYQVDPSGSYFSWKASAMGKNVSNAKTFLEKRYTEDMELDDAIHTAILTLKEGYEGQISANNIEIGVIRSDREFKVLTPAEIKDFLEEVE

SEQ ID NO: 118800 - protein, 949 aa, Oryza sativa
  Clone ID: PAT_MRT4530_22077C.1.pep
MTKFAFSLMLEMDDLEVKNDEEYQMDPIEIKDGEEHSIEMLVEQPRFLEPICPEEVNEDTRVYPRVGDEYQVEIPNLATEEERMKLRSCPVDDSGIFGFDYPVGVGLAIPVTWTQKTSDHVKKEQTGFSGRSSCSSQDECNSHVTEDIPRNVPGCKVECDEHDEKLLKSAEQDINCLQNGKASDYIPLPGMTHYSWTDEEAQTFLLGLYIFGKNLVQVTKFLQCKTMGEVLSYYYGEFFRSDSYNRWAACRKVFKTFNEGTSTFEEFILSLRSTVGARVLVEAVGIGKGKYDLTGFALDPSRNHGISTRAEIPIGKACSSLSSGDIIKFLTGDFRLSKAKSNDLFWEAVWPRLLARGWHSEQPKDSSLVGKHALVFLIPGVKKFSRKKLVRGNHYFDSVSDVLSKVASEPRLLEFGVEGSNGEGGFKIENGWIHDAELEKSTVTDKKSSCYTRPSEPGCSPELMKFTVVDTSVVQGEEPCKVRSLRNLPTDASHGYMSSPHSEDSGSDSSEEHSDSEDSSQSYEHINTNQNKTGAKYVNEKKCKPPTGDRMDIDVLQKNSTFAGTMTSTNGHMSFDQGFSLMNNACSSTATILPVGTQRVHATNSSTEINFQFDQRVTPEPQIFLAASVAKRRRLVSCKNERTGRRNTAANKRQHGKQVDTAQHDVSKSNEASAGAKPFIWGSIPNSSTTINFDMSNIHLCHKQYNVPPTDEKMVLKEKSQDKHVIDLNIPQVPSDYESAVSYIVPSSDKNTHTMDRSIHSSETNRMDDCLPDINASCNGLLSEQRRQSTRSRPPTTRALEALACGFIGTKQKGAEGNFPSSSRSSRPVRRPRRLTDGAVSFPSDGEGSSSHFTDSAIIVNEWHMTNRQYQVLDNTPTDKSTDNRTRELFGADKSADKGTREFFGADKSADKGTREFFGADKSADKGTREFFGADKSADKGSHELFGIP

SEQ ID NO: 118801 - protein, 261 aa, Oryza sativa
  unsure (1)..(261): unsure at all Xaa locations
  Clone ID: PAT_MRT4530_22078C.1.pep
MGDSQYSFSLTTFSPSGKLVQIEHALTAVGSGQTSLGIKAANGVVIATEKKLPSILVDETSVQKIQSLTPNIGVVYSGMGPDFRVLVRKSRKQAQQYYRLYKETIPVTQLVRETAAVMQEFTQSGGVRPFGVSLLIAGYDDNGPQLYQVDPSGSYFSWKASAMGKNVSNAKTFLEKRYTEDMELDDAIHTAILTLKEGYEGQISANNIEIGIIRSDREFKVLSPAEIKXSWKRWNNLSQQSHVSNQWTPEQLPRSYIPFHS

SEQ ID NO: 118802 - protein, 265 aa, Oryza sativa
  Clone ID: PAT_MRT4530_22079C.1.pep
MASRRAIGLRPEMLMLPRPHRPSMMTNHMARVRKTYGSVMESIGKRKPSRARTRTRTGGIREAGSGHGFAVAVVTLSRHRCHLPSPTHASPRRRHRLPASPPAVVNSSEKTNRRTYGFNELDEALEYPDGPIRCKVYTLISPRDRMDGLDHPIVPLGPPPYLPNNPRLFPPQQKHPHAGMPPSLTAARRTWRHEHDGVGGPRNRTDPTVFAVRPHRRLIHPPIHPCAASDLCAVQRTHTSEGATSERDMDMDGHGKLHHSRLLVL

SEQ ID NO: 118803 - protein, 282 aa, Oryza sativa
  Clone ID: PAT_MRT4530_2207C.1.pep
RWTYNYNGTNKWLRSFDQRVRESIDYAICLNSVGSWDNELWMHVSKPPENPYIKQIFEDFSDVSKEMGVSVGIKHKKINVSNPRVAWEHEQFSRFRVTALTLSELSSPPDFLESTGGLYDTRESADAESVIRTVRLVSESLARHIYGLKGKNIDVFAENSSLAINPHYIQSWLDLLSRTPRVAPFLQKNDPFIAALKKELSEHTADVHVQSDVLDGMFTFYDATKATLNVYQVASVTFDLLFLLVIGSYLIILFSFLVITTRGLDDLINIFRRPPSRKVKGA

SEQ ID NO: 118804 - protein, 55 aa, Oryza sativa
  Clone ID: PAT_MRT4530_22080C.1.pep
MQCSSTPHSIALLLHMTCFPSTWQHMSVAQHAIQLQSVPTLLLVAAGWYLRSFVC

SEQ ID NO: 118805 - protein, 425 aa, Oryza sativa
  unsure (1)..(425): unsure at all Xaa locations
  Clone ID: PAT_MRT4530_22081C.1.pep
IMEDRSVLMERYEIGRQLGQGTFGKVYYARNLSSGHSVAIKMIDKEIIMKVSLVEQIKREISIMRLVRHPNILQLFEVMATKSKIYFSLEYAKSGKLFHKMARAKLNEESARKYFQQLISAVNYCHNXGVYHRDLKTENLLLDENETLKVSXFELSALPESRRQDGLLHTACGTPAYVAXGSKADVWSCGVILFVLVANYLPXNFIEMYRKIAKAEYRCPRHFSTDLKELLYGILDPDPSTRMSIXRIKISAWYKKPIAISALNSETRKKSCISEAPFSGPTTRISSERNQEPPNLHNLNAFDIISLSTGFDLSGLFGERYGXREARFSSRKLAAAVLVKLKEPPKSLNLKVTKTDNGVLKLATTKEXRKGRLKLDAEVSEVAPSFLLVELKKTNGDTLEYHRLMKEDIRPSLKDIIWTWQGDQQ

SEQ ID NO: 118806 - protein, 555 aa, Oryza sativa
  Clone ID: PAT_MRT4530_22082C.1.pep
MATRPRSSPSFFGGLRARELGGGRVPLPRASAARLPYLADLSSYPGGRGSGVIAVEHAGDPAIPFAISFCKAEQISHLLAVADEDGYVGIYDTRRRLPSSSSSLGKSAETKMSDWVAHNNAIFDVCWIKDGSQLLTASGDQTVKIWSVENKKCLGVLSGHTGSVKSLSCHSSNPELIVTGSRDGSFALWDLRIDPKTPNGHREACLMSSLVVKQAHSPTQRNRTRSRAKAASTSITSVLYLKDDISIATSGAADNIVKIWDTRNIKLSLSNRSSQAAMQPLEGVKHGISCLSQDSYGAYIAASCMDNSALHMDKGPIKAYTGSKIESFFVKSAISPDGTHILGGSSDGNVYLWQVDQPERGPIILEGHEGEATSVDWCASEVGKIATSSDDSKVRVWNTERRVFPNTSSPTVIRKRITAPNTGSRSASHELATTSRDVGVAACTSADGELPTGSRSPLQPRVLEFGTPESAKKRAFRLFQEDSLDIRKSPEAQMNSPSSVLSPPHSLKRRTIRDYFASSSSCEHTKHVHDLALLAHSSTVKNLKNAQYSYRCLKK

SEQ ID NO: 118807 - protein, 77 aa, Oryza sativa
  unsure (1)..(77): unsure at all Xaa locations
  Clone ID: PAT_MRT4530_22083C.1.pep
MVGGGHGGCTTYKGYXIPHTKRWHTAGGKGLCSXMWLWVIYRAKQHGAGLLVMRYPWXDGHDDXHSHGYGHDPEGTS

SEQ ID NO: 118808 - protein, 44 aa, Oryza sativa
  Clone ID: PAT_MRT4530_22084C.1.pep
CTNVIMGTTTTLMLNARRFGLSTSANRKSTVGLEMEAREFWLKT

SEQ ID NO: 118809 - protein, 129 aa, Oryza sativa
  Clone ID: PAT_MRT4530_22085C.1.pep
PTLLLSLGSSPFQVPPSVGLSLSPPSLVAPSPRSSSLSAARSRSSRRLPPPRPSPSCAATSLGSARSRASPAAGSLAPKTPGSPSSPSTRSSPSCFDLRRGSAAPPVIAKLRRRLHWIRSREVKPGHPS

SEQ ID NO: 118810 - protein, 178 aa, Oryza sativa
  Clone ID: PAT_MRT4530_22086C.1.pep
MDRQWMYADRRSKEFIDGVHYFLRVAEANRQRGFICCPCNKCKNQKEYSASRTIHFHLFESGFMPSYNCWTSHGEQGVEMEEDEVEDDNIPDFAQYVGFEGNQTGEEEIAADVYSHYYIRMRDNLTTHKEFITAVQEQLMGFINEEILDPKGEFYYDGNTIYRSLASELAASTTTSKS

SEQ ID NO: 118811 - protein, 241 aa, Oryza sativa
  unsure (1)..(241): unsure at all Xaa locations
  Clone ID: PAT_MRT4530_22087C.1.pep
VVTVMEIQRARRRGVFDTGFIDPRKVNVAMLDQYPQATEDNLVHLLKAQHYKTFILLPYNTELXNFTVFLYQISFPYELAKCFICNASHAHCRFHWVLLLFDLSADSMDKKESTFDKVFKLIDRAWYRFRHLVRDKWREKLRRKFKFPCAKQKQGTNLCGYYVXEYCHCLADQIITTRELDFIRIRDNQTTHKEFIAAVQEQLMGFINEQILDPSGEFYCDGHTIHRSLASELATTTTSKS

SEQ ID NO: 118812 - protein, 337 aa, Oryza sativa
  Clone ID: PAT_MRT4530_22088C.1.pep
MAKHGVASILTLALVLGVLAVTPKVADAAATPSDATADVAAAPADVVAALADAAADAATTPANAAAAIDAITGSNIALTMGVANENLSAFASDPSAVANWVKQNVQVYPGVNFRYIAVGNEVESGNTQNVLPAMQNMNSALSAAGLSNIKVSVSVSQKGVLAGYPPSNGMFSPEATSYMTPIAKYLASTGAPLMANVYPYFAYVGNLRAQIDDINYALFTSPGTVVPDGSKAYQNQFDAIVDTFYSALESAGAGSVPIVVSESGWPSAGGTAASASNAQTYNQNLIKHVGQGTPKRAGRIEIYIFAMFNEYDKKGADTEKHFGLFNPDQSPAYTINF

SEQ ID NO: 118813 - protein, 452 aa, Oryza sativa
  Clone ID: PAT_MRT4530_22089C.1.pep
MDRQWMYADRRSKEFIDGVHYFLRVAEANKRNCFICCPCNKCKNQKEYSASRTIHLHLFESGFMPSYNYWTSHGEQGVEKEEDEAEDENIPDWAQYAGFEGNQTGEVDRVAGDNNAADDLGQMLQDANEDCESEKEAHKLERILEDHRTSLYPGYEKGHKKLDTTLEFLQWKAKNSVSDKAFGDLLKLVKNILPEENKLPETTNKRNARMMRWHAEERQQDRMLRHPADGLQWRNIDRKFKDFGKDARNIRFGLSMDGMNPFGEMSSGHSTWPVTMYIYNLPSWLCMKRKYIMMPIIIQGPKQPCNDIDVYLRPLVEDLKLLWKKEGVYGKSKDTLEACNDLKHMEQRDDLHPEPKEKGSHYLSSASYILSKAEKESMFEYLESIKVPSGYSTNIKRIISTKEKKFTNLKSHDCHVLMTQLLLVVTRGILPDNVRATITKLCAFMNAVGGMA

SEQ ID NO: 118814 - protein, 57 aa, Oryza sativa
  Clone ID: PAT_MRT4530_2208C.1.pep
NGGSTKVAMMLSDAANMPSDGVNCGLVWHVQNPGLSHGVSNLVQFPGHLQARPSVSC

SEQ ID NO: 118815 - protein, 985 aa, Oryza sativa
  Clone ID: PAT_MRT4530_22090C.1.pep
MPPPAHHAAAFTAARATPPPPCHAATFAAAQRRHRMQRHAAAAVATPPPPRQALARCRHTAVNEHVNENEHVNVRCRENVNENENDRTNESENKHVNKRRVVGVVPQAGVEELALEDMSSKGKKGKGPDEPKRQVVLSGKRKIVGVEDKTDEDYDQLDRQPPFMVMIDPSILLSNEDTPYSRSDHKEGTIVRRKNTYMADRDEEQILYDTIAEGSSQYWNEEEGNEDPNQYLNKEGNVERDAEGNQQGHVERDVEGNQEEEASGSQPSVGQKRAHGQRGAAKKLEGRHIIMEVEEDGRPSAPAEAAKNYVHHSGWVVQDNVPVSTVYWRTTRARGDHESFVPDSEKEMLWTTMLKTFTLPAGTEDKVKRWTLKKMAEQFQSFKRDLYQKYIPKGQTPNFDTFPKLRDHWDEFVAYKTGGYSVAMPKWEEMEASFIERGIEPATANWPERSKFWYYAHGGTLKPVDGSLVFGDQIREAVRRLTDAVEASSQGTFRPNRDRDELTLTLQTPEHPGRTRGKGVIPWKIGFKEDIHTYRSRMRSKRDTEAKIADLEFRVSSYELRMQEEVARKVDERMAAHRSHDPQPTIPPAMVASGMAIPTDPSGTYHYRPIPAGYSKVEVELVEGAYEDLELDYPGGDVQTSPQLGEQPNQEIEPLVTGEDMTIEEFIIDTGLTTDQLLGVEPIEKAELKYMYELGKPLVKPELVQSLPTQMYKFHQLYMEMSATGREMIGARIRDPDFLQGDDILWINFKGIYEVYQLDARDVSIMSCWILMEIQRARRRRVFDTGFIDPRRVNVAMLDQYPQETEDNLVHLLKAQHYMTFILLPYNTEFHWVLLLFDLSACIVNVYDSMDKKESTFDKVFELIDRAWYRFRHLVRGNWRERLRRRFKFPSAKQKQGTNLCGYYVCEYCHCLADQIITTRELDFIRMRDNLTTHKEFIVAVQEQLMGFINEEILDPKGEFYYDGNTIHRSLASELAASTTTTSKS

SEQ ID NO: 118816 - protein, 101 aa, Oryza sativa
  Clone ID: PAT_MRT4530_22091C.1.pep
MAVTPTMNQIIQRALGFKASGSLLPLPRAAGSLEPTRLANAKHLDVICEPGTVDRTARDRRRLYGDTMENGRRGMTLLHLQGREGEGAALLATAIKIQEKG

SEQ ID NO: 118817 - protein, 447 aa, Oryza sativa
  Clone ID: PAT_MRT4530_22092C.1.pep
MEEDEVEDDNIPDFSQYVGFEGNQTGEEERDADVNDVADDLGQILQDAKENCESEKGTHKLDKMLEDHRTSLFPGCEQGYKKLDTTLEFLQWKAKNGVSDKAFGDLLKLVKNILPEGNKLPETTYETRKIVCPLGLEVQKIHACPNDCILYRGEEYENLEACPVCKALRYKIRRDDPGEVDGQLTKKRIPAKVMWYFPIIPRSNKGYKACTYCMDETKSTYLKHCRKVVYMGHRRFLAANHPIRKKGKHFEHKADHRMKPKHRNGKTVFAMVKDLNVVFGKGPGSQPIESEDGHAAMRKKNSIFWELPYWEFLDVRHAIDVMHLTKNLCVNLLGFLGVYGKSKDTLEARNDLKHMEQHGDLHPEPKEKGSHYLSPASYTLSKAEKESMFECLESIKKRHLVLTPKQKQQQRKKAILAGLQLHSTGKTQLGSEPWSSNSIFSSEALHF

SEQ ID NO: 118818 - protein, 126 aa, Oryza sativa
  unsure (1)..(126): unsure at all Xaa locations
  Clone ID: PAT_MRT4530_22093C.1.pep
PIVSPHGWGXFQFQAXVXRPGPRXXTLXXXXXXPLWXXXXSRYFRGPPXXXXXXNXXXXXXXGGPXXXXIXPRKKKGRXLKRVKXXVKXXXXXXXXWKXILKXXXXXSXXRXXQXXXFGXKNXXLX

SEQ ID NO: 118819 - protein, 1934 aa, Oryza sativa
  unsure (1)..(1934): unsure at all Xaa locations
  Clone ID: PAT_MRT4530_22094C.1.pep
MEEDEVEDDNIPDFAQYVGFEGNQTGEEEIAADGNDVADDLGQMLQDAREDCESEKEAHKLDKMLEDHRTSLYPGCEQGHKKLDTTLELLQWKAKNGRKYIMMPIIIQGPKQPGNDIDVYLRPLVEDLKQLWKKEGVPVWDEDKQEEFNLRALLFVTINDWPALSNLSGQSNKGYKACTHSNHPVRKKGKHFEHKADHRTKPKHRSGKTVFAMVKDLKVVFGKGPGSQHIESEDGHAAMWKKNSIFWELPYWEFLDVRHAIDVMHLTKNLCVNLLGFLGVYGKSKDTLEACNDLKHMEQRGDLHPEPKEKGSHYLSPASYTLSKAEKESMFECLESIKVPSGYSTNIKRIISTKEKKFTNLKSHDCHVLMTQLLPVVIRAIHPDNVRATITKICAFMNAISQKVIDPDRLEALQNEVVQCLVSFELIFPPSFFNIMTHMLCHLVKEIRILGPMYLHNMFPFERYMGVLKKYVRNRARPEASIANGYGTEEVIEFCVEFIEDLRPIGVPESRHEGRLRGKGTLGRKAITTVDNNLFRKAHFTVLQHSSLVAPYIEEHLALVRARNIGKSDAWITRHHIDTFPAWLRQHLMGNESINQQLAFLARGPSGSIATFQGYEINGYTFYTRAQDMKSTNQNSVVRVDAMGHDGTTATYYGAIEDIWELDYGPLKVPLFRCQWVRLTGGGVMIDDSGMTTVDLNKVGYSDEPFVLANDVTQVFFVKDMSSKGKKGRGPDEPKRQVVLPGKRKIVGVEDMTDEDYDQLDGQPPFTVTIDPSILLSNEDTPYSRSDHQEGTIGKSPRRRRRISPSSRARRPRRRLRLLRCRRISGTSHAAAAKASQRHAAAAVATPPPPPPRRRANRGPDAATPPLMNENENDRTNESENKHVNVRCRDNVNENENDRTNESENEHVNVRCRENVNENENDRTNESENENDRTKTSENEGTNVNENKRTNVNENERTNVNELGNMADRDEEQILYDTIAEGSSQYWNEEEGNEDPNQYLNEEGNVERDAEGNQQGHVERDVEGNQEEEASGSQPSVGQKRARGQRGAAKKLEGRHIITEVEEDGRPSAPAEAAKNYVRHSGWVVRDNVPVSTVYWRRTRARGDHESFVPDSEKEMLWTTMLETFTLPAGTEDKVKRWTLKKMAEQFQSFKGDLYQKYILKGKTPNFDTFPKLRDHWDEFVAYKTGEQGQAMMERNKENAAKKKYHHHLGSGGYSVAMPKWEQMEASLIERGIEPATANWPERSKFWYYAHGGTLNPADGSLVFGDQIREAARRLTDAVEASSQGTFRPDRDRDELTLALQTPEHPGRTRGKGVIPWKIGFKEDIHTYKSRMRSKRDTGAKIADLEFRVSSYELNMQEEVARKVDERMAAHRSHDPQPTIPPAMVSPSGNRSSCASTGQVGSQSMDAMQTQDESTCPVDDITQRTPCELHIPFKNLSIKVASGMAIPTDPSGTYHCRPIPAGYSKVEVELVEGAYEELELDYPGGDXTVSTSGSSIDSSSGSCTDSSSCSYTYSPASFSSDTFKVKGPPXAPPPTHTRATKKAKVDAAKNKDPGYDCTQEELDAYVASEVKRQFKPRSPEKKIPIDPSVRNFFRDMSASVKEAIKLSDYERTLKKASSGKSKPVPQLGEQPNQEIEPLVTGKEMTIEQFITDTGLTTDQLLGVAPIEKAEVKYMYELGKPLVKPELLQSLPTQMYKFHQLYMEMSATGREMIGARIRDTDFLQGDDILWINFRGIYELYQLDALDVSIMSCWILMEIQRARRRRVFDTGFIDPRKVNVAMLDQYPQETEDNLVHLLKAQHYKTFILLPYNTEFHWVLLLFDLEACTVNVYDSMDKKESTFDKVFELIDRAWYRFRHLVRGKWRERLRRKFKFPFIRMRDNLTTHKEFIAAVQEQLMGFINEEILDPKGEFYYDGNTIHRSLASELAASTTTSKS

SEQ ID NO: 118820 - protein, 31 aa, Oryza sativa
  Clone ID: PAT_MRT4530_22095C.1.pep
HSPIPPAMVSPSGNHSSCASTGQVGSQSMDA

SEQ ID NO: 118821 - protein, 958 aa, Oryza sativa
  Clone ID: PAT_MRT4530_22096C.1.pep
MPSYNCWTSHGEQGVEMEEDEVEDDNIPNFAQYVGFEGNQTGEEERDADGNDVADDFGQMLQDAKEDCESEKGAHKLDKMLEDHRTSLYPGCEQGHKKLDTTLEFLQWKAKNGVSDKAFCDLLKLVKNILPKGNKLPETTYEAKKIVCPLGLEVQKIHACPNDCILYRGEEYENLEACPVCKALRYKIRRDDPGEVDGQLTKKTIPAKVMWYFPIIPRLRRLFRNKGNARMMRWHAEERQQDGMLRHPADGSQWRNIDRKFKEFGKDARNIRFGLSPKQPGNDIDVYLRPLVEDLKLLWKKEGVPVWDEDKQEEFNIRALLFVTINDWPALSNLSGQSNKGYKACTHCMDETESTYLKHCRKVVYMGHRRFLAANHPVRKKGKHFEHKANHRMKPKHRSGKTMFAMVKDLKEFLDVRHAHRSHDPQPTIPPAMVSPSGNRSSCASTGQVGSQSMDAIQTQDESTCPVDDITQRTPCELHIPFKNLSIKDPAPSPPHAPTPSPPQTPAPTPPQAPAPTPPRAPTPTPPQAPLPAPSKSRAPQAPPPAHTRATKKAKVDAAKNKDPGYDCTQEELDAYVASEVKRQFKPRSPEKKIPIDPSVRKFFRGMSAPAKEAIKLSDYERTLKKASSGKSKPVPQLGEQPNQEIEPLVTGEEMTIEEFITDTSLTTDQLLGVAPIEKAEVKYMYELGKPLVKPELLQSLPTQMYKFHQLYMEMSATGREMIGARIRDTDFLQGDDILWINFKGIYELYQLDALDNGDSKGPTAGGFRYWIHRPSESKHRNARPISASHRGQSRPSPEGAALQDVHTVAVQHRVSLILLSSYTKFHSRTNLLSVSYVMHPTHIADSTGCFYSSTCRPTPSTYMTQWIKKESTFDKVFELMDRAWYRFRHLVRGKWRERLRRKFKFPCGKQKQGTNLCCYYVCEYCHCLADQIITTRELDVRTNKFKISLRIDFLFNY

SEQ ID NO: 118822 - protein, 1829 aa, Oryza sativa
  unsure (1)..(1829): unsure at all Xaa locations
  Clone ID: PAT_MRT4530_22097C.1.pep
MDRQWMYADRRSKEFIDGVHYFLRVAEANRHKGFICCPXNKCKNQKEYSASRTIHFHLFESGFMPSYNCWTSHGEQGVEMEEDEVEDDNIPDFAQYAGFEGNQTGEEERDADGNDVPDDLVQMLQDAKEDCESEKGAHKLDKMLEDHRMSLYPGCEQGHKKLDTTLEFLQWKAKNGVSDKTFGDXLRLVKNILPEGNKLPETTYEAKKIVCPLGLEVQKIHACPNDCILYRGEXYENLEACPVCKALRYKIRRDDPGEVDGQLTKKRIPAKVMWYFPIIPRLRRLFRNKGNARMMRWHAEERQQDGMLRHPADGSQWRNIDRKFKDFGKDARNIWFGLSTDGMNLFGEMSSGHSTWPITICIYNLPPWLCMKRKYIMMPIIIQGPKQPGNDIDVYLRPLVEDLKLLWKKEGVPMWDEDKQEEFNLRALLFVTINDWPAVSNLSGQSNKVYKACTHCMDEIESTYFKHYRKVVYMGHRRFHATNHSVQKKGKHYEHKADHRTKPKHRSGKTVFAMVKDLKVVFGXGPGSQPIESEDGYAAMWKKNSIFWELPYWEFLDVRHAINVMHLTKYLCVNLLGFLGVYGKSKDTLEARNDLKHMEQRGDLHLEPKEKGSHYLSPASYTLSKAEKESMFECLESIKVPSGYSTNIKRIISTKEKKFTNLKSHDCHVLMTQLLPVVIRGILPDNVRATITKLYAFMNAISQKVIDPDRLEALXNDVVKCLVSFELIFPPSFFNIVTHLLCYLVKEISILRPVYLHNMLPFERYMGVLKKYVRNRARLEASITKVYGTEEVIEFCVEFIEDLRPIGVPESRHEGRLRGKGTLGRKAIMMVDNNLFRKAHFTVLQQSSLVAPYIEEHLALVRARNIGKSDAWITRHHIDTFPAWLRQHLIGNETINQQLAFLVRGPSGSIATVQGYEINGYTFYTRAQDMKSTNQNNAIRIDAMGHDRTTGTSYGSIEDIWELDYGPLKVPLFRCQWVRLTGGGATINDSGMTTVDLNNVGYSDKPFVLANDVTQVLYVKDMSSKGKKGRGPDEPKRHVVLPAHSRLLHQHLEVFSXDRSLSASPSPPLPRASPRQXAVVSRRRLAGVVVAASTASAAAASLGCFFYEQMADRDEEQILYDTIAEGSSQYWNEEEGNEDPNQNLNEEGNVERDAEGNQEGNGEEEASGSQPSAGQKRARGQRGAAKKLEGWHIITEVDEDGRPSAPAEAAKNYVRHNGWVVWDNVPVXYWRRTRARGDNESFVPDSEKEMLWTTMLEIFTFSAGTENKVKRWTLKKMAEQFQSFKGDLYHKYILKGQTLNFDTFPKLRDHWDEFVAXKTGQQGQAMMERNKENAAKKKYHHYLGSGDYSIALPKWEEMEXSLLKRGIEPATAKWPDRSKFWYYAHGGTLNPVDGSLVFSDQIREAVRRLTDAVEASSQGTFRPDREKDELSLALQTPEHPGRTRGKGVIPWKTGFKEDIHTYRSRMRSKRDTEAKIADLEYRVSSYELSMQEEVARKVDERMAAHRSHDPXPTIPPAMVSPSGNRSSCASTGQVGSQSMDAXVKPEQLQSLPTQMYKFHQLYMEMSATGREMIGARIRDIDFLQGDDILWINFKGVYELYQLDALDVSIMSCWILMEIQRARRRGVFDTGFIDPQKVNVAMLDQYPQATEDNLVHLLKAQHYKTFILLPYNTEFHWVLLLFDLEACTVNVYGSMDKKESTFDKVFELIDRAWYRFRHLVRGKWRERLRQKFNFPFIRMRDNLITHKKFIVAVQEQLMGFINEQILDPKGEFYYDENTIHRFLASKITTTTTQKVNLSVGKDSYHSLQGMCWQMLKLSTNFCQLLQRRLW

SEQ ID NO: 118823 - protein, 43 aa, Oryza sativa
  Clone ID: PAT_MRT4530_22098C.1.pep
RYVLLLYSRKHCSAKHNSSKGLKCSTDTKQHYDMLTVSVSHKK

SEQ ID NO: 118824 - protein, 1505 aa, Oryza sativa
  unsure (1)..(1505): unsure at all Xaa locations
  Clone ID: PAT_MRT4530_22099C.1.pep
MDRQWMYADRRSKEFIEGVHYFLRVAEANKRNGFICCPCNKCKNQKEYSASRTIHFHMFESGFMPSYNCWTSHGEQGVEMEEDEAEDENIPDWAQYAGFEGNQTGEVDRDAGDNNAADDLGHMLQDTKEDCESCEQGHKKLDTTLEFLQWKAKNGVSDKAFGDLLKLVKNILPEGNKLPETTYEAKKIVCPLGLEVQKIHACPNDCILYRSEEYENLEACPVYKALRYKIRREDPGEVDGQPTKKRIPAKVMWYFLIIPWLRRLFRNKRNARMMRWHAEERQQDGMLRHPADESTYLKHCRNVVYMGHRRFLVANHPELPYWEFLDVRHAIDVMHLTKNLCVNLLGFLGIYGKSXKIHWKHYMEQRGDLHLEPKEKGSHYLSPASYTLSKTEKESMFKCLESIKVPSGYSMNIKRIISTKEKKFTNLKSHDCHVLMTQLLPVVIRGILSGNFRATITKLCAFMNAISQKVIDPDRLEALQNDVVQCLVSFELIFPPSFFNIMTHLLCHLVKEISILGPVYLHNMFPFERYMGVLKKYVHNHAHTEASIAKGYGTEEVIEFCIEFIEDLRPIGVPKSRHEGRLRGKGTLGRKAIMTEHLALFRARNIGKSDAWITRHHIDTFPAWLRQYLMAQDMKSTNQNSVVRIDAMGHDGTTGTYYGAIEDIWELDYGPLKIPLFRYQWDRLTGGGVTIADSGMTTVDLNKVGYLDEYFVLANDVTQVFYVKDMSSKGKKGNKPDEPKHHVVLPGKRKIVGVEDKTDEDYDQLDGQPPFTVTIDPSILLSNEDTPYSRSDHKEGTIVRRKKDVVVVVPQAGVIADRDEEHILYDTIAEGSSQYWNEEEGNEDPNQYLNEEGNVERDAEGNQEGNVERDAEGNEEEASGSQPSAGQKRAREQRETAKNYVRHSGWVMRDNVPVSTVYWRKTRARGDHESFVPDSEKEMLWTTILETFTLPAGTENIVKRSRMRSKRDTEAKIVDLEYRVSSYELSMQEEVARKVDEHMVAHRSQDPQPYIPPAMVSPSGNRSSCALTRQVASGMAIPTDPSGTXTAGRFQQDTPRSKLSWWKPRTRTSSWTTLEETLLVWNGIFLNGWAYATGLLHRLIRKLLIRHLPXSRAPQAPPPTPTRATKKAKVDAAKNKDPGYDCTQEELDAYVASEVRKQLKPRSPEKKIPIDPSVRNFFRGMFAPAKEAIKLSDYERTLKKASSRKSKPVPQLGEQPNQEIEPLVTGEEFGIQDFINDTGLTTDQLLRGASIEKAEVKYMYELGKPLAKPEQLQSLPTQMYKFHQLYMEMSATGREMIGASIRDTDFLQGEDILWINFKGIYELYQLDALDVSIMSCWTLMEIQRARRRGVFDTGFIDPRKVNVAMLDQYPQATEDNLVHILKAQYYKTEAWYRFHHLVRGKWRERLRRKFNFHCAKQDQGTNLCGYYVSEYCHCLADQIINTRELDDIRLRDNLTHKEFIAAVQEQLMGFINEQILDPEREFYYDGNTIHRSLASEITTTTTSKS

SEQ ID NO: 118825 - protein, 46 aa, Oryza sativa
  Clone ID: PAT_MRT4530_2209C.1.pep
PSYLPQCISCSSSRTYSILVLLPYHTTATDHNTLPTRVTTSTLNLK

SEQ ID NO: 118826 - protein, 109 aa, Oryza sativa
  Clone ID: PAT_MRT4530_220C.1.pep
IKSVGTPLTHSRLALDLSRSPKLPCFHINKWVETRWTRKFSWGDTPVMTCSWIMSAKTCTTLDYVTLLKIRDGTNYLTLPTVREGRYDERGYKTECEGKPDLARLGEGG

SEQ ID NO: 118827 - protein, 468 aa, Oryza sativa
  Clone ID: PAT_MRT4530_22100C.1.pep
MTVRPRPAAAAIIIAAVFGAAAAAAGGGMVGVDGTQFVVEGGRTIYFSGFNAYWLMMMASDPARRAAVVAAFAQASSRGLNLARTWAFSDGGDQPLQSSPGVYDEAMFQGLDFVIAEARRHGIYLLLCLTNNFDDFGGKRQYVRWAADAGHNLTAGDDFFTSSVVKSYYKNHVKAVLTRVNTVTGVAYKDDPTIFAWELMNEPRCDADPTGGMVQAWVEEMAPYVKRVDGGRHLVTAGLEGFYGDGEHESKELNPWGIYYGTNYVATHRAAGVDFATIHLYPDVWLWGSTADEQAAFFRNWTRSHIDATAAYLGMPLLVTEYGKFLWKEVGANKAQRNYFLDLVLDAIYASASRGGPLVGGAFWQLLLDGDIVAGMDSLRDGYEIILAEDSRAASIIGEHSEQLAALNGQDADVLCRRASSHRRTRLGNSLSCGGGDTLELLLRMVLACFVSLSRSISSFIVQNFILL

SEQ ID NO: 118828 - protein, 156 aa, Oryza sativa
  unsure (1)..(156): unsure at all Xaa locations
  Clone ID: PAT_MRT4530_22101C.1.pep
SSRAAPTRARHAHQXRGDRRRHEQAHRPDPSSFSCLTSVEXLNLGXNASXXKXPTRSASSPPGQRAPRQPHAVEQLLHXCRXACLSLIKXXVLNXXNNCIPGFPNQPRAAEXXSFLNQPKKFPAGXATTPRSPXGXARGQGGKRXLXLXYXATLXX

SEQ ID NO: 118829 - protein, 89 aa, Oryza sativa
  Clone ID: PAT_MRT4530_22102C.1.pep
RPCTPRSGTTSPTCPRRRSTSRPRPGPATPGSSRTTKAAVASAWPSPRRRGLPYRPPPCAAPAAASVWPSPRRCHPPPAPMHACRQREI

SEQ ID NO: 118830 - protein, 182 aa, Oryza sativa
  unsure (1)..(182): unsure at all Xaa locations
  Clone ID: PAT_MRT4530_22103C.1.pep
YFFLVAAASAEKPNSASFMGSPSKTRRMKPLGIQLYECARGSPISFRSCQALVLILTFLSYASYHATRKTTSIVKNHLYLQDLRDAQGNMTALYSGWAPFNADDGTALLGXIDLAFLGVYAIGMFFAGHLGDRVDLRILLTIGMIGTGIXTAAFXCRQLAQIHNFYYFLGCSDXLAWFQSSG

SEQ ID NO: 118831 - protein, 581 aa, Oryza sativa
  Clone ID: PAT_MRT4530_22104C.1.pep
MALQLWGSKEDPVESIILEHREYPCSEEYPISISPHSLSLAFELAISKIHLTGKAASAEKPNSASFMGSPSKTRRMKPLGIQLYECARGSPISFRSCQALVLILTFLSYASYHATRKTTSIVKSVLDPKTENLGMLHWPSHLYLQDLRDAQGNMTALYSGWAPFNADDGTALLGEIDLAFLGVYAIGMFFAGHLGDRVDLRILLTIGMIGTGFFTAAFGAGNWLNIHNFYYFLGVQMMAGLFQSSGWPSVVAVVGNWFGKSKRGLIMGIWNAHTSVGNISGSLIAAAMLKFGWSWSFAVPGVMIAVVGLAVFLFLPVGPEMIGIEEDIHEKDAEKDDMSAPLLEERSASKEKAVGFIQAWRIPGVAPFALCLFFCKLVAYTFLYWLPFYISHTAIGGVYLSDTAAGVLSTLFDVGGVVGGILAGHISDRLDARALTAASFTFSAIPALFFYRIYGSFSLYSNIALMFVTGMLVNGPYALITTAVSADLGTHSSLNGNSRALATVTAIIDGTGSIGAAVGPLLTGYISAKSWSGVFTMLMASAFVAGLLLSRLVMAEISAKMESRRPDAAASDLPVSSMEQS

SEQ ID NO: 118832 - protein, 229 aa, Oryza sativa
  unsure (1)..(229): unsure at all Xaa locations
  Clone ID: PAT_MRT4530_22105C.1.pep
AGTYDASLYVVLCRLGALRLISVVRIRPWAGTLVLGDHLDRELFAVAXATTITIGDGKTTGFXALALIAPAIYTASISKNRSVCEALLSNKWVRETSSCTISRRESIFAXYVELWTLICNALLXLGQQRDNIVWKLTTNREYKAKSAYQLLFLGAARSTFNETIWKXWASPKCKFFTWLVIQSRVWTANRLKKXWTNQQICPSTXTTQEMALHLFARYRLSCRIWVVIQ

SEQ ID NO: 118833 - protein, 93 aa, Oryza sativa
  Clone ID: PAT_MRT4530_22106C.1.pep
MPPPPPPPRRTTAAATAAADNDNDNVDYAAEMEADAAGNGSARSAAAAAYVARAVVYDGVDPFEGMEFDNEEPLTRTSWCRHSRSHRGWTRRR

SEQ ID NO: 118834 - protein, 132 aa, Oryza sativa
  Clone ID: PAT_MRT4530_22108C.1.pep
MVVLEPGGASSSLLHSNVLQLARYEPLKVATTSSSLTVGSMLPHVKPKMYYHHRRGSSLHHREARGRGLAGMAPRLMLFFLLLMEVPWHAPRERHPTTPALAATPLSTGIHMHGTLSMPDHACTRNCCTDPR

SEQ ID NO: 118835 - protein, 94 aa, Oryza sativa
  Clone ID: PAT_MRT4530_22109C.1.pep
RIIGVDLNPAKFEQAKKFGCTDFVNPKDHSKPVHEVLIEMTNGGLDRAVECTGNINAMISCFECVHDVSLFLTNMKHDSNKLKMIISAMPPVLL

SEQ ID NO: 118836 - protein, 106 aa, Oryza sativa
  Clone ID: PAT_MRT4530_2210C.1.pep
PKNGTFAPPFLLLLTPWANKRAKSWGSGIIMNKMGGFYIGDETFKQLIWPKPGKFLGVAGFKPGVYSMETVFPELKLPAQFFAVPWPKRSFRISGNFLGKKNFNLE

SEQ ID NO: 118837 - protein, 36 aa, Oryza sativa
  Clone ID: PAT_MRT4530_22110C.1.pep
RPSLLYLLGEQIKLTRNYSNLTKIHIKAYYPNIDRQ

SEQ ID NO: 118838 - protein, 360 aa, Oryza sativa
  Clone ID: PAT_MRT4530_22111C.1.pep
MAPSLATVVAIFLAAILLSSPPPCAAASSAPAPAAAGHGVPAVFAFGDSTLDPGNNNRLATLVRADHAPYGRDFPGGAATGRFTDGKLITDYIVSSLGIKDLLPAYHSSGLAVADASTGVSFASGGSGLDDLTANNALVSTFGSQLNDFQELLGHIGSPKSDEIAGKSLYVISAGTNDVTMYYLLPFRATNFPTVDQYGDYLIGLLQSNLNSLYKMGARKMMVAGLPPLGCLPVQKSLRGAGSGGCVTEQNEAAERYNAALQKALSKLEADSPGAKIAYVDIYTPLKDMAENPKKYGFTQASLGCCGTGMMEMGALCTSALPQCQSPSQYMFFDSVHPTQATYKALADEIVKSHVPQLMQ

SEQ ID NO: 118839 - protein, 162 aa, Oryza sativa
  Clone ID: PAT_MRT4530_22112C.1.pep
RNAAAANRDQPARSSRTTVSRAIRAHAPLPPGWIAAHSSEDAEQLAREEGEESREQRERRGRDFDFRMGAPFASNSLADQGLIAPGGGDVAGSARARRSEASIGRAGFRVSDPTRAEAAALATVALACPRLLESSGMPSDLLVKFRTRIRDFLGLRHFAIDR

SEQ ID NO: 118840 - protein, 856 aa, Oryza sativa
  unsure (1)..(856): unsure at all Xaa locations
  Clone ID: PAT_MRT4530_22113C.1.pep
MAESGGSEEFLKLYIHGVLADGTTTSDYRLLPAWEFSSSERVVAASTSTTSRPSPADEGEPTGWEGPTLEVEKLASSTDVDAGSEKQWVSTSIYYLALNSLEDDLGEDPIELDSPEDALGKDPIELHGQISMEIHMPPLMMKFQKDYRCEKQIVMSALLHFWIMRKKQEYDQLDIEFDLDSALEGTDVLTDWKGDYNLLKKMTSPNAWERLSAVEIKWVPTSCCFRRILAGSYMHTYRQGEEIWAKVNSLTSIETELPFSYYSLPYCHPQGGIKKSAENLGELLMGDQIDNSPYRFRVNVNESLYLCTTNPLDEADVKLLKQRSRDLYQVNMILDNLPVRRFTEQNGVTIQWTGYPVGYTPEGSNEVYIINHLKFKVLVHRYEGGKVKVVGTGEGMEVISETETDAKSGYEIVGFEVVPCSMKRDLEAMSKLKMYEKVDPTSCPVEMEKSQLIREKEQITFTYEVEFVNSDIRWPSRWDAYLKMEGAKIHWFSIMNSLMVILFLAGIVFVIFLRTVRRDLTRYEELDKEAQAQMNEELSGWKLVVGDVFREPTSSKLLCVMIGDGVQILGMAIVTIFFAAFGFMSPASRGMLLTGMIFLYMLLGIVAGYAAGXLWRTLKGTSEGWRSVSWPTACFFPGIVFVVLTVLNFMLWSRNSTGALPISLFFTLLSLWFCISVPLTLLGGFFGTRAEPIEFPVRTNQIPREIPAKNYSWLLVLGAGTLPFGTLFIELFFILSSIWLGRFYYVFGFLLVVLLLLVVVCAEVSVVLTYMHLCAEDWRWWWKAFFASGAVALYVFLYSINYLVFDLRSLSGPVSATLYIGYAFVVSLAIMLATGTVGFLTSFSFVHYLFSSVKID

SEQ ID NO: 118841 - protein, 58 aa, Oryza sativa
  unsure (1)..(58): unsure at all Xaa locations
  Clone ID: PAT_MRT4530_22114C.1.pep
FGITLKGNYMCRXVIXXFRHLIFXSYRHSSVKLLLVRLHVDTTLQLSTGXSDLETHSS

SEQ ID NO: 118842 - protein, 184 aa, Oryza sativa
  Clone ID: PAT_MRT4530_22115C.1.pep
MTAATETALPSQVSPLSPSLLDPVGGGEGGGGGVAPSLPNPAGGKGYDNEMTLANIVDHLVVLGPEVSKDMLLFLRTCCVMSLGTDFTAITVHVVIVVTEVIKFKGNKNRHCDQNYRWDGRLVTPAIAHTLLQAIDGDMVCLMGDWEDEANNNLAAWEPCPRVPKESFVSSATNDLITMLLFKD

SEQ ID NO: 118843 - protein, 74 aa, Oryza sativa
  Clone ID: PAT_MRT4530_22116C.1.pep
MWFFDEHQVKIQSENSLNSEMALTLRTLKVKQEDDIPSGVLVPESPTRRFCPELPGAEARNLLATLQFKYVSNG

SEQ ID NO: 118844 - protein, 699 aa, Oryza sativa
  Clone ID: PAT_MRT4530_22117C.1.pep
MEQLRQVGEAIGGVNALMAFHDDLRCINPRQCALLAHAYALAFRAVAGELRARLRFHDRLTKWKPLDDPLRELHRVVRDGEAYIRHCLLLDPAHWWARAASATHGTECVEHHLHNLLWCVSVVVEAVENVSEVTGSDPDELARRRLALARDYDKVLLDPKLFQERPGETFLATRELAARMDMAWKEDRWLLSQLLDERKGPTSSPEPPLTRQEHRLADLLAAPRGKLHPASVLLMSDFHMRRRLGGNGNLKEVQWLGEAFAVKHVVGVDAEAAAAEVAALASVSPHPNVAHCRYCFHDEEKRELYMVMDQLMSKDLGSYVKEVNSAKRRAPLPLVVVVDTMLQIACGMAHLHSNKMYHGNLNPSNVIVKPRHGDAYLHVKVAGFVSGSGTANAANPCIWCAPEVVGNEAAATEKGDVYSFGMICFELITGKIPFEDNHLQGENMSKNIRAGERPLFPFQSPKYLTSLTRRCWHGEAAQRPPFHSICRVLRYVKRFLVMNNPEQAAADAAGAGPAVDYLDMEAQLLRRFPEWEGNGVADVPFEMYAYRVMERDKMSNACRDRSSDSGSDGNSLWGDDSASGGSSTTATDASASSRPLLDRSGSTRSSPPRKVAIAAAKAGKCRSGIVTRLKPSSKITASSMSVTCAGPPQKSRSMGTVRPPPVVARRTPRIKSDGHLNRAAIPPTRRRKSGGNASDSELA

SEQ ID NO: 118845 - protein, 47 aa, Oryza sativa
  Clone ID: PAT_MRT4530_22118C.1.pep
AGAGYLCSLTFFNVKLCFVPSLVPNLRTKLVKYKMYQYEKNTYKVQL

SEQ ID NO: 118846 - protein, 372 aa, Oryza sativa
  unsure (1)..(372): unsure at all Xaa locations
  Clone ID: PAT_MRT4530_22119C.1.pep
MAPATKTESTAALDAAAWMFTVETSVGIFMVYNSSLHINEVWHQQTKQGEKLCWMLVAWLFIVVTSICITMLFTAFMATHGFXFAKTLTGLHFATTTLMTLVMKWLGHIQPSYLPLPELVKFVFFANLSIVGMNVSLMWNSVGFYQIAKLCIIPVLCILEILFDKVRYSRNTKLSIVLVLVGVAVCTVTDVSVNSKGLLAAVIAVWSTALQQHYVHHLQKKYSLGSFNLLGHTAPAQAASLLILGPFVDFWLTNRRVDTFNYTTIVTLFRHYKLYIAVDESVLRYICIGRFTAVSFQVLGHMKTILVLTLGFLFFGKEGLNFHVVLGMMLAVIGMIWYGNASSKPGGKERQVYSVPSEKTQKSSQSELDQKV

SEQ ID NO: 118847 - protein, 73 aa, Oryza sativa
  Clone ID: PAT_MRT4530_2211C.1.pep
QLMLLPASEIDVNVYCCNVDRSLIYPDAAITINSGTWISVCCTISSHNASLTNLYTKGNKKTQMDQKKNYFHK

SEQ ID NO: 118848 - protein, 175 aa, Oryza sativa
  Clone ID: PAT_MRT4530_22120C.1.pep
MAPANKAERKAVLDAGAWMFNVVTSVGIIMVNKALMATHGFSFATTLTGLHFATTTLMTLVMKWLGHIQPSYLPLPELVKFVFFANLSIVGMNVSLMWNSVGFYQIAKLCIIPVLCILEILFDKVRYSRNTKLSIVLVLVGVAVCTVTDVSVNSKGLLAAVIAVWSTALQQHVSI

SEQ ID NO: 118849 - protein, 997 aa, Oryza sativa
  Clone ID: PAT_MRT4530_22121C.1.pep
MDRQWMYADRRSKEFIDGVHYFLRVAEANRQRGFICCPCNKCKNQKEYSASRTIHFHLFESGFMPSYNCWTSHGEQGVEMEEDEVEDDNIPDFAQYVGFEGNQTGEEEIAADGNDVADDLGQMLQDAREDCESEKEAHKLDKMLEDHRTSLYPGCEQGHKKLDTTLELLQWKAKNGVSDKAFGDLLKLVKNILPGGNKLPETTYEAKKIVCPLGLEVHKIHACPNDCILYRGEEYENLEACLVCKALRYKIRRDDPGEVDGQLTKKRIPAKVMWYFPIIPRLRRLFRNKGNARMLRWHAEERQQDGMLRHPADGSQWRNIDRKFKEFGKDARNIRFGLSTDGMNPFGEMSSGHSTWPVTMCIYNLPPWLCMKRKYIMMPIIIQGPKQPGNDIDVYLRPLVEDLKQLWKKEGVPVWDEDKQEEFNLRALLFVTINDWPALSNLSGQSNKGYKDCTHCMDETESTYLKHCRKVVYMGHRRFLAANHPVRKKGKHFEHKADHRTKPKHRSGKTVFAMVKDLKVVFGKGPGSQHIESEDGHAAMWKKNSIFWELPYWEFLDVRHAIDVMHLTKNLCVNLLGFLGVYGKSKDTLEARNDLKHMEQRGDLHPEPKEKGSHYLSPASYTLSKAEKESMFECLESIKVPSGYSTNIKRIISTKEKKFTNLKSHDCHVLMTQLLPVVIRGILPDNVRATITKLCAFMNAISQKVIDPDRLEALQNEVVQCLVSFELIFPPSFFNIMTHLLCHLVKEIRILGPMYLHNMFPFERYMGVLKKYVRNRARPEASIAKGYGTEEVIEFCDTGFIDPRKVNVAMLDQYPQETEDNLVHLLKAQHYKTFILLPYNTEFHWVLLLIDLEACTVNVYDSMDKKESTFDKVFELIDRAWYRFRHLVRGKWRERLRRKFKFPCAKQKQGTNLCGYYVCEYCHCLADQIITTRELDFIRMRDNLTTHKEFIAAVQEQLMGFINEEILDPKGEFYYDGNTIHRSLASELAASTTTSKS

SEQ ID NO: 118850 - protein, 874 aa, Oryza sativa
  Clone ID: PAT_MRT4530_22122C.1.pep
EQGVEMEEDEVEDDNIPDFAQYVGFEGNQTGEEERDADGNDVADDLGQMLQDAKEDCESEKGAHKLDKMLEDHRTSLYPGCEQGHKKLDTTLEFLQWKAKNGVSDKAFGDLLKLVKNILPEGNKLPETTNKGNARMMRWHAEERQQDRMLRHPADGPKQPGNDIDVYLRPLVEDLKLLWKKEGVPVKVVYMGHRRFLAANHPVQKKGKHFEHKTDHRTKLKHRNGKTVFAMVKDLKVVFGKGPGSQPIESEDGHAAMWKKNSIFWELPYWEFLDVRHAIDVMHLTKNLCVNLFGFLGVYGKSKDTLEARNDLKHMEQRENLHPEPKEKGSHYLSSASYTLSKAEKESMFECLESIKIPSGYSTNIKKIISTKEKKFTNLKSHDCHVLMAQLLPVVIRGILPDNVRATITKLCAFMNAISQKVIDPDRLEALQNDVVQCLVSFELIFPPSFFNIKTHLLCHLVKEISILGPVYLHNMFPFERYMGILKKYVRNRACPEASIAKGYGTEEVIEFCVEFIEDIRPIGVPESRHEGGLRGKETLGRKAIMTGYEINGYTFYTRAQDMMSTNQNSAVRVDAMGHDGTTGTYYGAIEDIWELDYGPLKVPLFRCQWVRLTGGGVMINDSGMTTVDLNKVGYSDEPFVLANDVTQVFFVKDMSSKGKKGRGPDEPKRHVVLPGKRKIVGVEDKTDEDYDQLDGQPPFTVTIDPSILLSNEDTPYSRSDHKEGTIVRRKYVRSTVTADGIPAPTPPPYLAVISRSSSSPPPPPPPPSPHLWDAYADLVTTRCCATRTPRHETPRRRTPPPRHADAACGTTPPHHELARCRARRNAAAALPRRRSAAATPPSRCRHTENVNERTNVNENKVNERERERANERE

SEQ ID NO: 118851 - protein, 200 aa, Oryza sativa
  Clone ID: PAT_MRT4530_22123C.1.pep
GKPALDRSGSKVLDGDETIFTDMAQELKEEGNKLFQRREHERALLNYEKAIKLLPRGHPDVAYLHSNLAACYMQMSPPDHYRAINECNLALDASPRYSKALLKRARCFEALGRLDLAYRDVAKVLAVEPNNLTAIDVGDRVKKAMDEKGIVMDDKEAMPSPEEVVAAAPKQKPRKKKGRKAAALEDPSLRTRACDVIALL

SEQ ID NO: 118852 - protein, 524 aa, Oryza sativa
  Clone ID: PAT_MRT4530_22124C.1.pep
MGVLKKHVRNRAHLEASIAKGYGTEEVIEFCVEFIEDLRPIGVPESRHEGRLQGKGTLGRKAIMTVDNNLFRKAHFTVLQQSSLVAPYVEEHLALVRARNISKSDAWITRHHIDTFPAWLQQHLMGNETINQQLTFLARGPSGSFATFQGYEINGHTFYTRAQDMKSTNQNSAVRIDAMGHDGTTGTYYGAIEDIWELDYGPLKERNVERDAEGNEEEEASGSQPSAGQKRARGQRGAAKKLEGRHIITEVDEDGRPSAPAEAAKNYVRHSGWVVRDNVPVSAVYWRRTRAHGDHESFVPDSEKEMLWTTMLETFTLPAGTEDKTPYFDTFPKLRDHWDKFVAYKTGQQGQAMTERNKENAAKKKYHHHLGSGGYSVAMPKGEEMEASLFERGIEPATAKWSDRSKFWYYAHGGTLNPVDGSLVFSDQIREAARRLTDAVEASSHGTFRPDREMDKLSLVLQNPEHPGRTRGKGVIPWKIGFKEDIHTYRSRIRSKRDTEAKIADLEYRVSSYELNMQGEVARK

SEQ ID NO: 118853 - protein, 233 aa, Oryza sativa
  unsure (1)..(233): unsure at all Xaa locations
  Clone ID: PAT_MRT4530_22125C.1.pep
MSSVGLITKNIVXPTHNRGHGYSNSFTLARDVPLYPQDTAPXMSPCASIPPRYLGXNCDNTPRTTQLTTVHRSWIIISPXKTRGMDSLATPTDFSPLFSLAPHNESCYTKALNHEVAGARGLGWVFRGHPCEEDGDVNSPVRKTTTDDDERRPATNSNGGSTXLDSDDGSPMVFSGCKGAAEVLLLRANPTATTLSGDGDHNHGPARLERRQXSDGATGNGRAWNLRQTEEDD

SEQ ID NO: 118854 - protein, 1014 aa, Oryza sativa
  Clone ID: PAT_MRT4530_22126C.1.pep
MSWHRAGVLLLGVQSCLPVPGVPAVGGIGSVLLSMARMGWKLCHVFRLYTVVDFEDVFPDEIPAGLPPLRGIEHQIDLVPGASLPNRPAYRTNPAETKEIQRQVKELLDKGYVRESLSPCAVPVLLVPKKDGSWRMCVDCRALNAITVRYRHPIPRLDDMLDELSGSIIFTKIDLRSGYHQIRMKLGDEWKTAFKTKIGLYEWLVMPFGLTNAPSTFMRLMNHVLRAFIGKFVVVYFDDILIYSKSFDEHLDHIRQVLAVLREEKLYGNIAKCTFCTDRVVFLGFVVSADGIQVDEEKVKAIKDWPTPVNVSQVRSFHGLASFYRRFVKNFSTLAAPLNNLTKKDVPFTWGHDQDQAFHTLKTKLCEAPLLQLPDFGKTFEIECDASGIGIGGVLLQEGKPVAYFSEKLNGPHLNYSVYDKELYALVRVLEVWQHYLFPKEFVIHSDHEALKYLKSQGKLNRRHAKWIEFIETFPYVVQHKRGKDNIVADALSRRCALITQLDTKVLGLESIKTLYAVDADFNEPFSRCIDGKGWDKYYVHDGFLFRTNKICIPACSIRQVLLQEAHAGGLAGHFGVKKTLDMPSDHFFWPHMRRDVQRHVGCCIVCLKAKSRLNPHGLYTPLPIPHVPWEDISMDFVLGLPRSQRGRDSIFVVVDRFSKMAHFIPCHKSDDASHVADLFFREIVRLHGVPKTIVSDRDTKFLSYFWKTLWAKLGTKLLFSTTCHPQTDGQTEVVNRTLSTMLRAVLKKNLKLWEDCLPHVEFAYNRAVHSTTNSCPFEIVYGFIPHTPMDLLPLPLQEQVNLDATKRSDFIKRLHAETRKNIEKKSAQYAKQANKGKKKVTFQPGDLVWLHLCKDRFPQQCKSKLSPRGDGPFKVLQQINDNAYKLELPPEYSNVSTTFNVKDLLPFPGEPESRTTPSQEGEANEDIPSIHSSPNEATLDIAGPITRSRAKQLEKEIHSQVNANLMLNNQITLNEPMLLSTCFNVLRNDGVHEQAWDDDGFCPPNICKEPGRA

SEQ ID NO: 118855 - protein, 1813 aa, Oryza sativa
  Clone ID: PAT_MRT4530_22127C.1.pep
MDRQWMYADRRSKEFIDGVHYFLRVAEANRQRGFICCPCNKCKNQKEYSASRTIHFHLFESGFMPSHNCWTSHEEQGVEMEEDEVEDDNIPDFAQYVVFEGNQTGEEERDADGNDVADDLGQMLQDAKEDCESEKGAHKLDKMLEDHRTSLYPGCEQGHKKLDTTMEFLQWKAKNGVSDKAFGDLLKLVKNILPEGNKLPETTYEAKKIVCPLGLEVQKIHVCPNDCILYRGEEYENLEACPICKALRYKIRRDDPGEVDGNKGNARMMRWHAEERQQDGMLRHLADGSQWRNIDRKFKEFGKDARNIRFGLSTDGMNPFGEMSSGRSTWPVTMCIYNLPPWLCMKRKYIMMPIIIQGPKQPGNDIDVYLRPLVEDLKLLWKKEGVPMWDEDKQEEFNIRALLFVTINDWPALSNLSGQSNKGYKACTHCMDETESTYLKNCRKVVYMGHCRFLAANHPVRKKGKHFEHKADHRTKPKHRNGKTVFAMVKDLKVVFGKGPGSQPIESEDGHAAMWKKNSIFWELPYWEFLVVRHAIDVMHLTKNLCVNLLGFLGVYGKLKDTLEALVIRGILPDNVRATITKLYAFMNAISQKVIDPDRLEALQNDVVQCLVSFELIFPPSFFNIMTHLLCHLVKEISILGPVYLHNMFPFERYMGVLKKDMRSMGTHSTREAQDMKSTNQNNAVCVDAMGHDGTTGTYYGAIEAIWELDYGPLKVPLFRCQWVRLTGGGVMIDDSGMTTVDLNKVGYSDEPFVLANDVTQVFYVKDMSSKGKKGRGLDESKRHVVLPGKRKIVGVEDKTDEDYDQLDGQPPFTVTIDPSILLSNEDTPYSCSDHKERTIMADHDEEQILYDIIAEGSSQYWNEEEGNEDLNQYLNEEGNVQRDAEGNQEGHVERDVEGNQEEEDSASQPSAGQKRARGQRGATKKLEGRHIIMEVDEDGRPSAPAEATKNYVRHSGWVVRDNVPVSTVYWRRTRARGDHESFVPDSEKEMLWTTMLETFTLPAGTEDKVKRWTLKKMAEQFQSFKGELYKKYILKGQTPNFDTFPKLRDHWDEFVAYKTGEQGQAMMERNKENAAKKKYHHHLGSGGYSVAMPKWEEMEARLLERDIEPATANWPERSKFWYYAHGGTLNPADGSLIGFKEDIHTYRSRMRSKRDTEAKIADLEFRVSSYKLSMQEEVARKVDERMAAHQSNDPQPTIPPAMVSPSGNRSSCASTGQVGSQSMDAMQTQDESTCPVDDITQRTPCELHIPFKNLSIKVASGMAIPTDSSGTYHCRLIPAGYSKVEVELVEGAYEDLELDYPGGDSETHLRDTSHAIILWRKRYIILPRRQAASRAPSPPAPPSPPQDPAPSPPQDPAPSPPHAPAPSPPQAPAPTPPQAPAPTPPRSPTPTPPQAPLPAPSKSRAPQAPPPTHRRATKKAKIDAAKNKDPGYDCTQEELDAYVASEVKRQFKPRSPEKKIPIDLSVMNFFKGMSAPAKEAIKLSDYERTLKKASSGKSKPVPQLGEQPNQEIEPLVTGKEMTIEEFITDTGLTTDQLLGVAPIEKAEVKYMYELSKPLVKPELLQSLPTQMYKFHQLYMEMSATGREMIGARIRDTDFLQGDEILWINFKGIYELYQLDTLDVSIMSCWILMEIQRARRRGVFDTGFIDPRKVNVTMLDQYPQATEDNLVHLLKAQHYKTFILLPYNTEFHWVLLLFDLSACTVNVYDSMDKKESMFDKCAKQKKGTNLCGYYVYEYCHCLADQIITTRELNFIRMRDNLTTHKEFIAAVQEQLMGFINEQILDPKGEFYYDGNTIYRFLASELATTTTSKS

SEQ ID NO: 118856 - protein, 110 aa, Oryza sativa
  unsure (1)..(110): unsure at all Xaa locations
  Clone ID: PAT_MRT4530_22128C.1.pep
MSNVRLITKNIVRPTHNRRHGYSNSFTLARDVPLYPQDSSXNMLPCASIPPRYLGXNCDNTPRTTQLTTVHHTWIIITPSTTRGMDSPATLTDFSPLLSLAPHNELCYTK

SEQ ID NO: 118857 - protein, 579 aa, Oryza sativa
  Clone ID: PAT_MRT4530_22129C.1.pep
MDDAKEDCESEKGAHKLDKMLEDHRTSLYPGCEQGHKKFDTTLELLQWKAKNDDEDKQQEFNLRALLFVTINDWPALSNLSGQSNKGYKACTHCMDETESTYLKHCRKVVYMGHRRFLAANHPVQKKGKHFEHKADHRTKPKHRSGKTVFAMVKDLKVVFGKGPGSQPIESEDGHTAMWKKNSIFWELPYWEFLDVRHAIDVKHLTKNLCVNLLGFLGVYGKSKDTLEARNDLKHMEQRGDLHPEPKDKGSHYLSPASYTLSKAEKETARCARRRPRRRSGVRLRARAPMVAGGGHRHGGAAAERGEGKGETKRRSTAHPGSTATTETATGAEEGGGAARVDRVDGAPAVGDRNGEVDEVGEDAAKAKEAAPRWEVVRGDDGGGPELGGLGVREGGRKRGKWARETRPPLMAPASILGPVYLHNMFPFKRYMGVLKKYVRNRARPEASIAKGYGTEEVIEFCVEFIEDLRPIGVPESRHEGRLRGKGTLGRKAIMTVDNNLFHKAHFTVLQQSSLVAPYIEEHLALVRARNIGKSDAWITRHHIDTFPAWLRQHLMGNETINQQLAFLARGPSGSIVTL

SEQ ID NO: 118858 - protein, 43 aa, Oryza sativa
  unsure (1)..(43): unsure at all Xaa locations
  Clone ID: PAT_MRT4530_2212C.1.pep
KKVRCCKNGLVNLGPLEGAAQLSLFYKKPPPXELFIWKKNLVX

SEQ ID NO: 118859 - protein, 104 aa, Oryza sativa
  unsure (1)..(104): unsure at all Xaa locations
  Clone ID: PAT_MRT4530_22130C.1.pep
KVGCQHMVLMVVLMTIKDRFASYYCETFTMPTTSQRGLRLYLLYSMVHYSVPDXEAVRSPWGSLGSPXPLVVEGVIVIQVWCTVVSCVVRGVLSQFLSEVPWWC

SEQ ID NO: 118860 - protein, 1756 aa, Oryza sativa
  Clone ID: PAT_MRT4530_22131C.1.pep
MDRQWMYADRRSKEFIDGVHYFLRVAEANRKRGFICCPCNKCKNQKEYSASRTIHFHLFESGFMPSYNCWTSHGEQGVEMEEDEVEDDNIPNFAQYAGFEGNQTGEEEIAADGNDVADDLGQMLQDAREDCESEKEAHKLDKMLEDHRTSLYPGCEQGHKKLDTTLELLQWKAKNGVSDKAFGDLLKLVKNILPGGNKLPETTYEAKKIVCPLGLEVHKIHACPNDCILYRGEEYENLEACPVCKALRYKIRRDDPGEVDGQLTKKRIPAKVMWYFPIIPRLRRLFRNKGNARMLRWHAEERQQDGMLRHPADGSQWRNIDRKFKEFGKDARNIRFGLSTDGMNPFGEMSSGHSTWPVTMCIYNLPHWLCMKRKYIMMPIIIQGPKQPGNDIDVYLRPLVEDLKQLWKKEGVPVWDEDKQEEFNLRALLFVTINDWPALSNLSGQSNKGYKACTHCMEETESTYLKHCRKVVYMGHRRFLAATTRGKTVFAMGKDLKVVFGKGLGSQHIESEDGHAAMWKKNSIFWELPYWEFLDVRHAIDVMHLTKNLCVNLLGFLGAYGKSKDTLEARNDLKHMEQRGDLHPEPKEKGSHYLSPPSYTLSKADNESMLECLESIKVPSGYSTNIKRIISTKEKKFTNLKSHDCHVLMTQLLPVVIRGILPHNVRATITKLCAFMNAISQKRYMGVLKKYVRNRARPEASIAKGYGTEEMADRDEEQILYDTIAEGSSQYWNEEEGNEDPNQYLNEEGNVERDAEGNQQGHVERDVEGNQEEEASGSQPSVGQKRARGQRGAAKKLEGRHIITEVEEDGCPSAPAEAAKNYVRHSGWVVRDNVPVSRVYWRRTRARGDHESFVPDSEKEMLWTTMLETFTLPAGTEDKVKRWTLKKMAEQFQSFKGDLYQKYILKGQTPNFDTFPKLRDHWDEFVAYKTGEQGQAMMERNKENAAKKKYHHHLGSGGYSVAMPKWEEMEASLIERGIEPATANWPERSKFWYYAHGGTLNPADGSLVFGVQIREAARRLTDAVEASSQGTFRPDRDRDELTLALQTPEHPGRTRGKGVIPWKIGFKEDIHTYRSRMRSKRDTEAKIADLEFRVSSYELNMQEEVARKVDERMAAHRSQDPQPTIPPAMVSPSGNRSSCASTGQVGSQSMDAMQTQDESTCPVDDITQRTPCELHIPLKNLSIKVASGMAIPTDPSGTYHCRPIPAGYSKVKVELVEGAYEDLELDYPGGDGETHLRDTSHAIILWRRRYIILPGRQAASRAPSPPAPPSPPQDPAPSPPHAPPAPTPPQDPAPTPPRAPTPTPPQAPLPAPSKSRAPPAPSPAHTRATKKAKVDAAKNKDPGYDCTQEELDAYVASEVKRQFKPRSPEKKIPIDPSVRNFFRGMSASVKEAIKLSDYERTLKKASSGKSKPVPQLGEQPNQEIEPLVTGKEMTIEQFITDTSLTTDQLLGVAPIEMAEVKYMYELGKPLVKPELLQSLPTQMYKFHQLYMEMSATGREMIGARIRDTDFLQGDDILWINFRGIYELYQLDALDVSIMSCWILMEIQRARRRRVFDTGFIDPRKVNVAMLDQYPQETEDNVVHLLKAQHYKTFILLPYNTEFHWVLLLFDLSACTVNVYDSMDKKESTFDKVFELIDRAWHRFRHLVRGNWRERLRRRFKFPCAKQKQGTNLCGYYVCEYCHCLADQIITTRELDFIRMRDNLTTHKEFIAAVQEQLMGFINEEILDPKGEFYYDGNTIHRSLASELAASTTTSKS

SEQ ID NO: 118861 - protein, 101 aa, Oryza sativa
  unsure (1)..(101): unsure at all Xaa locations
  Clone ID: PAT_MRT4530_22132C.1.pep
MLTSSSLVVLMTIKDRFTSYCCETFTVPTTSQRGQRLYLLYSMVHYGVPDXEAARSPWGVAGESMPLVVEGVIMIQVWCTVVSCVVRGVLSQFLSEVPWWY

SEQ ID NO: 118862 - protein, 51 aa, Oryza sativa
  Clone ID: PAT_MRT4530_22133C.1.pep
LCSRSSGTTTAFATSTAITIESSEREYTRSSARVDERVAGRVGGRVGGRVG

SEQ ID NO: 118863 - protein, 2115 aa, Oryza sativa
  unsure (1)..(2115): unsure at all Xaa locations
  Clone ID: PAT_MRT4530_22134C.1.pep
MDRQWMYADRRSKEFIDGVHYFLRVAKANRQRGFICCPCNKCKNQKEYSASRTIHFHLFESGFMPSYNCWTSHGEQGVEMEEDEVEDDNIPDFAQYVGFEGNQTGEEERDADGNDVADDLGQMLXDAKEDCESEKEAHKLDKMLEDHRTSLYPGCEQGHKKLDTTLEFLQWKAKNGVSDKAFGNLLXLVKNILPEGNKLPETTYEAKKIVCLLGLEVQKIHACPNDCILYRGEEXENLEACLVCKALRYKIRRDDPGEVDGQLTKKRISAKVMWYFPIIPWIRRLFRNKGNARMMRWHAEERQQDGMLRHPADGSQWRNIDRKFKEFGKDARNIRFGLSTDGMNPFGEMSSGHSTWPVTMCIYNXPPWLCMKRKYIMMPIIIQGPKQPGNNIDVYLRPLVEDLRLLWKKEGVPVWDEDKQEEFNIRALLFVTINDWPALSNLSGQSKKGYKACTHCMDETESTYLKHCRKVVYMGHRRFLAANHPVRKKGKHFEHKADHRTKPKHRNGKTVFAMVKDLKVVFGKGPGSQPIESENGHAAMWKKNSIFWELPYWEFLDVRHAIDMMHLTKNLCVNLLGFXGVYGKSKDTLEARNDLKHMEQRDDLHPEPKEKGSHYLSPASYTLSKAEKESMFECLESIKVPSGYSTNIKRIISTKEKKFTNLKSHDCHVLMTQLLPVVIRAILPDNVRATITKLCAFMNAILQKVIDPDRLALQNDVVQCLVSFELIFPPSFFNIMTHLLCHLVKEISILGPVYLHNMFPFERYMGVLKKYVRNRARPEASIAKGYGTEEVIEFCVEFIEDLRPIGVPESRHEGRLRGKGTLGRKAIMTVDNNLFCKAHFTVLQQSSLVAPYIEEHLALVHARNIGKSDAWITRHHIDTFPAWIRQHLMGNDSINQQLAFLARGPSGLIATFQGYEINGYTFYTRAQDMMSTNQNSAVRVDAMGHDGTTGTYYGAIEDIWELDYGPLKVPLFRCQWVRLTGGGVMIDDSGMTTVDLNKVGYSDEPFVLANDVTQVFFMKDMSSKGKKGRGPDEPKRHVVLPARPRLLHQHLEVFTRSISLGXPSPPLPRASPRXTAAVSRRRLALVVVAAASASFSAAASLRCFLYEQMADRNDEQILYDSIAEGRSQYWNEEEGNEDPNQYLNEEGNVERDAEGNQEEHVERDVEGNQEEEASGSQPSVGQRRARGQXGAAKKLEGRHIVMEVEEDGRPSAPAEAAKNYVRHSGWVVRDNVPVSTVYWRRTRARGDHESFVLDSEKEMLWTTMLETFTLPAGTEDKVKKWTLKKMTEQFQSFKGELYKKYILKGQTPNFDTFPKLRDHWDEFVAYKTXEQGQAMMERNKENAAKKKYHHHLGSGRYSVVMPKWEEMEASLLERGIEPATANWPERSKFXYYAYGGTLNPADGSLVFGDQIREAARRLTDAVEASSQGTFRPDRERDELSLALQTPEHPGXTRGKGVIPWKIRFKEDIHTYKSRMRSKRDTEAKIADLEFRVSSYELSMQEEVARKVDERMAAHRSNDPXPTIPPAMVSPSGNRSSCASTGQVGSQSMDAMQTQDESTCPVDDITQRTPCELHIPFKNLSIKVASGIAIPTDPSGTYHCRPIPAGYSKVEVELVEGTYVDLKLDYPGGDGETHLRDTSHAIILWRRRYIILPGRQAASRAPSPPAPPSPPQDPAPSPPHAPAPSPPQAPAPTPPQAPAPTPPRAPTPTPPQAPLPAPSKSRAPQAPPPAHTRATKKAKADAAKNKDPGYDCTQEELDAYMASEVKRQFKPRSPEKKIPIDPSVMNFFRGMSAPAKEAIKLSDYERTLKKASSGKSKPVPQLGEQPNQEIEPLVTGKEMTIEEFITDTGLTTDQLLGVAPIEKAEVKYMYELGKPLVKPELLQSLPTQMYKFHQLYMEMSATGREMIGARIRDMDFLQGDDILWINFKGIYELYQLDALDVSIMSCWILMEIQKARRRGVFDTGFIDPRKVNVAMLDQYPQATEDNLVHLLKVQHYKMFILLPYNTEFHWVLLLFDLSACTVNVYDSMDKKESTFDKVFELIDRYRHKFLXLIKKIXVMLIATTNHSFKLHVGXVSVPSFGFINEQIFDPKGEFYYDGNTIHRSLACELATTTSKS

SEQ ID NO: 118864 - protein, 222 aa, Oryza sativa
  unsure (1)..(222): unsure at all Xaa locations
  Clone ID: PAT_MRT4530_22135C.1.pep
MNSVRLITKNIVQLAHNRGHGYSNSFTLIRGVPLXHKTQLHNMSPCASIPPRYLGXNCDNTPRTTQLTTVHHSWIIITPSTTRGMDSPAIPTDFSPLLSQAPHNELCYSKALNHKVAGARGLGWAFRGHQREEDDDTNTPVQRTMTDDDERRPTTSXDGGSPAGFGGCDGVDGVLLHLANSAVAANGGDGNASGGAARLKRRXGGATGDGGARDLRGNVEGD

SEQ ID NO: 118865 - protein, 155 aa, Oryza sativa
  unsure (1)..(155): unsure at all Xaa locations
  Clone ID: PAT_MRT4530_22136C.1.pep
MVGEEWRRSWVEVKLWFGTATSRPRVDAVQCRGRLHSTGILDGNDETNFFETSSAEKDFNSGLTSAMGAAPIGGTHGSEAQGRGRGVLAGGAHRAAAHWEEVVPAGLGSAPKPASRPWLAAAXAVAGDGNRRRGRRRQPKATAHGRSGGSARLSA

SEQ ID NO: 118866 - protein, 1141 aa, Oryza sativa
  unsure (1)..(1141): unsure at all Xaa locations
  Clone ID: PAT_MRT4530_22137C.1.pep
MDRQWMYADRRSKEFINGVHYFLRVAEANRQRGFICCPCNKCKNQKEYSASRTIHFHLFESGFMPSYNCWTSHGEQGVEMEEDEVEDDNIPDFAQYVGFEGNQTGEEEIVADGNDVADDLGQMLQDAREDCESEKEAHKLDKMLEDHRTSLYPGCEQGHKKLDTTLELLQWKAKNGVSDKAFGDLLKLVKNILPGGNKLPETTYEAKKIVCPLGLEVHKIHACPNDCILYRGEEYENLEACPVCKALRYKIRRDDPGEVDGQLTKKRIPAKVMWYFPIIPRLRRLFRNKGNARMLRWHAEERQQDGMLRHPADGSQWRNIDRKFKEFGKDARNIRFGPKQPGNDIDVYLRPLVEDLKQLWKKEGVPVWDEDKQEEFNLRALLFVTINDWPALSNLSGQSNKGYKACTHCMDETKNTYLKHCRKVVYMGHRRFLAANHPVRKKGKHFEHKADHRTKPKYRSGKTMFAMVKDVKVVFGKGPGSQHIESEDGHAAMWKKNSIFWELPYWEFLDVRYAIDVIHLTKNLCVNLLGFLGVYGKSKDTLEARNDLKHMEQRGDLHPETKEKGSYYLIPTSYTLSKAEKESMFECLESIKVPSGYSTNIKRIISTKEKKFTNLKSHDCHVLMTQLLPVVIRGILPDNVRATITNLCAFMNAISQKVIDPDRLEALQNDVVQCLVSFELIFPPSFFNIMTHMLCHLVKEISILGPMYLHNMFPFERYMGVLKKYVRNRARPEACIAKGYGTEEVIEFCVEFIEDLRPIGVLESRHEGRLRGKGTLGRKAIMTVDNNLFRKAHFTVLQHSSLVAPYIEEHLALVRARNIGKSDAWITRHHIDTFPAWLRQHLMGNETINQQLAFLARGPFGSIATFQGYEINGYTFYTRAQDIKSTNQNSAVRIDAMGHDGTTGTXYGAIEDIWELDYGXSSGITTVDLNKVGYSDEPFVLANDVTQVFYVKDISSKGKKGRGPDEPKCHVVLPGKRKIVGVEDKTDEDYDQLDGQPPFTVTIDPSILLSNEDTPYSRNDHKEGTIGTFRPDRDRDEVTLALQTPEHPGRTRGKGVIPWKIGFKEDIHTYRSRMRSKRDTEAKIADLEFRVSSYELNMQEEVARKVDERMAAHRSHDPQPTIPPAMVSPSGNRSSCASTGQ

SEQ ID NO: 118867 - protein, 200 aa, Oryza sativa
  unsure (1)..(200): unsure at all Xaa locations
  Clone ID: PAT_MRT4530_22138C.1.pep
MNSARLITKNIAQLTHNCGHGYSNSFTLIRGVPLYPQDTIPXMSPCALVPPRYLGXNCDNTPRTIQLTTVHRSWIIISPSKLEAMDSPATPMDFSPLHSLAHYNESCYTKGTDDDLAGARRVGLAFGGHLRVEDNDTNPKVLTYATTDKGRRPATRGXDGDGSDHSGGDATATGDGGEGAAELALSHVHPTAARGGSGDG

SEQ ID NO: 118868 - protein, 1175 aa, Oryza sativa
  Clone ID: PAT_MRT4530_22139C.1.pep
MAEANRYKGFICCPCNKCKNQKGYSASRTIHFHLFESGFMPSYNCWTCHGEQGVEMEEDEVEDDNIPDFGQYAGFEGNQTGEEERDADGNDVADDLDQMLQDAKEDCESEKGAHKLDKMLEDHRTSLYPGCEQGHENLDTTLQFLQWKAKNGVSDKSFGDLLKLVKNILPEGNKLPETTYETKKIVCPLGLEVQKIHACPNDYILYHGEEYENLEACPVCKELRYKIRRDDPGEVDGQLTKKRIPAKVMWYFPIIPRLRRLFRNKGNARMMRWHAEERQQDEMLRHPADGSQWRNIDRKFKDFGKDARNIQFGLSPKQPGNDIDVYLRPLVKDLKLLWKKEGVPMWDEDKQEEFNLRALLFVTINDWPALSNLSGQSNKGYKACTHCMDETESTYLKHCRKVVYMGHRQFLAANHLVRKKGKHFEHKADHCTKPKHHSGKTVFAMVKDLKVVFGKGLGSQPIESEDGHAAMWKRNSIFWELHYWEFLDVRHTIDVMHLTKNLCVNLLGFLGVYGKSKDTLEARNDLKHMEQRGDLHPEPNEKGSHYLSPASYTLSKAEKEIVIRGILPDNVRATITKLCAFMNAISQKVIDPDRLEALQNDVVQCLVSFELIFPPSFFNIMTHLLCHLVKEISILGPVYLHNMFPFEMYIGVLKKYVRNRARPEASIAKGYGTEEVIEFCVEFIEDLRPIGVPESRHEGRLRGKGTLGRKAIMTVDNNLFPPYIEEHLALVRAKNIGKSDAWITRHYIDTFPAWLRQHLMGNETINQQLAFLARGPSGSIATFQGYEINGYTFYTRAQDMKSTNQNSVVRIDAMGHDGTTGTYYGAIEDIWELDYGPLKVGYSDKPFVLANDVTQVFYVKDMSSKGKKGRGPDEPKRHVVLPGKRKIVGVEDKTDEDYYQLDGQPPFTVTIDPSILLSNEDTPYSRSDQKEGTIVRRKKDVVVIVPQAGVVDSPRRNSRRQVIMEIQRARQRGVFDTRFIDPRKVNVAILDQYPQATEDNLVHLLKAQHYKTFILLPYNTEFHWVLLLFDLEACTVNVYDSMDKKESMFDKVFELIDRAWYRFRHLVRGKWRERLRRKFNFPCAKQKQGTNLCGYYVCEYCHCLADQIITTRELDFIRMRDNLITHKEFIAAVQEQLMGFINEQILDPKGEFYYDGNTIHRSLASEITTTTTSKL

SEQ ID NO: 118869 - protein, 74 aa, Oryza sativa
  unsure (1)..(74): unsure at all Xaa locations
  Clone ID: PAT_MRT4530_2213C.1.pep
TTTLPYRRTIKDNGHTLLMEDGVTVLSDIKGVNXYRRGRHRDPVTDHITTTLSEFKKTCAEDHRLPHLALSTSH

SEQ ID NO: 118870 - protein, 113 aa, Oryza sativa
  unsure (1)..(113): unsure at all Xaa locations
  Clone ID: PAT_MRT4530_22140C.1.pep
KVDCEHMVLMVVLMTIKDRFASYCCETFTVPTTSQRGQRLYLLYSMIHYSVPDCEAARSPWGSLGSPLPLILRGXIMIQERCTVVSCVVRGVMSQFLSEVPPCTPKDVVYTVE

SEQ ID NO: 118871 - protein, 41 aa, Oryza sativa
  Clone ID: PAT_MRT4530_22141C.1.pep
MAIAFVVALPPPLTCGAPRARATASPNMAIGAFNGALPAYQ

SEQ ID NO: 118872 - protein, 641 aa, Oryza sativa
  Clone ID: PAT_MRT4530_22142C.1.pep
MSAAAAAAGAACRRASYTLLGPPVERLRAAVSATAAAASTGDPFVDLLDSNYNKPKPTPPAKRLTENYSPTFASSGDPCLDFFFNVVPDTHASTVTSLLSAAWTAEPNTALRLACNLRGVRGTGKSDHEGFYATALWMHDHHPKTLALNAPSVAEFGYLKDLPELLHRIIHGGVSTRTPPPARTRSYYSSRRPRKVRRDPATRAARIAASQEKHRKISDQAAVERRKKRAEAAARAVEMYARDPKYRFLHDRTADLFADLIADDMRKLEDGKVNNLSLASKWCPSLYKCYDRSTLLCESIGRRLFPKGSDAELPEDLPDEYYAYRVRERLRKMALVPLRRALHLPEVYISARRWGDVVYSRVASVAMKNYTDLFLEHDHERFNLFLANVKTGKAKIAAGALLPHDILASVDSHDKEGNEVANLQWKRMVDDLLELGKLNNCLAVCDVSGSMNGRPMDVCVALGLLLSELCDEPWHHRVITFSERPQLHHIKGETLYEKEEFIREMEWGFNTDLQAVFDQLLHVAVSGNLPPERMVKKVFVFSDMEFDQASSRAWETDYEAITRKFNEAGYGGAIPEVVFWNLRDSCSVPVTGNKKGVALVSGFSKNMLKLFLSGGYEKMTPRAVMERAISGREYEKLVMFD

SEQ ID NO: 118873 - protein, 844 aa, Oryza sativa
  Clone ID: PAT_MRT4530_22143C.1.pep
DGIIKTELWGGNGTSHDITETPKDLISVQIKSKDTIDHLTFTYKDTKGNQQTVSWGGTMGDDHLADAREDCESEKEAHKLDKMLEDHGTSLYPGCEQGHKKLDTTLELLQWKAKNGGPKQPGNDIDVYLRPLVEDLKQLWKKEGVPVWDEDKQEEFNLRALLFVTINDWPALSNLSGQSNKGKVVYMGHRRFLAANHPVRKKGKHFEHKADHRTKPKHRSGKTVFAMVKDLKVVFGKGPGSQHIESEDGHAAMWKKNSIFWELPYWEFLDVRHAIDVMHLTKNLCVNLLGFLGVYGKSKDTLEARNDLKHMEQRGDLHPEPKEKGSHYLSPASYTLSKAEKESMFECLESIKVPSGYSTNIKRIISTKEKKFTNLKSHDCHVLMTQLLPVVIRGILPDNVRATITKICAFMNAISQKVIDPDRLEALQNEVVQCLVSFELIFPPSFFNIMTHLLCHLVKEIRILGPMYLHNMFPFERYMGVLKKYVRNRARPEASIAKGYGTEEVIEFCIEFIEDLRPIGVPESRHEGRLRGKGTVGRKAITTVDNNLFRKAHFTVLQHSSLVAPYIEEHLALVRARNIGKSDAWITRHHIDTFPAWLRQHLMGNESINQQLAFLARGPSGSIATFQGYEINGYTFYTRAQDMKSTNQNSAVRVDAMGHDGTTATYYGAIEDIWELDYGPLKVPLFRCQWVRLTGGGIMIDDSGMTTVDLNKVGYSDEPFVLANDVTQVFFVKDMSSKGKKGRGPDEPKRQVVLLGKRKIVGVEDKTDEDYDQLDGQPPFTVTIDPSILLSNEDTPYSRSDHKEGTIVRRKANPRADAAVSRRRLELVVLAAAAASSATAASLG

SEQ ID NO: 118874 - protein, 72 aa, Oryza sativa
  Clone ID: PAT_MRT4530_22144C.1.pep
ALERQQLHIDAWCLWASLIGGHASSRWFNPLCYHKCDGNIHFCLTLLMLLTGALHRHISHCRMTRAGPQGAT

SEQ ID NO: 118875 - protein, 30 aa, Oryza sativa
  Clone ID: PAT_MRT4530_22145C.1.pep
IYQLSYPASDRMHSVLKIKGVYALVTLTSS

SEQ ID NO: 118876 - protein, 51 aa, Oryza sativa
  unsure (1)..(51): unsure at all Xaa locations
  Clone ID: PAT_MRT4530_22146C.1.pep
KRAGACHAINRDDPTPKLTXLGMDAYTAKSGKIETLPNLMPWELMAVGSEA

SEQ ID NO: 118877 - protein, 180 aa, Oryza sativa
  Clone ID: PAT_MRT4530_22147C.1.pep
LQLPRRHREMRGKRGGAQLHHLQPAPPGGRFFLRGAERTVAECGARSLPVPPRPERLMRPPSHSFRSLPCNLVWTDCISLSLSPIPLFPKSLAIFYLPEIHTGASCQRHPRPCPAAAASNTSGSSAAAPPTCVLTSSETRALLFIIIIIIIIIIIIIIIIIIIVRSFTDFASFPFHRTIS

SEQ ID NO: 118878 - protein, 112 aa, Oryza sativa
  Clone ID: PAT_MRT4530_22148C.1.pep
MIKCHTSYNNEATHFDGAWGSSPGDRAGPPLPVRPGTLGHTNLHSTGSRCNVGARLFADDVTGVRPPGMNLAGTDVLTPGVSTPAPVRDECLEALIIPTGWGEACDRPPVAT

SEQ ID NO: 118879 - protein, 1396 aa, Oryza sativa
  Clone ID: PAT_MRT4530_22149C.1.pep
MAEKLPPSPSSASPGAVKEKIQRLGLGEINEGNVVAVDPEKFTPDHKKDFEAMMQQARDQFLNSFMQTRKGTFVQKYKVKIVPDEPETSTSKEGEGKKASESAQPGDKKVLPMTRLTRLRVTTLKGPTTADLSNAAKTLGRTTDSTDTIRTANYPADSTARLDESIGWTRPESNCSRAFGSPCAARWYGDASDCARAFGAKYSAELPELPRGQFELSVSTFFPTSPYNQFEPTQQQSQGAAQQRPWADVIADVMREQFGLKPKDTGNLYRQPYPEWFKRVPLPNRFKVPDFSKFSGQDGVSTYEHISRFLAQCGEASAVDALRVRLFRLSLPGSAFTWFSSLPYGSINSWVDLEKQFHSYFYSGVHEMKLSDLTAIKQRHNEPVHEYIQRFREMRNKCFSLSLTDSQLADLAFQDMIGPIKEKFSSEDFDSLSHLIHKVKLHEQRFAEARKNSKKVNHVCPYVYGSDDDDDDSEIAAAEWVRSKKVIPCQWVKNSGKEERYDFDITKADKIFDLLLREKQIQLPPGHTIPSAEELGKKRYCKWHNSGSHSTNDCKVFRQQIQVAIEGGKIKFDDSKRSMKVDGNPFPINMVHTTGRTADARRTKGFQMNSARVINKYQRKFDKQQERCYEEDDGSFDPHWGCEFFRFCWNEGMRLPTVEDCPGCGDVAESLSRSYNGSNLLKQTRVPIHQRLGPVNQHSYLEDGKDGKIQWCPSGIFTKNQKRRVRRLRNRERFQEVEQEIDHRLRKAKPRQEWRIKGQASGADDVIADEAERLAKGKCAEFGIDQADVDEVEEESAKLVLSPEQAVFEKPEGTENRHLKPLYINGYVNGKPMSKIMVDGGAAVNLMPYATFRKLGRNAEDLIRTNMVLKDFGGNPSETKGVLNVEMTVGSKTIPTTFFVIDGKGSYSLLLGRDWIHANCCVPSTMQQCLIQWQGDKVEIVPADSRLKMESPSCYFEGVVEGSNVYNKDAVDDLDDKQGQGFMSADDLEEVDIGPGDRPRPTFISKNLSSEFKTKLIELLKEFRDCFAWEYYEMPGLSRSIVEHRLPLKPGIKPYQQPPRRCKADMLEPVKAEIKRLYDAGFIRPCRYAEWVSSIVPVVKKNVYIDDVVVKSKEIEDHIADLRKVFERTRKYGLKMNPTKCAFGISAGQFLGFLVHERGIEIAQRSINAIQKIQPPEDKKKLQKLIGKINFVRRFISNLSGRLKPFTPLLKLKADQQFTWGAEQQKALDNIKEYLSSPPVLIPPQKGVPFKLYLSAGDKSIGSVLIQELEGKERAVFYLSRRLLDAETRYSPVEKLCLCLYFSCTKLRHYLLSNECTVVCKADVIKYMLSAPILKGRIGKWIFSLTEFDLRYESPKAIKGQAVADFIVDHRDDSIGLVDIMPWTLFFDGSVCAHGC

SEQ ID NO: 118880 - protein, 51 aa, Oryza sativa
  unsure (1)..(51): unsure at all Xaa locations
  Clone ID: PAT_MRT4530_2214C.1.pep
VVRHVXMTYGTRRAHLITQTIXXGHKKSFQQHVLRFFFPXXMKSCRPPRVS

SEQ ID NO: 118881 - protein, 1530 aa, Oryza sativa
  unsure (1)..(1530): unsure at all Xaa locations
  Clone ID: PAT_MRT4530_22150C.1.pep
MAEKLPLSPSSASPGSVKEKIQMLGLRYINEGNVVTVDPEKFTPDQKKDFEAMMQQARDQFLKSFTQTRKGTLVQKYKIKGREAXESAQPSDKGATDGSAQENQGENSQGVHGVQATADSTNAVXQQTIQPIHQQGLMNQSAGQLARHVLNQVVPEGLVHHMQPDHTVMPQIVPEHLVQNIQPNYQNYQGGNLNYQYRPPSPQAQYQQGGLTQPQFTPQCNQFEPMQQQSQGAAQQRPWADVIADVMREQFGLKPKDTGNLYRQPYPEWFERVPLPIRFKVPDFSKFSGQDAQCGEASAVDALRVRLFRLSLSGSAFTWFSSLPYGSINSWVDLEKQFHSYFYSGVHEMKLSDLTVIKQRHNEPVHEYIQRFKEMRNKCFSLSLTDAQLADLAFQGMIGLIREKFSSEDFDSLSHLIQKVTLHEQRFAEARKSSKRVNHVCPYMYGSDDDDDDSEIAAAEWVRSKKVIPCQWVKNSGKEERYDFDITKADKIFDLLLREKQIHLPPGHTIPSAEELGKKRYCKWHNSGSHSTNDCKVFRQQIQVAIEGGKIKFDDSKRPMKVDGRTADARRTRGFQMNSAKVINKYQRKYDKQQERCYKEDDGSFDPHWGYRKTQWCPSGIFTKNQKRRVQRLGNRERFQEVEQEINHRLRKAKPKQEWHVKGQAPGANDVAADDAKRLAKGKSVVTASINMVFTLPAEFWIDQADVDEVEEESAKLVLLPEQAVFEKPRGTENRHLKPLYINGYVNGKLMSKMMVDGGAAVNLMPYTTFRKLGRNAEDLIKTNMVLKDFGGNPLETKGVLNMELTVSSKTIPTTFFVIDGKCSYSLLLGRDWIHANCCIPSTMHPCLIQWQGDKIEIVPADRSVNVASADLALWEMDGLDCLSGKMENPTYYFEGVVEGSNVYTKDTVDDLNDKQGQGFMSADDLEEIDIGPGDRPRTKLIEFLKEFKDCFVWEYYEMLGLSRSIVEHRLPLKPGAEIKRLYDAGFIRPCRYAEWVSSIVSVIKKNGKVRVCIDFRDLNKATPKDEYPMLVADQLVDAASGHKILSFMDGNAGYNQIFMAEEDIHKTAFRCPGAIGLFEWVVMTFGLKSAGATYQRAMNYIYHDLIGWLVEVYIDDVVVKSKEIEDHIADLRKVFERTRKYGLKMNPTKCAFGVSAGQFLGFLVHKRGIEIAQRSINAIQKIQPPEDKKLQELIGKINFVRRFISNLFGRLEPFTPLLRLKANQQFTWGAEQQKALDNIKEYLSSPPVLIPPQKGIPFRLYLSVGDKSIGSVLIQELEGKERAVFYLSCRLLDAETRHYLLSNECTVVCKADVIKYMLSAPILKGRVGWGIDMIGMINPPSSKGHKFILVATDYFTKWVEAIPLKKVDSGDAIQFVEEHIIYRFGIPQTITTDQGSIFVSDEFVQFADSMGIKLLNSSPYYAQANGQAEASNKSLIKLIKRKISDFPRQWHTRLAEALWSYRMACHGSIQVSPYKLVYGHEAVLPWEVRIGSRRTELQVTLTADEYYNLMADEREDLVQSRLRALAKVT

SEQ ID NO: 118882 - protein, 1142 aa, Oryza sativa
  unsure (1)..(1142): unsure at all Xaa locations
  Clone ID: PAT_MRT4530_22151C.1.pep
MASDLSQSLDLSIYRYREYISLISTADQDQINWHAHTPEGEFWTCTGVKQISQAXCSIFTSTRFWHAQWDRLEVRRQFXLVAEKLPPSPSSASPGIVKEKIQRQGLGDINEGNIVTVDPEKFTPDQKKDFEAMMQQARDQFLNSFMQTRKGTFVQKYKVKVVPDEPETSTSKEGEGKKVSESAQPSDKGATDGSAQENQGDNSQGVHGVQGDGVHGLQGGNLNQDGETTQDFFNNFQDRVDYAVHNALINQSGVLVNTLSNMMKSIADGSIAEHQAVGPIYLQGGVFPNYRPLITGAQPSVQPVPPIAPSAQPTAPPLTPLPAPAASAPGQPINPRLLMREQPQHSGQATNQLTQDKVAAMFLRPQPTIDPVQQQLIQQTPPRHQFEPTQQQSQGAAQQRPWADVIADVMREQFGLKPKDTGNLYRQPYPEWFERVPLPNLFKVPDFSKFSGQDGVSTYEHIRRFLAQCGEASAVDALRVRLFRLSLSCSAFTWFSSLPYGSINSWVDLEKQFHSYFYSGVHEMKLSNLTAIKQRHNEPVDEYIQRFREMRNKCFSLSLTDAQLADLAFQGMIGPIKEKFSSEDFDSLSHLIQKVTLHEQRFAEARKNSKKVNHVCPFMYGSDDDDDDSEIAAAEWVRSKKDIPCQWVKNSGKEERQQIQVAIEGGKIKFDDSKRLMKVDGNPFPVNMVHTAGRTADARRTRGFQMNSTRVINKYQRKYDKQQERCYEEDDGSFDPHWGCEFFRFCWNEGMRLPTIEDCPGCGDVAESSSRSYNRNNRLKQTRVPVHQRLGPVNQHSFLEDDEDRKIQWCPSGIFTKNQKRRVQSLRNRERFQEVEQEINHRLRKAKPKQEWRVKGQAFGADDVVADEAEMLAKGKSVVTASINMVFTLPVEFGIDQADVDEVEEESAKLVLSSEQAVFEKPKGTENRHLKPLYINGYVNGKPMSKIMVDGGAAMEDPSYYFEGVVEGPNVYNKDTVDDLDDKQGQGFMSADDLEEVDIGPGDRPRLIFISKKLSSEFRTKLIELLKEFRDCFAWEYYEMPGLSRSIVEHRLPLKPGIKPHQQPPRRCKVDMLEPVKAEIKRLYDAGFIRPCQYAEWVSSIVPVVKKNGKVSVATEKICIFPNASVLIPVPGKAGVHHTNMI

SEQ ID NO: 118883 - protein, 128 aa, Oryza sativa
  unsure (1)..(128): unsure at all Xaa locations
  Clone ID: PAT_MRT4530_22152C.1.pep
TGTQPSAQAVPPIAPLAQPTVLPLTPLQQGLMNQSAGHALNQIVPEHLAHHVQPDGTVMPQIVPEHLVQNIQPNYQNYQGGNLSYQYRPSSPQVQYXQGGLAQPQFAPQYNQFEPTQQQSQGAAQQRP

SEQ ID NO: 118884 - protein, 530 aa, Oryza sativa
  unsure (1)..(530): unsure at all Xaa locations
  Clone ID: PAT_MRT4530_22153C.1.pep
MSKMMVDGGAAVNLMPYTTFRKLGRNAEDLIRMNMVLKDFGGNSSETKGVLNVELTVGSKTIPTSFFVIDGKGSYSLLLGRDWIHVNCCIPSTMHQCLIQWQGDKVEIVPADSRLKMENPSYYFEGVVEGSNVYTKDIVDDLDDKQGQGFMSTDDLEEIDIGPGDRPRPTFISKNLSSEFRTKLIELLKEFRDCFAWEYHEMPGLSRSIVEHRLPLKPGFKPYQQPLRRCKADMLEPVKAEIKRLYDAGFIRPCRYAEWVSSIVPVIKKNGKVRVCIDFRDLNKATPKDEYPMPVADQLVDAASGHKILSFMDGNAGYNQIFMAEEDIHKTAFRCPGAIGLFEWVVMTFGLKSAGATYQRAMNYIYHDLIGWLVEVYIDDVVVKSKEIGDHIADLRKVFERKRKYGLKMNPTKCAFGVSAGQFLGFLVHERGIEIAQRSINAIQKIKPPENKKKLQELIGKINFIRRFISNLSGRLEPFTPLLRLKADQQFTWGAEQQKALDNIKEYLSSPPVLIPPQKGXPFRLYLSAG

SEQ ID NO: 118885 - protein, 459 aa, Oryza sativa
  unsure (1)..(459): unsure at all Xaa locations
  Clone ID: PAT_MRT4530_22154C.1.pep
LCKHISREQNMEANDLAQGASGYKPMTKDIEIEIATVTADDWRYDVFQYLQNPFQSASRRLRYKALKYTLLDDDLYYRTIDGVLLKCLSADQAKVAIGEVHEGICGTHQSAHKMKWLLRRAGYFWPTMLEDCLRYYKGCQDCQKFGAIQRAPVSAMNPIIKPWPFRGWGIDMIGMVSPPSSKGHKFILVATDYFTKWVEAIPLKKVDSGDAIQFVQEHIIYRFGIPQTITTDQGSIFVSDEFVQFADSMGVKLLNSSPYYAQANGQAEASNKSLIKLIKRKISDYPRQWHTRLAEALWSYRMACHGSIQVPPYKLVYGHEAVLPWEIRIGSRRMELQDTLTADKYYNLMADEREDLVQSRLRALAKVTRDKERIAXAYNKKVVPKDFSEGELVWKLILPIGTRDSKFGKWSPNWEGPFQIHKVVSKGAYTLQGLDEEVYGRALNGKYLKKYYSSVWVNA

SEQ ID NO: 118886 - protein, 189 aa, Oryza sativa
  Clone ID: PAT_MRT4530_22155C.1.pep
MACLPGGRSSSPRLPPHRASSLRCPASCHCRSGRCRSAHGPPPPCSAPAGRPDNRPLWSLPPHSTGGETTASSGDGGGGAQTLPSARSGGRKGGRPRSRTSDDGHFSAVHMLLDGRRRRWTSWLVTYVRPCRDSLTVTAMLGDGGASSSSSEQRRSKRPAASRSGAETQLSDGVGPGLGAWHGPATIFV

SEQ ID NO: 118887 - protein, 415 aa, Oryza sativa
  Clone ID: PAT_MRT4530_22156C.1.pep
MPLHHRRALHSNDCDDGGYGCSSWPLSPPPPSVILTPFASPSPAPWACPPAFPAPSPSPLHGAAGGRRDQGGYHGSPPGGGGDADEHRRRIINLIVVGAAALAFLSMILLVVIVAVRRRRLRRRRQRQQALLAPAAPADAVAVNVEDGGDDDAEGGGGGGGGGGVVHHIWYIRTVGLDEAAIDSIAATRYRAGAGLLGAADCSVCLGEFQDGELVRLLPKCGHAFHVPCIDTWLRAHVNCPLCRSDVLGPAATATESGGGDTGSMPQADPVANTIAAAQQAAAPGDAILERQEEEEEAEQEDQGAPPHMEENRQEQSSSPDPLPPPRNVRRAASMDAAIVSTAAEVAALERLPEAAPEEEQSGGGGGGDKRGGAPGASCLKVSSSGRLSNLGAAERLPRSFFSRHCRARSSVLPL

SEQ ID NO: 118888 - protein, 967 aa, Oryza sativa
  Clone ID: PAT_MRT4530_22157C.1.pep
MAIKRTWQLWLLSLLTHAILLFTASSQSINGDDLSALLSFKSLIRNDPREVLSSWDTSSNTTNMTAPVFCRWTGISCNDRRHPGRVTTLNLSDAGLVGTISQQLGNLTHLRVLDLSTNSLDGDIPISLGGCPKLHAMNLSMNHLSVSATTILPVIFPKSLSNVKRNFIHGQDLSWMGNLTSLRDFILEGNIFTGNIPETFGKILNLTYFSVQNNQLEGHVPLSIFNISSIRILDLGFNRLSGSHPLDIGIKLPRISRFNTINNRFEGIIPPTLSNASALEVLLLHGNNYHGIIPREIGIHGNLKVFVLGYNALQATRSSDWEFMTSLTNCSSLTRLDVAHKNLVGEMPINIANLSKELIGIYLSENQITGTIPEDLWKLNKLTSLNLSCNLFTGTLPPDIGRLPIINSIFMSHNRITGQIPQPLGNISQLIFLSLSNNLLDGSIPISLGNLTKLNLLDLSSNALMGQIPQEILTIPSLTLLLSLSNNALSGSIPTQIGHLNNLIKMDLSMNKLSGEIPKAIGSCVQLSFLNFYRNLLQGQIPESLNNLRSLETLDLSNNNLAGPVPLFLANFTLLTNLNLSFNKLSGPVPNIGIFCNATIVSISVHRLHVLIFCIAGTLIFSLFCMTAYCFIKTRMKPNIVDNENPFLYETNERISYAELQAATESFSPANLIGSGSFGNVYIGNLIIDQNLVPVAIKVLNLDQRGASRSFLSECDALRRIRHRKLVKVITVCSGLDQNGDEFKALVLEFICNGSLDEWLHATSTTTSTSYRKLNMVERLHIAVDVAEALEYLHHHIVPPIVHCDIKPGNILLDDDMVAHVTDFGLAKIMHSEPRIQSSSLVIKGTIGYVPPEYGAGSQVSMDGDIYSYGVLLLEIFTGRRPTDNFINGITSLVDYVKMAYPNNLLEILDASATYNGNTQELVELVIYPIFRLGLGCCKESPRERMKMDDVVKELIAIKKACTAMPK

SEQ ID NO: 118889 - protein, 123 aa, Oryza sativa
  Clone ID: PAT_MRT4530_22158C.1.pep
ILLAVFLKNRNGKNPGFPKLKTFEEHPLFPIGENTKKPRPDGLSKSWATSNWQMEPPLKGPINPAGRGDNPQGVCYFCQRLKPQLFLFLPFFFWEFFRFSLESFKWGFPLRNTNMGFYGPLTP

SEQ ID NO: 118890 - protein, 292 aa, Oryza sativa
  unsure (1)..(292): unsure at all Xaa locations
  Clone ID: PAT_MRT4530_22159C.1.pep
MRPHPPYVFRVRSSPQSSRAPHPLPHPRRASSSSPPTPPALSFSRSPQSPXPPPQKSPRLPVTAPRLPSAPSPPSASSASPRLPSAPSPPSASSASPRLPSAPIRSPPSASSASPSSAGRSRARSTRLLCIAASARQAPPRRIAVPPPHPSPTRILHPGPSPPPARRNASPGASPRLLQSILKTNGVARQGLHLRHSCRAAITASTSLADLRRHNCIDKPRRSATTHCPRIHLERQRRQKVKSPRQAASATGILGFRLNRRRRHHRIPASSILLHTCEHNSGCEGVVVLLQP

SEQ ID NO: 118891 - protein, 297 aa, Oryza sativa
  Clone ID: PAT_MRT4530_2215C.1.pep
MGSGGEGGGGAASVRDQPPHDFANVASFSELPFLRPAPAPRESPNNSAIRLFGIDVPHASSSPDGKASKESVVVSTAAAAASTHGAAAAAIAAAADSSRKFECHYCCRHFPTSQALGGHQNAHKRERQHAKRVQMQTAMAAAAAAASGAHHHHHHHQLLGYPQHHHRFGLAGPTVAALYQHPSWPTMSGGGGGISSIGPQFYSGIGSVTQPINGSPLPAGLWRPGPMAAPPLLAGERRPVAVSTSSVFRGDEPRASASLVASQTASSSLLLSPQGQFACEQPPATTAAEGVSLDLHL

SEQ ID NO: 118892 - protein, 65 aa, Oryza sativa
  Clone ID: PAT_MRT4530_22160C.1.pep
DIKLFISFHDEHWVPLDNFVSSLLKKWTKSTRTSKIFFFCFEPYCSRVRIVAHCSGIYSILQLLP

SEQ ID NO: 118893 - protein, 188 aa, Oryza sativa
  Clone ID: PAT_MRT4530_22161C.1.pep
MAKQEKRKTDWDLGENGFRSPEQAGKWEWCKLGPSAVLNPILSDMTAESARDPRGPYMSGCHVGRPASPSTGAVDEPCRCGNAHRLRPRLQKPHQKPSPRSRSPLDPAPRRWRRLRRWFSRTVSSPPYEVPDQDRMLMSTLTKHLRGLTSKGVLKVVNRVHKRAEKIYMDARIDPSPEITREPGITLA

SEQ ID NO: 118894 - protein, 183 aa, Oryza sativa
  Clone ID: PAT_MRT4530_22162C.1.pep
MTVSMDGAPYLRTVDLKTYKNYKDMSLGLEKMFIGFSTGEDLPYWEILDVRHAIDVMHLTKNLCVNLLGFLGVYGKSKDTLEAHNLKHMEQRGDLHPEPKEKGSHYLSPANYTLSKAEKESMFECLESIKIGIFRPVYLHNMFPFERYMGVLKKYVHIRARPEASIAKRFGTEEVIELCVEFI

SEQ ID NO: 118895 - protein, 527 aa, Oryza sativa
  Clone ID: PAT_MRT4530_22163C.1.pep
MERSDKNTGAAIRQDHHFERRIAVALSDIHGAEFNSSSLHDVALRFRLLRQHGLWVSPDEFNKFKGPDGRFNAEVIDDPMGMLSLYNAAHLLIHGEVELEDAILLSRHQLETIIARNLKSSPLSQQVTRALRIPLPRTLKRIEALNYIAEYNQEQACNPSVLQLARLDFNLLQLLHLRELKEFSRINRILIPTSYNYFSGSRSPKNFGVKRAWPEAILRWVTDQEVLLRWGNNLYGAVELTYSRDRIVECYFWSYTIYYEQKYAQARIILAKIFVLATLLDDTYDMHAILEEGQKLNEAIQRWDESAISVLPEYLKNYYAKLMSTFKEIEDELKSEEKYYITYAVKAYQRLCKSYLQEAVWFHQNYIPSFQEHLDVSIISSGSSMLSVVSFVSAGDLATKEALEWAFGCTDAVKACGEIGRFQDDLAAFKHGKGKLDMATSVESYMKEHNVTGEEATAVISNLVEDAWKTINQARFERSSLVPAVNRVANLAMSIMFFYQGSEDAYTFNKLSMNIIKQLFVKPIPII

SEQ ID NO: 118896 - protein, 1868 aa, Oryza sativa
  unsure (1)..(1868): unsure at all Xaa locations
  Clone ID: PAT_MRT4530_22164C.1.pep
MAEKYSWTIHFHLFESGFMPSYNCWTSHGEQGVEMEEDEVEDDNIPDFAQYVGFEGNQTGEEEIAADGNDVADDLGQMLQDAREDCESEKEAHKLDKMLEDHRTSLYPGCVQGHKKLDTTLELLQWKAKNGVSDKAFGDLLKLVKNILPGGNKLPETTYEAKKIICPLGLEVHKIHACPNDCILYRGEEYENLEACPVCKALRYKIRRDDPGEVDGQLTKKRIPAKVMWYFPIIPRLRRLFRNKGNARMLRWHVEERQQDGMLRHPAYGSQWRNIDRKFKEFGKDARNIRFGLSTDGMNPFGEMSSGHSTWPVTMCIYNLPPWLCMKRKYIMMPIIIQGPKQPGNDIDVYLRPLVEDLKQLWKKEGVPVWDEDKQEEFNLRALLFVTINDWPALSNLSGQSNKGYKACTHCMDETESTYLKHCRKVVYMGHRRFLAANHPVRKKGKHFEHKADHRTKPKHHSGKTVFAMVKDLKVVFGKGPRSQHIESEDGHAAMWKKNSIFWELPYWEFLDVRHAIDVMHLTKNLCVNLLGFLGVYGKSKDTLEARNDLKHMEQRGDLQPEPKEKGSHYLSPASYTLSKAEKESMFECLESIKVPSGYSTNIKRIISTKEKKFTNLKSHDCHVLMTQLLPVVIKGILPDNVRATITKLCAFMNAISQKVIDPDRLEALQNEVVQCLVSFELIFPPSFFNIMTHLLCHLVKEIRILGPMYLHNMFPFERYMGVLKKYVRNRARPEASIAKGYGTEEVIEFCVEFIEDLRPIGVPESRHEGRLRGKGTLGRKAITTVDNNLFRKAHFTVLQHSSLVAPYIEEHLALVRARNIGKSDAWITRHHIDTFPAWLRQHLMGNESINQQLAFLARGPSGSIATFQGYEINGYTFYTRAQDMKSTNQNSAVRVDAMGHDGTTATYCGAIEDIWELDYGPLKVPLFRCQWVRLTGGGVMIDDSGMTTVDLNKVGYSDEPFILANDVTQVFFVKDMSSKGKKGRGPDEPKRQVVLPGKRKIVGVEDKTDEDYDQLTIMADRDEEQILYDTIAEGSSQYWNEEEGNEDPNQYLKEEGNVERDAEGNQQGHVERDVEGNQEEEASGSQPSVGQKRARGQRGAAKKLEGRHIITEVEEDGRPSAPAEATKNYVRHSGWVVRDNVPVSTVYWRRTRARGDHESFVPDSEKEMLWTTMLETFTLPAGTEDKVKRWTLKKMAEQFQSFKGDLYQKYILKGQTPNFDTFPKLRDHWDEFVAYKTGEQGQVMMERNKENAAKKKYHHHLGSGGYSVAMPKWEQMEASLIERGIEPATANWPERSKFWYYAHGGTLNPADGSLGTFRPDRDRDELTLALQTPEHPGRTRGKGVIPWKIGFKEDIHTYRSRMRSKRDTEAKIADLEFRVSSYELNMQEEVARKVDERMAAHRSHDPQPTIPPAMVSPSGNRSSCASTGQVASGIAIPTDPSGTYHCRPIPAGYSKVKVELVEGAYEDLELDYPGGDGXYIILPGRQAASRAPSPPAPPSPPQDPAPSPPHAPPAPSPPQAPASTPPQDPAPTPPRAPTPTPPQAPLPAPXVKGPPAPPPTHTRATKKAKVDAAKNKDPGXKRQFKPRSPEKKIPIDPSVRNFFRGMSASVKEAIKLSDYERTLKKASSGKSKPVPQLGEQPNQEIKPLVTGPCIMEIQRARRRRVFDTGFIDPRKVNVAMLDQYPQETEDNLVHLLKAQHYKTFILLPYNTEFHWVLLLIDLEACTVNVYDSMDKKESTFDKVFELIDRAWYRFRHLVRGKWRERLRRKFKFPCTKQKQGTNLCGYYVCEYCHCLADQIITTRELDFIRMRDNLTTHKEFIAAVQEQLMGFINEEILDPKGEFYYDGNTIHRSLASELAASTTTSKS

SEQ ID NO: 118897 - protein, 1743 aa, Oryza sativa
  unsure (1)..(1743): unsure at all Xaa locations
  Clone ID: PAT_MRT4530_22165C.1.pep
QRVEVHEPPMDWQWMYADRRSKEFIDDVHYFXRVTEANRHKAFICCPCNKCKNQKDYSASRTIHFHLFELGFMPSYNCWTSHGEQGVEMQEDEVEDDNIPDFAQYVGFKGNQTGEEERDADGNDVADDLGQMLQDAKEDCESEKGAHKLDKMLEDHRTSLYPGCEQGHKKLDTTLEFLQWKAKNGVSDKAFGDLLKLVKNILPEGNKLPKTTYKAKKIVCPLGLEVQKIHACPNDCILYRGEEYENLEAYPVCKALRYKIRRDDPGEVDGQLIKKRIPAKVMWYFPIIPRLRHLFRNKGNARMMXWHAEERQQDGMLRHPADGSQWRNIDRKFKDFGKDARNIRFGLSTDGMNPFGEMSSGHSTWPVTMCIYNXPPWLCMKRKYIMMSIIIQGPKQPGNDIDVYLRPLVEDLKLLWKKEGVPVWDEDKQEEFNLRALLFVTINDWPALSNLSGQSNKRYKACTHCMDETESVYGKSKDTVEARNDLKHMEQRGDLHLEPKEKGSHYLSLASYTLSKAEKESMFECLESIKEXSDXSTNIKRIISTKEKKFTNLKSHDCHVLMTQLLPVIIRGILPDNVRATITKLCAFMNAISQKVIDPDRLEALQNDVRYMGVLKKYVRNRARPEASIAKGCGTEEVIEFCIEFIEDLRPIGVPESCHEGRLHLMGNETNNQQLAFLARGQSGSITTFQGYEINGYTFYTRAQDMKSTNQNSVVHIDDMGHDGTTGTYYSAIEDIWELDYGPLKVPLFRCQWVRLTGGGVMIDDSGMTTVDLNKVGYSDEPFVLANDVTQVFYVKDMSSIGKKGRGPDEPKRHVVLPGKRKIVGVEDKTDEDYDXLDGQPPFTVTIDPSILLSNEDTPYSRSDHKEGTIYLNKEGNVERDAEGNQEGNVVKDVEGNQEEEASGNQPSAGQKRARGQQGAAKKLEGRHIITEVDEDGXPSAPAEAAKNYVRHSGWVVWDNVPVSTVYWRRTRARGDHESFVPDSEKEMLWTTMLETFTLPAGTEDKVKRWTLKKMAEQFLSFKGDLYQKYILKGQTPNFDTFPKLRDHWDEFVAYKTCQQGQVMMERNKENAAKKKYHHHLGSGSYSVAMPKWEEMEASLLERGIEPATAKWLDRSKFWYYAHGGTLNPVDGSLVFSDQIREATHRLTDAVEASSQGTFRPDREKDELSRMRSKRDTRAKIADLEYRVPNYELSMXEEVARKVDERMAAHRSHDPQPTIPPAIVSPSGNRNSCTSTGQVASGMAIPTNPSGTYHCRPIPAGYSKVEVELVEGAYEDLELDYPGGDGETHLRDTSHAIILWRKRDIILPGRQAVSRAPSPPAPPPQAPAPTPPQAPIPTPPQAPYPAPFKSRAPQAPPPAPTRATKKAKIDAAKNKDPGYDCTQEELDAYVASKVRRQLKPRSPKKKIPIDPSVRNFFRGMSAPAKEAIKLSDYERTLKKASSEKSKPVPQLGEQPNQEIEPLVTGEDFGIEEFITDTGLTTDQLLRGAPIEKTKVKYMYELSKPLVKPEQLQSLPTQMYKFHQLYMEMSATGREMIGARIRDTDFLQGDDILWINFKGIYELYQLDALDISIMSCWILMEIQRARRRXVFDTGFIDPQKVNVAMLDQYPQATEDNLVHLLKAQHYKTFILLLYNTNVNVYDSMDKKESTFDKVFELIDRALYRFRHLVRGKWRERLTRKFNFPFIRMRDNLITHKEFIAAVQEQLMGFINEQILDPKGEFYYDGNTIHMSLASEITTTTTSKS

SEQ ID NO: 118898 - protein, 84 aa, Oryza sativa
  unsure (1)..(84): unsure at all Xaa locations
  Clone ID: PAT_MRT4530_22166C.1.pep
MAVNDRFTGNPGRLTVLTTSGSGCFTAFNYCFEMPALCKRTPSFLWLYPASYLLFRXRNSGSRISGCDSHRCRVGAYGACALHV

SEQ ID NO: 118899 - protein, 1078 aa, Oryza sativa
  Clone ID: PAT_MRT4530_22167C.1.pep
MDRQWMYADRRSKEFIDGVHYFLRVAEANRQRGFICCPCNKCKNQKEYSASRTIHFHLFESGFMPSYNCWTSHGEQGVEMEEDEVEDDNIPDFAQYVGFEGNQTGEEEIAADGNDVADDLGQMLQDAREDCESEKEAHKLDKMLEDHRTSLYPGCEQGHKKLDTTLELLQWKAKNGVSDKAFGDLLKLVKNILPGGNKLPETTYEAKKIVCPLGLEVHKIHACPNDCILYRGEEYENLEACPVCKALRYKIRRDDPGEVDGQLTKKRIPAKVMWYFPIIPRLRRLFRNKGNARMLRWHAEERQQDGMLRHPADGSQWRNIDRKFKEFGKDARNIRFGLSTDGMNPFGEMSSGHSTWPVMMCIYNLPPWLCMKRKYIMMPIIIQGPKQPCNDIDVYLRPLVEDLKQLWKKEGVPVWDEDKQEEFNLRALLFVTINDWPALSNLSGQSNKGYKACTHCMDETESTYLKHCRKVVYMGHRRFLAANHPVRKKGKHFEHKADHRTNPKHRSGKTVFAMVKDLKVVFGKGPGSQHIESEDGHAAMWKKNSIFWELPYWEFLDVRHAIDVMHLTKNLCVNLLGFLGVYGKSKDTLEARNDLKHMEQRGDLHPEPKEKGSHYLSPASYTLSKAEKESMFECLESIKVPSGYSTNIKRIISTKEKKFINLKSHDCHVLMTQLLPVVIRGILPDNVDTGFIDPRKVNVAMLDQYPQETEDNLVHLLKAQHYKTFILLPYNTEFHWVLLLIDLEACTVNVYDSMDKKESTFDKVFELVDRAWYRFRHLVRGKWRERLRRKFKFPCAKQKQGTNLCGYYVCEYCHCLTDQIITTRELDFIRMRDNLTTHKEFIAAVQEQLMGFINEEILDPKGEFYYDGNTIHRKRKKVYHHPHTGNANTQVQEKASTEPAAAKHDRPPLGQQQNTAEIAQNPTLTINTNPALSKSSEEGNDASNVIVAGLVETGLGFHPPITTCESTAGAPMLHHHQTSAGTWNHCISAPCRPAFVRRRPHRTHRQLLLVAPCPPPPPPAAPRRVVTGLRHRRPRLTVLSRPPPPLVAPPRAVPASATPGLHSRGRHKLTVVCHYRRH

SEQ ID NO: 118900 - protein, 178 aa, Oryza sativa
  unsure (1)..(178): unsure at all Xaa locations
  Clone ID: PAT_MRT4530_22168C.1.pep
ETSLPPPRPTPPTGAASSALRRTRRRRSEQSRSGDRLLPPRRKPPRRPGPFWRRPHPSAAAEAHSRWRRARRPRRPRRRXTRSPATSAPTTXPPPPPPPPPRPPQRRPPPLQHCRCRRRLPRPPQRRPPPLRHRRRLVAPFLSVRVIGADKCLDANDIGANTLTSYPFLQEKSVECHW

SEQ ID NO: 118901 - protein, 1794 aa, Oryza sativa
  unsure (1)..(1794): unsure at all Xaa locations
  Clone ID: PAT_MRT4530_22169C.1.pep
MADRDEEQILYDTIAEGSSQYWNEEEGNEDPNQYLNEEGNVERDAEGNQQGHVERDVEGNQEEEASGSQPSVGQKRARGQRGAAKKLEGRHIITEVEEDGRPXAPAEAAKNYVRHSGWIVRDNVPVSTVYWRRTRARGDHESFVPDSEKVMLWTTMLETFTLPVGTEDKVKRWTLKKMAEQFQSFKGDLYQKYILKGQTPNFDTFPKLRDHWDEFIAYKTGEQGQAMMERNKENAAKKKYHHHLGSGGYSVAMPKWEQMEASLIERGIEPATANWPERSKFWYYAHGGTLNPADGSLVFGYQIQEAARRLTDAVEASSQGTFRPDRDRDELTLALQTPEHPGRTREKGVIPWKIGFKEDIHTYRSRMRSKRDTEAKIADLEFRVSSYELNMQEEVARKVDERMAAHRSHDPQPTIPPAMVSLSGNRSSCASTGQVGSHSMDAMQTQDESTCPVDDITQRTPCELHIPLKNLSIKVASGMAIPTDPSGTYHCRPIPAGYSKVEVELVEGAYEDLELDYPGGDGETHLRDTCHAIILWRRRYIILPGRQAASRAPSPPAPPSPPQDPAPSPPHAPPAPSPPQAPASTPQDPAPTPPRAPTPTPPQAPLPAPSKSRAPPAPPLAHTRATKKAKVDAAKNKDPGYDCTQEELDAYVASEVKRQFKPRSPEKKIPIDPSVRNFFRGMSASVKEAIKLSDYERTLKKASSGKSKPVPQLGEQPNQEIEPLVTGKEMTIEQFITDTGLTTDQLLGVAPIEKAEVKYMYELGKPLVKPELLQSLPTQMYKFHQLYMEMSATGREMIGARIRDTDFLQGDDILWINFRGIYELYQLDALDVSIMSCWILMEIQRARWRRVFDTGFIDPRKVNVAMLDQYPQETEDNLIHLLKAQHYKTFILLPYNTEFHWVLLLIDLEACTVNVYDSMDKKESTFDKVFELIDRAWYRFRHLVRGKWRERLRRKFKFPCAKQKQGTNLCGYYVCEYCHCLADQIITTRELDFIRMRDNLTTHKEFIAAVQEQLMGFINEEILDPKGDFINMPLDEDLPPTGSQPNPAADDDEDPDGGHIWQMGHPQVGPGDWDDLVQQQDAANGKVEDAWGQDHPMGQIMEANPDGQIDLAAANPGHENVVVPFVPAADKGKKAHEDMEILEVLPLAVHPPSSPVCQTAAPLMLPKALVKKRDGKTLLYNPYRRQSARLQHIKGDSELKVDPRMGIGKPRGKFARKLKELAGMNAESKLLSLRQKIEDSGCQVVWSLDPGFNDPAKCISFKLKVLRKKLLAWSKNLSKLMGLLKNCNKVVDFLDLVEENRMLSIYEWNFRETVKEIDSLMSIIPADKAPGPDGFNGFFMKKCWHIIAQDYYRLVAHFHAGNVDLEILNSSFITLVPKKTSLETVNDFRPISLMGISLKIVTKLLAGRLQGVILKLVSDNHYGFIKGKTIQDCPAWPFEYIHQCQQSKREIVLLKLDFEKAFDTIEHSAILSVMQHMGFPLKWIEWVQMVFSTASSAVLLNGVPGNSFKCRRGVRQGVPLSLLLFVLGAELLQRIINKAFHQGLLSKPINESSGEGFPIIQYADDTLILLKTSQKEVFCFKAILNMFAQSTGLKHMVKFYNGADLPWVKLISQSYYDSKVPHLMMNKGSFWWRDVTSLVDIFRGIAKCEIRTGRTALFWNDLWNDDFKCISYPNLFAVTMYKSDSVKAMCSRPLEDSFALPLSDEAYSKFLQLQEVLDSLNLQSRMGDAWNFIWGSDKYTAKKFYKLNYSALQPPRPMIWLWKTKCVMKIKVFAWLMFCDRLNTRDMLDRRHCA

SEQ ID NO: 118902 - protein, 355 aa, Oryza sativa
  Clone ID: PAT_MRT4530_2216C.1.pep
MNDSLCRNFSDEEIADALFQIGPLKAPGPDGFPARFYQRNWGLIKSDVVRAVKEFFHTGIMPDGINATAIVLIPKGDPLSPFLFLFVADGLSLLLDEKVLQGAITPVQVCRRAPGISHLLFVDDTLLFFKADNGQANVIREVLDDYAVGTSQFINPAKCSMLIDDITPASVQVEIRSTLQIVGNGFEDKYLGFPTPEGRMNKGKFQSLQEKIWKRIIMMKWVSELLGPDGVWDVQKVNRVFLPCGAEEILRIRTSMRQDEDFLAWHPDKMGRFSVRSAYKLAMSLANMDESSSSSDDKSRKIPRQGLKIHQDCSEALPRWEKPQERWMKLNVDGSFDSVTSTGSVGVVLRNTSGQ

SEQ ID NO: 118903 - protein, 668 aa, Oryza sativa
  unsure (1)..(668): unsure at all Xaa locations
  Clone ID: PAT_MRT4530_22170C.1.pep
MERDVEGNQEGHMERDVEGNQEEEASGSQPSAGQKRARRQRGAAKKLEGEQGQAMMERNKENAAKKKYHHHLGSGGYSVAMPKWEEMEASLLERGIEPVTANWPEQSKFWYYAHGGTLNPADGSLTPEHLGRTRGKGVIPWKIGFKEDIHTYRSRMRSKRDTEAKIADLEFRVSSYELGMQEEVARKVDERMAAYQSHDPQPTIPPAMVGSQSMDAMQTQDETTCPVDDITQRTPCELHIPFKNLSIKVASGMAILTDPSSTYHYRPIPAGYSKVEVELVEGAYEDLELDYPGGDGETHLRDTSHAIILWRKRATKKAKVDAAKNKDPGYDCTQEELDAYVASEVRRQLKPRSPEKNIPIDPSVKNFFRGMSAPAKEAIKLSDYERTFKKASSRKSKPVPQLGEQPNQEIEPLVTGEDFEIQDFINDTGLTTDQLLRDAPIEKAEVKYMYELGKPLVKPELLQSLPTQMYKFHQLYMEMSATGREMIRARIRDTDFLQGDDILWINFKGIYEIYQLDALDLLDFNGDSKGPTAGVFDTGFIDPRKXFHWVLLLFDLEACTVNVYDSMDKKESTFDKVFELIDRAWYRFRHLVRGKWRERLRRKFKFPCAKQKQGTNLCDYYVCEYCHCLAHQIITTRELDFIRMRDNLITHKEFIAAVQEQLMGFINE

SEQ ID NO: 118904 - protein, 363 aa, Oryza sativa
  Clone ID: PAT_MRT4530_22171C.1.pep
MENQTLHNFYPRRNLTNENNMPRHVLDPSEIVADPACRKQIEDYPKEIIDQMDRQWMYADGRSKEFIDGVHYFFRVAEANRQKGFICCLCNKCKNQKEYSTSRTIHFHLFESGFMPSYNCWTSHGEQGVEMEEDEVEDDNIPDFAQYAGFEGNQTGEEERDADGNDGLEVQKIHACPNDCILYRGEEYENLEACPVCKALRYKIRRDDPGEVDGQLTKKRIPAKVMWYFPIIPRLRRLFRNKGNARMMRWHAEERQQDGMLRHPADGSQWQNIDRKFKDFGKDERNIRFGLSTDGMNPFGEMSSGHSTWPVTMCIYNLPPWLCMKRKYIMMPIIFQGPKQPGNDIDVYLRPLVEDLKLLWKKE

SEQ ID NO: 118905 - protein, 357 aa, Oryza sativa
  Clone ID: PAT_MRT4530_22172C.1.pep
MGRSPCCEKIGLKKGPWTPEEDQKLLAYIEEHGHGSWRALPSKAGLQRCGKSCRLRWTNYLRPDIKRGKFSLQEEQTIIQLHALLGNRWSAIATHLPKRTDNEIKNYWNTHLKKRLAKMGIDPVTHKAINGTLNNTAGDKSAKVTASLSHMAQWESARLEAEARLARESKMRIAASTPSKLHAQSTNPPASTPSPCFDVLNAWQSAKIDLESPTSTLTFAGSNASMLPFSTTTALELSESNSNVWQQRSDELEGEESEWKFVSKQQLQGMHGKETEEHFIGCEESWFPGTANIGAGFTGMLLDGSNMHDTSECWDESSNGQDEQRSQVSEDAENKNYWNGIFSMVNSEQPPLQPPLL

SEQ ID NO: 118906 - protein, 1826 aa, Oryza sativa
  unsure (1)..(1826): unsure at all Xaa locations
  Clone ID: PAT_MRT4530_22173C.1.pep
MEEDEVEDDNIPDFAQYXGFEGNQTGEEEXMLMDAKEDCESEKGAHKLDKMLEDHRTSLYPGCEQGHKKLDTTLEFLQWEAKNGVSDKAFGDLLKLVKNILPEGNKLPETTYEAKKIVCPLGLEVQKIHACPNDCILYRGEEYENLEACPVCKALRYKIIRDDPGEVDGQLTKKRIPAKVMWYFPIIPRLRHLFRNKGNARMMRWHAEERQQDGMLKHPADGPKQLGNDIDVYLRPLVEDLKLLWKKEGVSVWDEDKQEEFNLRVLLFITINDWPALSNLSGQSNKGYKACTHCMDETESTYLKHCRKVVYMGHRRFLVANHPVRKKGKHFEHKADHRTKPKHRSGKTVFAMVKDLKVVFGKGPGSQPIESKDGHAAMWKKNSIFWELPYWEFLDVRNAIDVMHLTKNLCVNLLGFLGVYGKSKDTLETRNDLKHMEQRGDLHPEPKEKGSHYLSPASYTLSKAEKESMFECLESIKKVIDPDRLEALQNDVVQCFVSFELIFPPSFFNIMTHLLCHLVKEISILGPVYLHNMFPFERYMGVLKKYVRNRARPEASIAKGYGTEEVIEFCVEFIEDLRPIGVPESRHEGRLRGKGTLGRKAIMTVDNNLFRKAHFMVLQQSSLVAPYIEEHLALVRARNIGKSDAWITRHHIDTFPAWLRQHLMGNKSINQQLTFLARGSSGSIATFQGYEINGYTFYTRAQDMKSTNQNSAVRVDAMGHDGTTGTYYGAIEDIWELDYGPLKVPLFRCQWFRLTGGGVMIGDSGMTTVDLNKVGYSDEPFVIANDVTQVFFVKDISSKGKKSRGPDEPKRHVVLPGKRKIVGVEDKTDEDYDQLDGQPTFTVTIDPSILLSNEDTPYSRSDHKEGTIMADRDEEQILYDTIAEGSSQYWNEEEGNEDPNQYLNEEGNVERDAEGNQEGHVERDVEGNQEEEASGSQPSVGQKRARGQRGAAKKLEGRHIITEVEEDGRPSAPAEAAKNYRRTRARGDHESFVPDLEKEMLWTTMLETFTLPAGTEDKVKRWTLKKMAEQFQNFKGDLYQIYILKGQTPNFDTFPKLRDQWDEFVAYKTGEQGQAMMERNKENAAKKKYHHHLGSGGYSVVMPKWEEMDASLLESGIEPATANWPERSKFWYYAHGGTLNPADGSLDFGDQIRDAARRLTDAVEASSQGTFRPDRERDELSLALQTPEHPGRTRGKGVIPWKIGFKEDMHMYRSRMRSKRDTESKIADLEFRVSSYERSMQEEVARKVDERMAAHRSHDPQSTIPPAMVSPSGNRSSCASTGQVGSQSMDAMQTQDESTCPVDDITQRTPCELHIPFKNLSIKVASGMVIPTDPSGTYHCRPILARYSKVKVELVEGAYEDLELDYPGGDGETHLRDTSHAIILWRRRYIILPGRQAASRAPSPPAPPSPPQDLAPTPPQALAPTPSQAPLPAPSKSRAPQAPPPAHTRATKKAKVEAAKNKDPGYDCKQEELDAYVTSEVKRQFKPRSPEKKIPIDPSVRNFFRGMSTPAKETIKLSNYEQTLKKASSGKSKPVPQLGEQPNQEIESLVTGEDIGIEEFINDTSLTTDQLLGVAPIEKAEVKYMYELGKLLVKPELLQSLPTQMYKFHQLYMEMSATGREMIGARIRDTNFLQGDDILWINFNGIYEPYQLDALDGSIMSCWILFHWVLLLFDLAACTVNVYDSMDKKESTFDKVFELIDRAWYRFRHLVRGNWRERLRRKFKFPVVLMVPIGNSAAIHLLPVAFHVSNRVDIDEAPEKLTTVVAMVVDRSTMGARPKQGKKGRKVGDVLTDERCSCGAVVQWQKIDAGETAAQPDLDLAGEVLG

SEQ ID NO: 118907 - protein, 103 aa, Oryza sativa
  unsure (1)..(103): unsure at all Xaa locations
  Clone ID: PAT_MRT4530_22174C.1.pep
PPLPFVPLLLPPPAGAAVAACPPTATLHAPSPPHPPARAQPPLVPLPPPXPPAHAPRPLVPLPQPLPARAPPPPXPLPPPRLRAAAPPPMPIGSGICGYPTRR

SEQ ID NO: 118908 - protein, 651 aa, Oryza sativa
  Clone ID: PAT_MRT4530_22175C.1.pep
MADRDEEQILYYTIAEGSSQYWNEEEGNEDPNQYLNEEGNIERDAEGNQEGHVERDVEGNQEEEASGSQPSAGRKRARGQRGAAKKLEGRHIITEVDEDGRPSAPAEAAKNYFRSFKGDLYQKYILKGQTPNFDTFPKLRDHWDEFVAYKTDQQGQAMMERNKENAAKKKYHHHLGSGGYRIAMPKWEEMEASLIERGFELATTNWPERSKFWSRMRSKRDTEAKIADLEFRVSSYELSMQEEVARKVDERIAAHRSHDPQPTIPPAMVSPSGNRSKCASTRQVGSQSMDAMQTQDETTCPVDDITQRTPCELHIPFKNLSIMVASGMAIPTDPSGTYHCRPIPAGYSKVEVELVEGAYEDLELDYPRGDGETHLRDTSHAIILWRKRYIIFPGRQAASDAPSPLAPPSPPQAPSSSPPHDPAPSPPQVPAPTPPQAPAPTPPQAPRLAPSKSRAPQAPPPAPTRATKKAKVDAAKNKDPGYDCTQEELDAYVASEVRRQLKPRSPEKKIPIDSSVRNFFRGMSAPAKVAIKLSNYERTLKKASFGKSKPVPQLGEQPNQEIEPLGIYELYQLDALDVSIMSYWILMEIQRARRRGVFDTGFIDPRKVNVAMLDRYPQETEDNLVQLLKIPLGAFTLRPGGLHRQRIWLNG

SEQ ID NO: 118909 - protein, 1729 aa, Oryza sativa
  Clone ID: PAT_MRT4530_22176C.1.pep
MDRQWIYADRRSKEFIDGVHYFLRVAEANRQRGFICCPCNKCKNQKKYSASRTIHFHLFESGFMPSYNCWTSHGEQGVEMEEDEVEDDNIPDFAQYVGFEGNQTGEEEIAADGNDVADDLGQMLQDAREDCESEKEAHKLDKMLEDHRTSLYPGCEQGHKKLDTTLELLQWKAKNGVSDKTFGDLLKLVKNILPGGNKLPETTYEAKKIVCPLGLEVHKIHACPNDCILYRGEEYENLEACPVCKALRYKIRRDDPGEVDGQLTKKRIPAKVMWYFPIIPRLRHLFRNKGNARMLRWHAEERQQDGMLRHPADGSQWRNIDRKFKEFGKDARNIRFGPKQPGNDIDVYLRPLVEDLKQLWKKEGVPVWDEDKQEEFNLRALLFVTINDWPALSNLSGQSNKGYKACTHCMDETESTYLNHCRKVVYMGHRRFLAANHPPTYKERKCHAAMWKKNSIFGSYPYWESLDVRHAIDVMHLTKNLCVNLLGFLGVYGKSKDTLEARNDLKHMEQRGDLHPEPKEKGSHYLSPASYTLSKAEKESMFECLESIKVPSGYSTNIKRIISTKEKKFTNLKSHDCHVLMTQLLPVVIRGILPDNVRATITKICAFMNGISQKVIDPDRLEALQNEVVQCLVSFELIFPPSFFNIMTHLLCHLVKEIRILGPMYLHNMFPFERYMGVLKKYVRNRARPEASIAKGYGTEEVIEFCVEFIEDLRPIGVPESRHEGRLRGKGTLGRKAITTVDNNLFRKAHFTVLQHTSLVAPYIEEHLALVHARNIGKSDVWITRHHIDTFPAWLRQHLMGNESINQQLAFLARGPSGSIATFQGYEINGYTFYTRAQDMKSTNHNSAVRVDAMGHDGTTATYYGAIEDIWELDYGPLKVPLFRCQWVRLTGGGVMIDDSGMTTVDLNKVGYSDEPFVLANDVTQVFFVKDMSSKGKKGRGPDEPKRQVVLPGKIKIVGVEDKTDEDYDQLDGQPPFTVTIDPSILLSNEDTPYSRSDHKEGTIVRRKYMADRDEEQILYDTIAEGSSQYWNEEEGNEDPNQYLNEEGNVERDAEGNQQGHVEKDVEGNQEEEASGSQPSVGQKRARGQRGAAKKLEGRHIITEVEEDGRPSAPAEAAKNYVRHNDHESFVPDSEKEMLWTTMLETFTLPAGTEDKVKRWTLKKMAEQFQSFKGDLYQKYILKGQTPNFDTFPKLRDHWDEFVAYKTGEQGQAMMERNKENAAKKKYHHHLGSRMWSKRDTEAKIADLEFRVSSYELNMQEEVARKVDERMAAHRSHDPQPTIPPAMVASGMAIPTDPSGTYHCRPIPAGYSKVEVELVEGAYEDLELDYPGGDGETHLRDTCHAIILWRRRYIILPGRQAASRAPSPPAPPSPPQDPAPSPPHAPPAPSPPQAPASTPPQDPAPTPPRAPTPTPPQAPLPAPSKSRAPPAPPPAHTRATKKAKVDAAKNKDPGYDCTQEELDAYVASEVKRQFKPRSPEKKIPIDPQCQELLQGGIYELYQLDALDVSIMSCWILMEIQRARRRRVFDTGFIDPRKVNVAMLDQYPQETEDNLVHLLKAQHYKTFILLPYNIEFHWVLLLIDLEACTVNVYDSMDKKESTFDKVFELIDRAWYRFRHLVRGKWRERLRRKFKFSCAKQKQGTNLCGYYVCEYCHCLADQIITTRELDFIRMRDNLTTHKEFIAAVQEQLMGFINEEILDPKGEFYYDGNTIHRSLASELAASTTTSKS

SEQ ID NO: 118910 - protein, 155 aa, Oryza sativa
  Clone ID: PAT_MRT4530_22177C.1.pep
GREVEYHAAGPAAPPHRASPSAAAASRWGAPPLLRIALWSSASPPLLSTMEERDAHPQDRRLDAPFLLPAAPCAPPRSPRSRHQQTSQPAIEEGDGSEGRMLHLSVPHPPSLSPRRRQRRTSTCVDAAVLPGVDHVVSLHLFMLRCQRLILNSCS

SEQ ID NO: 118911 - protein, 218 aa, Oryza sativa
  Clone ID: PAT_MRT4530_22178C.1.pep
GGGRPGAQRGEAGEEEGGAATTAGDGCGCGGHGRTHRLVATLGTWKRRRVGRVVLVDLEAERVWRRRGEVEQEWMEARRRWGPPIVADLSKLHRVAPELVAEVLSTRPPPLALPLFLWVARQKSSPSCDDGRRGASVVGVASSWRGRSAAVAASCSYPREINEVDLECGLPPSPRRPTPVPTQLAPMAAKARLAQASPIPQWLHRLRRRRHGLRLRIR

SEQ ID NO: 118912 - protein, 102 aa, Oryza sativa
  Clone ID: PAT_MRT4530_22179C.1.pep
GPISPILGYWLTVVVLSPKDAQMVFRYLWPQIRMSCHMKWIKGKCVLYHKFGCGYEKRYLSFPSLVHEVISRWSLIICTVATVLDCAALVVTLIFSDDMGTR

SEQ ID NO: 118913 - protein, 867 aa, Oryza sativa
  Clone ID: PAT_MRT4530_2217C.1.pep
MTSPCSNHCPILVRFTRDTSHANRKKCLHYEICWEHEPASTEVIGDSWLEAGEKQHLGDMNCALRKVMSALQTWSRTKFRNVGRCLEKARKKLAELVERDADRREIRIANFSDEEIADALFQIGPLKAPGPDGFPARFYQRNWGLIKSDVVRAVKEFFHTGIMPDGINATAIVLIPKVNQPMELKEFRPISLCNVIYKIVSKCLVNRLRPILDDLISQNQSAFVPGRMITDNALLAFECFHSIQRNKSPGKAACAYKLDLSKAYDRVDWSFLEQAMYKLGFTHRWGDPLSPFLFLFVADGLSLLLDEKVLQGAITPVQVCRRAPGISHLLFVDDTLLFFKADNGQANVIREVLDDYAGKRKTHWRAWKYLTKAKQYGGLGFKDFKLFNQALLARQAWRLIVNPDSLCARVLKAKYFPNGTLVDTCFSGNASPGWRAIEYGLELIKKGCIWRVGNGQSVCIWRDPWIPRDHSRRPITRKGNCRMKWVSELLGLDGVWDVQKDNRVFLPCGAEEILRIRTSMRQDEDFLAWHPDKMGRFSVRSAYKLAMSLANMDESSSSSDDKSRKMWDLIWKCEVPQKVKIFMWKAATNSLATMENKKRRKLEQSEICCICGTVREDVGHALGRCPHAKRLWSALLYSGNLSVGIVGNSTGSSWLFEQVELTPKEERHMLFMLLWHIWFVRNEIVHDKVPPPVDVSQRFLQSYITSLLEIKQYPQANVVTGKHVVQCRPRQGLKIHQDCSEALPRWEKPQERWMKLNVDGSFDSITGTGGVGVVLRNTSGQVIFSVCGFIERCTSPLESELLACKEGLNMVLQWTLLPIIVETNCLTTVNMIQDAQKEMSALAHVVKDIGILMSGDREIVLKKIQRS

SEQ ID NO: 118914 - protein, 100 aa, Oryza sativa
  Clone ID: PAT_MRT4530_22180C.1.pep
RPPRHRRLLPTEAASSPTPPNRGRCGLPPSSSSPPSPSATAAARRLSLLARFLLDAFRRHQRWGPPIVADLSKLHRVAPELVAEVLSTRPPPLALPLFLH

SEQ ID NO: 118915 - protein, 300 aa, Oryza sativa
  Clone ID: PAT_MRT4530_22181C.1.pep
MSGLHVALSFPSYLPSSSLSLALALSRACGTPGTFCRAAHRKNGNTSGGGSGGRVRWTSATSLGATWRSLERSVTTGGPQRWWRRNVSRRNRMSRERQRAPAVAEGEGGEEEEEGGATASVGRSRRWRGGRRRRRLGWEEAAVARWPSPPTGHSPPRSPTRPASIRSCSASPRCPRTRSASGSMRTTRPTCRRFQVPDVAMRRRVRPLRRKKRSGGARLLAVTSPVPSLAAVEPATAAATAAAVASCRRGAALLLSRLARRALGRPPPFTARVATTVASPARRAEQREEERDKKRGKQRR

SEQ ID NO: 118916 - protein, 184 aa, Oryza sativa
  Clone ID: PAT_MRT4530_22182C.1.pep
MSTTITVEGRRHAEAQVGDVVAYGYRRTQRQRHGRQRRLVGVAARGGAEDGLWEAIWATSTRKYPLSLGHFRLLRWLGYGNISAACTLLELRGGGGGALFTLVEFVRRHGRPTGRRRNKEKEEGEEKKRRNKTEGMENVTAMAQFQFCKISIAPKDIMNSNGIFLNWQSCNGMDKIKRQSIIRH

SEQ ID NO: 118917 - protein, 71 aa, Oryza sativa
  Clone ID: PAT_MRT4530_22183C.1.pep
EREATTRSQQSARLIHRGRDVAAPGDGECNGQKNHGLIDPDAMLSETSDIRQADKGGSEKRTSESTTIKQQ

SEQ ID NO: 118918 - protein, 181 aa, Oryza sativa
  unsure (1)..(181): unsure at all Xaa locations
  Clone ID: PAT_MRT4530_22184C.1.pep
SSSIRRRSACRGSAERRSRSGWRRDGWESEAVSDPSGVTATAPRPPPPNRGGVFADLRATAYSSQPRPSRPPPPPPPPPPPPPPRXSPSATAAASRLSPLARFLLDAFRRHQRWGPPVVADLSKLRRVAPKLVAEVLSTRPPPPPPLAFPFFLWAARQKVPGVPRARERERRKGDKRGKRG

SEQ ID NO: 118919 - protein, 203 aa, Oryza sativa
  Clone ID: PAT_MRT4530_22185C.1.pep
MASSGGAAISAGPTPPSAAAASSVDWHLRPPNPKNPVVFFDVTIGSIPAGRIKMELFADIVPKTAENFRQFCTGEHRKSGLPQGYKGCQFHRVIKDFMIQGGDYMKGDGTGCTSIYGTKFDDENFIAKHTGPGLLSMANSGVNSNGSQFFITCAKCEWLDNKHVVFGRVLGDGMLAVRKIENVATGPNNRPKLACVISECGEM

SEQ ID NO: 118920 - protein, 44 aa, Oryza sativa
  Clone ID: PAT_MRT4530_22186C.1.pep
GRVGKHKKQSNCEIISKGKDGIKCDLEAASHAPPLLEKTRCVER

SEQ ID NO: 118921 - protein, 226 aa, Oryza sativa
  Clone ID: PAT_MRT4530_22187C.1.pep
MGVKPSPGVLDGLYGVQLGRRPSPGDGGGGEEEEEAVRTTVVEYSAISDSEAKFGDGTTLQRLPIRTNLNTALYANSLVGVGIASSLYHSSKGEIRKLLRWADYTMIATTTLCLSRALRNENPRLLMAASALLLPFQPLMVSVVHTGMMEANFSKDLAFSMCQVSFAKRASIEPELRMAHNLHKMSSLLGGALFIADDCFPETPYIHAAWHLAAALGIGTCNKLLE

SEQ ID NO: 118922 - protein, 82 aa, Oryza sativa
  unsure (1)..(82): unsure at all Xaa locations
  Clone ID: PAT_MRT4530_22188C.1.pep
RVATGLNVRXLCENYGGGQNKDLYVKSGQRTDICMXKKQQTFETVPGGTLPYGCCGSVSSHRMLTLTDETEGDACSIRTLLL

SEQ ID NO: 118923 - protein, 375 aa, Oryza sativa
  Clone ID: PAT_MRT4530_22189C.1.pep
MALDVLAAGAPATSAILAEVDAAGARSAAAGGGGGGGGQRFAVIGHRGKGMNALASPDRRMQEVKENSLRSFNEAARFPVDYVEFDVQVTKDGCPVIFHDNFIFTKEDGKILDKRVTDLQLEDFLLYGPQNEQGKGGKPLLRKLKDGRIVNWNVQSDDPLCTLQEAFEKVNPRLGFNIELKFDDNLEYQEEELTCILQAILKVVFEYAKDRPIIFSSFQPDAAQVMRKLQSTYPVYFLTNGGTEIYADVRRNSLEEAIKLCLASGMQGIVSEARGIFRHPAAVPKIKEANLSLLTYGTLNNVPEAVYMQHLMGVNGVIVDLVQEITEAVSELITVPEPDLNADNLSNGAAKDAATPHFSQCEISFLLRLIPELVQ

SEQ ID NO: 118924 - protein, 1232 aa, Oryza sativa
  Clone ID: PAT_MRT4530_2218C.1.pep
MEFVSDLLLLRAGFPPAFCVGLGRIDIVQAMMVDYHRQMKVSWWSQGSNLEFRRHLIARCFMAANASGGDKGIIGEMIAHPKLTDGGMIKLAIQEKGVMDTVPDANLKAMSGSQKKDDKVVMTEDMGTSSSQGPAAFQKGKIIKKKKKIIEVTLKKKKLRADMSYKSLRENMFIITFSSEGDYKFVLQGGPWIHHGDALLWLNLMRGELYGSRLGKVCEVDVGDDGRNMHDFFHIRVDLPVKRPLKEKIAIMILVQGKEEIRKFDLRYELVPHFCFICGYLGHSDKDYGRRVANEDQPFRFSAELRCSPMKPFERKVSKVKAFSSSGVARNLVFRGAGSASSSTSRQKQGEQWNEAVPPRVDARDNFEAEEMEGDGKIDEQLAQQAQHMQMEGEENRIVQGSAKEATPNSEMILAIANLHQQASFGEVSSDEFSAGNRKRVQEQTGGVKPGIVKQALLEYQQAVADDTTGQMDSRKLTRALKRSRRADGEQEVDNLEATSQGAAGDFNETLWQFEHFSEKRRSESQMHAFRDILSTCELFDLGFSGVPYTYDNRREGRNNVKVRLDRVLADNSWRDIFSNSQVVHMTSPCSDHCPILVRFTRDTSHANRKKCLHYEICWEREPASTEVIGDSWLEVGEKQHLGDINCALRKVMSALQTWSRTKFINVGRCLEKARKKLAELVERDADRREIRIASDHMNELLYREEMLWLQRSRISWLKEGDRNTRFFHNRARWRAKKNKISKLRGPDGTVYSATKDLENLATDYFNDMFTADPTVDHSRVTRLFQQKVTAEMNDSLCRNFSDEEIADALFQIGPLKAHGPDGFPARFYQRNWGLIKSDVVRVVKEFFHTGIMPDGINETAIVLIPKVNQPMELKEFRPINLCNVIYKIVSKCLVNRLRPILDDLISQNQSAFVPGRMITDNALLAFECFHSIQRNKSPGKAACAYKLDLSKAYDRGDPLSPFLFLFVADGLSLLLDEKVLQGAITPVQVCRRAPGISHLLFADDTLLFFKADNGQANVIREVLDDYAVGTGQFINLAKCSMLIDDITPASVHAEIRSTLQIVGNGFEDKYLGFPTPEGRMNKGKFQSLQEKIWKRIIMWGENYLSSGGKEIMLKAVIQAIPVYVMSIFKLPDSTCEDLNKLARNFWWGAEQGKRKTHWRAWKYLTKAKQYGGLGFKDFKLFNQALLARQAWRLIVNPDSLCARVLKAKYFPNGTLVDTCFSGNASPGWRAI

SEQ ID NO: 118925 - protein, 45 aa, Oryza sativa
  Clone ID: PAT_MRT4530_22190C.1.pep
TQNLTLTPRSLRLSSTEAYQPIIRLGETGGRFSPLLPLRARAPGR

SEQ ID NO: 118926 - protein, 75 aa, Oryza sativa
  unsure (1)..(75): unsure at all Xaa locations
  Clone ID: PAT_MRT4530_22191C.1.pep
SSRSSSSSSAAADGSTIIXPTSRXLAAKTPFLGHPXPSNAXVXDIAAAXTGRITMSKEXWYGPXRVKYXGXXSAQ

SEQ ID NO: 118927 - protein, 274 aa, Oryza sativa
  Clone ID: PAT_MRT4530_22192C.1.pep
MASSRVMAAAAASSSSSPPPPPPAAAAAGGAADLARFRSTSSGIGSMNMDDILRNIYGEAAPPPGAAGSAPAPPPAGEAAGAPVGEVDAPRTAEEVWKEISSSGGLSAPAPAPAAGAAGRGGGPEMTLEDFLAREDDPRATAVEGNMVVGFPNVTEGVGTAGGGRGGGGGGRGRKRTLMDPADRAAMQRQKRMIKNRESAARSRERKQAYIAELEAQVAELEEEHAQLLREQEEKNQKRLKEKWHVFMQIKEQAVAVVIRKKTQDLRRTNSMEW

SEQ ID NO: 118928 - protein, 125 aa, Oryza sativa
  Clone ID: PAT_MRT4530_22193C.1.pep
KLQSLICLSPSTPSFLLRPPASRPPPPLQPSSPWPAAASSPAAVAPAGRRLPFECRRRQEREGSTATRESKGGRRGAAPRASRRRLTRPPPLPSSSQAPPPPPMPMSPSPSRAPPPPMPMSPSPS

SEQ ID NO: 118929 - protein, 99 aa, Oryza sativa
  Clone ID: PAT_MRT4530_22194C.1.pep
RILSLYHPRFSHPSLFNTLPPNFILVHHKKNIELANTGELTLSHRGGSAGSRRGTPLRGDRWVSMYHPCSCFFFFFFFFFFFFFFFFFFFFFFFFSHAS

SEQ ID NO: 118930 - protein, 196 aa, Oryza sativa
  Clone ID: PAT_MRT4530_22195C.1.pep
KSLLPARRRLRLDPPNKLYFPYQPGQQVRSAIRIKNTSKSHVAFKFQTTAPKSCFMRPPGAILAPGETIIATVFKFVEHPENNENVLQKCKVKFKILSLKVKGPMDYAPEMFDEQRDQAVVEKILRVVFLNVENPGPQLEKLNNQLAEAEAALEARKKPPEENGPKIVGEGLVIDEWKERRERYLAQQQVEVVDSV

SEQ ID NO: 118931 - protein, 49 aa, Oryza sativa
  Clone ID: PAT_MRT4530_22196C.1.pep
APCCNIITCHESFVIHHCVCRPDMCNTSMLSCVPEIEYLNPAFSPDSFR

SEQ ID NO: 118932 - protein, 299 aa, Oryza sativa
  Clone ID: PAT_MRT4530_22197C.1.pep
MRHMAISGEDRYAAAGGGGDSGGGKLWNLCRMPFWQPGGAPATASAPPPPSSSSSSAGIHHHSAGRYGHEGGGGGAVAGDGAPAGSISSVAKSLLPARRRLRLDPPNKLYFPYQPGQQVRSAIRIKNTSKSHVAFKFQTTAPKSCFMRPPGAILAPGETIIATGNTSDHLLYMNNIFKFVEHPENNENVLQKCKVKFKILSLKVKGPMDYAPEMFDEQRDQAVVEKILRVVFLNVENPGPQLEKLNNQLAEAEAALEARKKPPEENGPKIVGEGLVIDEWKERRERYLAQQQVEVVDSV

SEQ ID NO: 118933 - protein, 89 aa, Oryza sativa
  Clone ID: PAT_MRT4530_22198C.1.pep
DGNMSEHHTVVQKVLGNMCIFSCLSREHSWHFVVRDREAKSFSERKKKASPFNKELLHLLKNPMVSASVRDALKPYAHAGVGLGIFENL

SEQ ID NO: 118934 - protein, 1979 aa, Oryza sativa
  Clone ID: PAT_MRT4530_22199C.1.pep
MDRQWMYADRRSKEFIDGVHYFLRVAEANRQRGFICCPCNKCKNQKEYSASRTIHFQLFESGFMPSYNCWTSHGEQGVEMEEDEVEDDNIPDFAQYVGFEGNQTGEEEIAADGNDVADDLGQMLQDAREDCESEKEAHKLDKMLEDHRTSLYPGCEQGHKKLDTTLELLQWKAKNEVSDKAFGDLLKLVKNILPGGNKLPETTYEAKKIVCPLGLEVHKIHACPNDCILYRGEEYENLEACPVCKALRYKIRRDDPGEVDGQLTKKRIPAKVMWYFPIIPRLRRLFRNKGNARMLRWHAEERQQDGMLRHPADGSQWRNIDRKFKEFGKDARNIRFGPKQPGNDIDVYLRPLVEDLKQLWKKEGVPMWDEDKQEFNLRALLFVTINDWPALSNLSGQSNKGYKACTHCMDETESTYLKHCRKVVYMGHRRFLAANHPVRKKGKHFEHKADHRTKPKHRSGKTVFAMVKDLKVVFGKGPGSQHIESEDGHAAMWKKNSIFWELPYWEFLDVRHAIDVMHLTKNLCVNLLGFLGVYGKSKDTLEARNDLKHMEQRGDLHPEPKEKGSHYLSPASYTLSKAEKESMFECLESIKVPSGYSTNIKRIISTKEKKFTNLKSHDCHVLMTQLLPVVIRGILPDNVRATITKLCAFMNAISQKVFDPDRLEALQNEVVQCLVSFELIFPPSFFNIMTHLLCHLLKEIRILGPMYLHNMFPFERYMGVLKKYVRNRARPEASIAKGYGTEEVIEFCVEFIEDLRPIGVPESRHEGRLRGKGTLGRKAIMTVDNNLFRKAHFTVLQHSSLVAPYIKEHLALVRARNIGKSDAWITRHHIDTFPAWLRQHLMGNESINQQLAFLARGPSGSIATFQGYEINGYTFYTRAQDMKSTNQNSAVRVDAMGHDGTTATYYGAIEDIWELDYGPLKVPLFRCQWVRLTGGGVMIDDSGMTTVDLNKVGYSDEPFVLANDVTQVFFVKDMSSKGKKGRGPDELKRQVVLPGKRKIVGVEDKTDEDYDQLDGQPPFTVTIDPSILLSNEDTPYSRSDHKEGTIYLNEEGNVERDAEGNQQGHVERDVEGNQEEEASGSQPSVGQKRARGQRGAAKKLEGRHIITEVEEDGRPSAPAEAAKNYVRHSGWVVRDNVPVSTVYWRRTRARGDHESFVPDSEKEMLWTTMLETFTLPAGTEDKVKRWTLKKMAEQFQSFKGDLYQKYILKGQTPNFDTFPKLRDHWDEFVAYKTGEQGKAMMERNKENAAKKKYHHHLGSGGYSVAMPKWEQMEASLIERGIEPATANWPERSKFWYYAHGGTLNPADGSLVFGYQIQEAARRLTDAVEASSQGTFRPDRDRDELTLALQTPEHPGRTRGKGVIPWKIGFKEDIHTYRSRMRSKRDTEAKIADLEFRVSSYELNMQEEVARKVDERMAAHRSHDPQPTIPPAMVSPSGNRSSCASTGQVGSQSMDAMQTQDESTCPVDDITQRTPCELHIPLKNLSIKVASGMAIPTDPSGTYHCRPIPAGYSKVEVELVEGAYEDLELDYPGGDGETHLRDTCHAIILWRATKKAKVDAAKNKDPGYDCTQEELDAYVASEVKRQFKPRSPEKKIPIDPSVRNFFRGMSASVKEAIKLSDYERTLKKASSGKSKPVPQLGEQPNQEIEPLVTGKEMTIEQFITDTGLTTDQLLGVAPIEKAEVKYMYELGKPLVKPELLQSLPTQMYKFHQLYMEMSATGREMIGARIRDTDFLQGDDILWINFRGIYELYQLDALDVSIMSCWILMQIQRARRRRVFVTGFIDPRKVNVAMLDQYPQETEDNLVHLLKAQHYKTFILLPYNTEFHWVLLLIDLEACTVNVYDSMDKKESTFDKVFELIDRAWYRFRHLVRGKWRERLRRKFKFPCAKQKQGTNLCGYYVCEYCYCLADQIITTRELDFIRMRDNLTTHKEFIAAVQKQLMGFINEEILDPKGEFYYDGNTIHRSLASELAASTTTSKP

SEQ ID NO: 118935 - protein, 86 aa, Oryza sativa
  Clone ID: PAT_MRT4530_2219C.1.pep
KSSLNHLKLAKHPAYLSSTHLRLRGAATRTPRSSPTSRGRWSASRPARLGTPSGTSVATTRQPSDDRSPSAGRRVLARLRSASPAA

SEQ ID NO: 118936 - protein, 1649 aa, Oryza sativa
  Clone ID: PAT_MRT4530_221C.1.pep
MEKQNLDFGKILGDIQESLASLNTKQAETQAAVVKLDAGVSGWRPQVESAIQGLREEVSELLPSTGEERKAPLLPTPSEAKAARLPTPPTSTQLAAAEGGSKWAAGHHVQMNFRGRTPVVSSTQGPAPGKGTIDFTPNFTSKFDGGGWESGEFDSEHGDRQYNHRVPKLDFPKFDGSDSQEWRMKCEHYFDVNNTFPGLWVRIATIYFLGRAASWLRSSRAHLRFPMWEDFCAAVSAKFDRDQHENLIRQMDSIKQNGTVWEFYERFDELMNQLLVYDPTLSSKYLTHRFTKGLRREIRNAVLLQRPKDLESALAVALLQEEVMENSPPTTVREFKKSDGSSSLKINGKGAWPLPLPPGKGGGVPVSNRADERRSSDTVRSPTSLTEKVSALKSYRRAQGLCYVCAEKWSPNHKCASSVQLNVVQELLCLFLEEDSHVESENAGQNGSLTRELMAISLQAVQGTEPDGTMRMLGQLQGKELLVLVDSGSSVSFISSQIAEGLTGIQPLSRRLSVRVANGETLCCGAIIPNCEWQVQGHKFQTTLRVLPITSYDMILGMDWLMKHSPMSVDWSLKTITLSLQGTTVTLQGVHSELAHCKILSANEMQQFQQRKAVAHMVQLCSITDDVEPETIPVPVQELMQEFTTVFAEPKGLPPTRPFDHSIPLLPGAQPINDEIEAQVTEMLQNGIIQHNTSPFASPVLLVKKKDGSWHFCVDYRHLNAITVKNKCPLPIIDELLDELSGAQWFTKLDLRAVYHQIRMKVEDEHKTAFRTHHGHFEFRVLPFGLTSAPATFQGIMNSILSTLLRRCVLVFVDDILIYSRTLEDHIHHLRAVFQILNKHGLKVKQSKCSFAQQKLSYLGHSIGPNGVATETDKIAAVRDWPTPQSVKELRSFLGLAGYYRKFVKNFGIISKPLTNLLRKGQLFAWTSMTNEAFLTLKHTLVSAPVLALPDFSIPFVVETDASDKGIGAVLMQRNHPVAFLSKALGPRHLGLSTYEKESLAIMLAIDHWRPYLQHAEFSIRTDHRSLAFLDEQRLTTPWQHKALTKLLGLQYKILYKKGSENSAADALSRYPDKETVVLSALSVCIPEWTQEVIEGYAQDSDSLSKVQTLCINNSAIPDFTLKNGLLYFKDKMWIGNNPIVQRKILANLHTAAIGGHSGITMTYQRIKQLFAWIGLRSDVVKFIQHCTICQQAKGEHVKYPGMLQPLPVPEQSWQIVSLDFIEGLPRSSTFNCILVVVDKFSKYAHFVALAHPFTTLEVAEAYMQHIHRLHGLPEAIISDQDRIFTSNLWTTLFRLAGTQLRMSSSYHPQSDRQTERMNQCLKTFLRCFVHASPSQWSRWLALAEYWYNTSFHSSLGTTPFEVLYGHKPRYFGLTASAACSAPELSDWLHERDKMQTLIREHLLRAQMRMKHQADTKHSERSFAVGDWVYMKLQPFVQQSVVTCTNRKLSFRFYGPFQVLAKVGSVAYRLDLPPSCLIHPVIHVSQLNKAVAPSDQVHSKLPILDDADAVTPVPQQVIDRRSVHKGAKMVEQVLIRWSGPDSAVVTWENLQELQQRFPQTKAWEQLRFKEGGMSWHALLQDHLRKAKSKAGDKIQSNPCCGDRHVKSGPTACTNRVCGPSRIGLGHSEGERSIAHRYKRPAGKRTNRTL

SEQ ID NO: 118937 - protein, 142 aa, Oryza sativa
  unsure (1)..(142): unsure at all Xaa locations
  Clone ID: PAT_MRT4530_22200C.1.pep
TGRRTTGQRRWRWLDERRRRQQXLARGGDGSSSTXGGGDGGGGSXRGGGNNDSLAHKFLSNFFVDISIKIIILVKVYQNCKVHVLNVXKFSIMNKNRGSLQHENFRTTFLTTVARTHTSVSRCTRASRNEPFRETVREVLIR

SEQ ID NO: 118938 - protein, 2137 aa, Oryza sativa
  Clone ID: PAT_MRT4530_22201C.1.pep
MDRQWMYADRRSKEFIDGVHYFLRVAEANRQRGFICCPCNKCKNQKEYSASRTIHFHLFESGFMPSYNCWTSHGEQGVEMEEDEVEDDNIPDFAQYVGFEGNQTDEEEIAADGNDVADDLGQMLQDAREDCESEKEAHKLDKMLEDHRTSLYPGCEQGHKKLDTTLELLQWKAKNGVSDKAFGDLLKLVKNILPGGNKLPETTYEAKKIVCPLGLEVHKIHACPNDCILYRGEEYENLEACPVCKALRYKIRRDDPGEVDGQLTKKRIPAKVMWYFPIIPRLRRLFRNKGNARMLRWHAEERQQDGMLRHPADGSQWRNIDRKFKEFGKDARNIRFGLSTDGMNPFGEMSSGHSTWPVTMCIYNLPPWLCMKRMYIMMPIIIQGPKQPGNDIDVYLRPLVEDLKQLWKKKGVPVWDEDKQEEFNLRALLFVTINDWPALSNLSGQSNKGYKACTHCMDETESTYLKHCRKVVYMGHRRFLAANHPVRKKGKHFEHKVDHRTKPKHRSGKTVFAMVKDLKVVFGKGPGSQHIESEDGHAAMWKKNSIFWELPYWEFLDVRHAIDVMHLTKNLCVNLLDFLGVYGKSKDTLEARNDLKHMEQRGDLHPEPKEKGSHYLSPASYTHSKAEKESMFECLESIKVPSGYSTNIKRIISTKEKKFTNLKSHDCHVLMTQLLPVVIRGILPDNVRATITKLCAFMNAISQKVIDPDRLEALQNEVVQCLVSFELIFPPSFFNIMTHLLCHLVKEIRILGPMYLHNMFPFERYMGVLKKYVRNRARPEASIAKGYGTEEVIEFCVEFIEDLRPIGVPESRHEGRLRGKGTLRRKAIMTVDNNLFCKAHFTVLQHSSLVAPYIEEHLALVRARNIGKSDAWITRHHIDTFPAWLRQHLMGNESINQQLAFLARGPSRSIATFQGYEINGYTFYTRVQDMKSTNQNSAVRVDAMGHDGTTATYYGAIEDIWELDYGPLKVPLFRCQWVRLTGGGVMIDDSGMTTVDLNKVGYSDEPFVLANDVTQVFFVKDMSSKGKKGRGPDEPKRQVVLPGKRKIVGVEDKTDEDYDQLDGQPPFTVTIDPSILLSNEDTPYSRSDHKEGTIMADRDEEQILYDTIAEGSNQYWNEEEGNEDPNQYLNEEGNGHVERDVEGNQEEEASGSQPSVGQKRARGQRGAAKKLEGRHIITEVEEDGRPSAPAEAAKNYVRHSGWVVRDNVPVSTVYWRRIRARGDHESFVPDSEKEMLWTTMLETFTLPAGTEDKVKRWTLKKMAEQFQSFKGDLYQKYILKGQTPNFDTFPKLRDHWDEFVAYKTGEQGKAMMERNKENAAKKKYHHHLGSGGYSVAMPKWEQMEASLIERGIEPATANWPERSKFWYYAHGGTLNPADGSLVFGYQIQEAARRLTDAVEASSQGTFRPDRDRDELTLALQTPEHPGRTRGKGVIPWKIGFKEDIHTYRSRMRSKRDTEAKIADLEFRVSSYELNMQEEVARKVDERMAAHRSHDPQPTIPPAMVSPSGNRSSCASTGQVGSQSMDAMQTQDESTCPVDDITQRTPCELHIPLKNLSIKVASGMAIPTDPSGTYHCRPIPAGYSKVEVELVEGAYEDLELDYPGGDGEMHLRDTCHAIILWRRRYIILPGRQAASRAPSPPAPPSPPQDPAPSPPHAPPAPSPPQAPASTPQDPAPTPPRAPTPTPPQAPLPAPSKSRAPPAPPLAHIRATKKAKVDAAKNKDPGYDCTQEELDAYVASEVKRQFKPRSPEKKIPIDPSVRNFFRGMSASVKEAIKLSDYERTLKKASSGKSKPVPQLGEQPNQEIEPLVTGKEMTIEQFITDTGLTTDQLLGVAPIEKAEVKYMYELGKPLVKPELLQSLPTQMYKFHQLYMEMSATGREMIGARIRDTDFLQGDDILWINFRGIYELYQLDALDVSIMSCWILMEIQRARRRRVFDTGFIDPRKVNVAMLDQYPQETEDNLIHLLKAQHYKTFILLPYNTEFHWVFLLIDLEACTVNVYDSMDKKESTFDKVFELIDRAWYRFRHLVRGKWRERLRRKFKFPCAKQKQGTNLCGYYMCEYCHCLADQIITTRELDFIRMRDNLTTHKEFIAAVQEQLMGFINEEILDPKGEFYYDGNTIHRSLASELAASTTTSKS

SEQ ID NO: 118939 - protein, 61 aa, Oryza sativa
  Clone ID: PAT_MRT4530_22202C.1.pep
ICTPEVIVIYLTDQYNYSRRIATPFSEVLLINRRNLAPDVGLHRFSSISGEGVSPMFRRPW

SEQ ID NO: 118940 - protein, 1108 aa, Oryza sativa
  unsure (1)..(1108): unsure at all Xaa locations
  Clone ID: PAT_MRT4530_22203C.1.pep
MDRKWMYADRRSKEFIDGVHYFLKVAEANRQKGLICCLCNKCKNQKKYSASRTIHFHLFESGFMPSYNCWTSHGEQGVEMEEDEVEDDNISDFAQYAGFEINQTGEEERDADGNDVADDLGQMLQDVKEDCESEKGAYKLDKMLEDHRTSLYPGCEQGHKKLDITLEFLQWRTKNGVSEKAFGDLLKLVKNILPERNKLPETTYEAKKIVCPLGLEVQKIHACPNDCILYRGEEYENLEACPVCKALRYKIRRDDPGEVDGQLTKKRIPAKVMWYFPIILRLRRLFRNKGNARMMRWHAEERXQDGMLRHPADGSQWRNIDRKFKDFGKDARNIRFGLSTDGMNPFGEMSSGHSTWPVTMCIYNLPPWLCMKRKYIMMPIIIQGPKQPGNDIDVYLRPLVKDLKLLWKKEGVPVWDEDKQEEFNLRALLFVTINDWPALSNLSGQSNKRYKACTRCMDETESTYLKHYRKIVYMGHRRFLAANHPVRKKGKHFEHKADHRTKPKHRSGKTVFAMVKDLKVVFGKGPGNQPIESEDGHAAMCKKNSIFWELPYWEFLDVRHVIDVMHLTKYLCVNLLGFLGVYGKSKDTLEARKDLKHMEQRGDLHPEPKEKGSHYLSPASYTLSKAEKESMFECLESIKVPSGYSMNIKRIISTKEKKFTNLKSHDCHVLMTQLLPVVXRGILPDNVRATITKLCAFMNAISQKVIDPNRLEALQNDVVQCLVSFELIFPPSFFNIMTHLLCHLVKEIGILSPVYLHNMFPFERYMGVLKKYVRNRARPEASIAKGYGTEEVIEFCVKFIEDLCPIGVPESRHEGRLRGKGTLGRKAIMTVDNNLFRKAHFTVLQQSALVAPYIEEHLALVRARNIGKSDAWITRYHIDTFSAWLRQHLMSNETINQQLAFLARGPSGSIATFQGYEINGYTFYTRAQDMKSTNQNSDVRIDAIGHDGTTGTYYGAIEDIWELDYGPLKVPLFRCQWVRLTGGGVTIDDSGMTTVDLNKVGYLDEPFILANDVTQVFYVKDMSSKGKKGKGPDEPKRQVVLPAKPRLLHQHLDVFPSRSISASPSPPLPRATPRRRRRRLSPSLGGPRRLRHRRRRHISWVFFVCTHG

SEQ ID NO: 118941 - protein, 441 aa, Oryza sativa
  unsure (1)..(441): unsure at all Xaa locations
  Clone ID: PAT_MRT4530_22204C.1.pep
MWKKNSIFWEIPYWIFLDVCHAIDVMHLTKNICVNLLGFLGVYRKSXKIHWKHHMEQRDDLHPEPKEKGSHYLSPASYTLSKAEKESMFECLESIKVPSGYSTNIKRIITTKEKKFTNLKSHDCHVLMTQLLLVVIRGILPDNVRATITKLCAFMNTISQKVIDPDRLEALQNDVLQCLVSFELIFPPSFFNIMTHLLCHLVKEIGILGPVYLHNMFPFKRYMGVLKKYVRNRARPEASIAKEYGTEEVIEFCVEFIEDLRPIGVPESRHEGRLRGKGILGRKAIMTGYEINGYTFYLRAQDMKSTNQNSVVRIDAMGHDGTTGTYYGAIEDIWELDYGPLKVPLFRCQWVRLIGGGITIDDSAMTTVDLNKVGYSDEPFVLANDVTQDFYVKDMSSKGKKGRGPDEPKRHLVLPGKRKIVGVEDKTDEDYDQLDGQPLSR

SEQ ID NO: 118942 - protein, 1931 aa, Oryza sativa
  Clone ID: PAT_MRT4530_22205C.1.pep
MDRQCMYADRRSKEFIDGVYYFLTVAEANRQRGFICCPCNKCKNQGEYSASRTIHFHLFESGFMPSYNCWTSHGEQGVEMEEDEVEDDNIPDFAQYVGFEGNQTGEEEIAADGNDVADDLGQMLQDAREDCESEKEAHKLDKMLEDHRTSLYPGCEQGHKKLDTTLELLQWKAKNGVSDKAFGDLLKLVKNILPGGNKLPETTYEAKKIVCPLGLEVHKIHACPNDCILYRGEEYENLEACPVCKALRYKIRRDDPGEVDGQLTKKRIPAKVMWYFPIIPRLRRLFRNKGNARMLRWHAEERQQDGMLRHPADGSQWRNIDRKFKEFGKDARNIRFGPKQPGNDIDVYLRPLVEDLKQLWKKEGVPVWDEDKQEDFNLRALLLVTINDGPALSNLSGQSNKGYKACTHCMDETESTYLKHCRKVVYMGHRRFLAANHPVRKKGKHLEHKADHRTKPKHRSGKTVFAMVKDLKSKDTLEARNDLKHMEQRGDLHPEPKEKGSHYLSPASYTLSKAEKESMFECLESIKVPSGYSTNIKRIISTKEKKFTNLKSHDCHVLMTQLLPVVIRGILPDNVRATITKLCAFMNAISQKVIDPDRLEALQNEVVQCLIRILGPMYLHNMFPFERYMGVLKKYVRNRARPEASIAKGYGTEEVIEFCVEFIEDLRPIGVPESRHEGRLRGKGTLGRKAITTVDNNLFRKAHFTVLQHSSLVAPYIEEHLALVRARNIGKSDAWITRHHIDTFPAWLRQHLMGNESINQQLAFLARGPSGSITTFQGYEINGYTFYTRAQDMKSTNQNSAVRVDAMGHDGTTATYYGAIEDIWELDYGPLKVPLFRCQWVRLTDGGVMIDDSGMTTVDLNKVGYSDEPFVLANDVTQMADRDEEQILYDTIAEGSSQYWNEEEGNEDPNQYLNEEGNVERDAEGNQQGHVERDVEGNQEEEASGSQPSVGQKRARGQRGAAKKLEGRHIITEVQEDGRPSAPAEAAKNYVRHSGWVVRDNVPVSTVYWRRTRLRGDHESFVPDSEKEMLWTTMLETFTLPAGTEDKVKRWTLKKMAEQFQSFKGDLYQKYILKGQTPNFDTFPKLRDHWDEFVAYKTGEQGQAMMERNKENAAKKKYHHHLGSGGYSVAMPKWEEMEASLIERGIEPATANWPERSKFWYYAHGGTLNPADGSLVFGDQIREAARRLTDAVEASSQGTFRPDRDRDELTLALQTPEHPGRTRGKGVIPWKIGFKEDIHTYRSRMRSKRDTEAKIADLELRVSSYELNMQEEVARKVDERMFAHRSHDPQPTIPPAMVSPSGNRSSCASTRQVGSQSMDAMQTQDESTCPVDDITQRTPCELHIPFKNLSIKVASGMAIPTDPSGTYHCRPIPAGYSKVEVELVEGAYEDLELDYPGGDGETHLRDTSHAIILWRRRYIILPGRQAASRAPSPPAPPSPPQDPAPSPPHAPPAPSPPQAPTSTPPQDPAPTPPRAPTPTPPQAPLPAPSKSRAPPAPPPAHTRATKKAKVDAAKNKDPGYDCTQEELDAYVASEVKRQFKPRSPEKKIPIDPSVRNFFRGMSASVKEAIKLSDYERTLKKASSGKSKPVPQLGEQPNQEIEPLVTGKEMTIEQFITDTGLTTDQLLGVAPIEKAEVKYMYELGKPLVKPELLQSLPTQMYKFHQLYMEMSAAGREMIGARIRDTDFLQGDDILWINFKGIYELYQLDALDVSIMSCWILMEIQRARRRRVFDTGFIDPRRVNVAMLDQYPQETEDNLVHLLKAQHYKTFILLPYNTEFHWVLLLFDLEACTVNVYDSMDKKESTFDKVFELIDRAWYRFRHLVRGKWRERLRRKFKFPCAKQKQGNNLCGYYVCEYCHCLANQIITTRELDFIRMRDNLTTHKEFITAVQEQLMGFINEEILNPKGEFYYDGNTIHRSLASELAASTTTSK

SEQ ID NO: 118943 - protein, 131 aa, Oryza sativa
  unsure (1)..(131): unsure at all Xaa locations
  Clone ID: PAT_MRT4530_22206C.1.pep
CITDIPPFGGSPFVGCTLPKYINYAKHTHLQDIHGTGTNTDEATRLLEGLPEFTQVLCPGGYTQRAXAASTETVRTYSVNQPFQQHLTRSATSGYLKPLRATPASSHTRVLRTAFHILNTRASIAXVHXTR

SEQ ID NO: 118944 - protein, 2141 aa, Oryza sativa
  unsure (1)..(2141): unsure at all Xaa locations
  Clone ID: PAT_MRT4530_22207C.1.pep
MDRQWMYADRRSKEFIDGVHYFLRVAEANRQRGFICCPCNKCKNQKEYSASRTIHFHLFESGFMPSYNCWTSHGEQGVEMEEDEVEDDNIPDFAQYVGFEGNQTGEEEIAADGNDVADDLGQMLQDAREDCESEKEAHKLDKMLEDHRTSLYLGCEQGHKKLDTTLELLQWKAKNGVSDKAFGDLLKLVKNILPGGNKLPKTTYEAKKIVCPLGLEVHKIHACPNDCILYRGEEYENLEACPVCKALRYKIRRDDPGEVDGQLTKKRIPAKVMWYFPIIPRLRRLFRNKGNARMLRWHAEERQQDGMLRHPADGSQWRNIDRKFKEFGKDTRNIRFGLSTDGMNPFGEMSSGHSTWPVTMCIYNLPPXLCMKRKYIMMPIIIQGPKQPGNDIDVYLRPLVEDLKQLWKKEGVPVWDEDKQEEFNLXALLFVTINDWPALSNLSGQSNKGYKACTHCMDETESTYLKHYRKVVYMGHRRFLAANHPVRKKGKHFEHKADHRTKPKHRSGKTVFAMVKDLKVVFGKGPGSQHIESEDGHAAMWKXNSIFWELPYWEFLDVRHAIDVMHLTKNLCVNLLGFLGVYGKSKDTLEARNDLKHMEQRGDLHPEPKEKGSHYLSPASYTLSKAEKESMFECLESIKVPSGYSTNIKRIISTKEKKFTNLKSHDCHVLMTQLLPVVIRGILPDNVRATITKLCAFMNAISQKVIDPDRLEALQNEVVQCLVSFELIFPPSFFNIMTHLLCHLVKEIRILGPMYLHNMFPFERYMGVLKKYVRNRARPEASIAKGYGTEEVIEFCVEFIEDLRPIGVPESCHEGRLRGKGTLGRKAIMTIDNNLFRKAHFTVLQHSSLVAPYIEEHLALVRARNIGKSDAWITRHHIDTFPAWLRQHLMGNESINQQLAFLARGPSGSIATFQGYEINGYTFYTRAQDMKSTNQNSAVHVDAMGHDGTTATYYGAIEDIWELDYGPLKVPLFRCQWVRLTGGGVMIDDSGMTTVDLNKVGYSDEPFVLVNDVTQVFFVKDMSSKGKKGRGPDEPKRQVVLPVRPRLLHQHLDVFGRSISLGLSPSPPLPRANPRAXAAVSRRRLELXVVLAAASASSAAAASLGXSRRRQISLHLDLSDLDLSPSRRPPRDAAPRRRRATPTPRQAAAGTPRRRLRRRARNAAAGTPRRRLRRRATPPPHANATPPPPSPRRRRLHRRARNAAAATPRRRRHGPATPRRRRRRHAAAPTAAPMPPHRRXRTRTRTIERTRARTNTSTYVAARTCTTFTLPAGTEDKVKRWTLKKMAEQFQSFKGDLYRKYILKGQTPNFDTFPKLRDHWDKFVAYKTGEQGQAMMERNKENAAKKKYHHHLGSGGYSVAMPKWEQMEASLIERGIEPATANWPERSKFWYYAHGGTLNPADGSLVFGDQIREAARRLTDAVEASSQGTFRPDRDRDELTLALQTPEHPGRTRGKGVIPWKIGFKENIHTYRSRMRSKRDTEAKIADLEFRVSSYELNMQEEVARKVDERMAAHRSHDPQPTIPPAMVSPSGNRSSCASTGQVGSQSMDAMQTQDESTCPVDDITQRTPCELHIPFKNLSIKVASGMAIPTDPSGTYHCRPIPAGXSKVEVELVEGAYEDLELDYPGGDGETHLRDTCHAIILWRRRYIILPGRQAASRAPSPPAPPSPPQDHAPSPPHAPPAPSPPQAPASTPPQDPAPTPPRAPTPTPPQAPLPAPSKSRAPPAPPPAHTRATKKAKVDAAKNKDPGYDCTQEELDAYVASEVKRQFKPRSPEKKIPIDPSVRNFFRGMSASVKEAIKLSDYERTLKKASSGKSKPVPQLGEQPNQEIEPLVTGKEMTIEQFITDTGLTTDQLLGVAPIEKAEVKYMYELGKPLVKPELLQSLPTQMYKFHQLYMEMSATGREMIGARIRDTDFLQGDDILWINFRGIYELYQLDALDVSIMSCWILMEIQRARRRRVFDTGFIDPRKVNVAMLDQYPQETEDNLVHLLKAQHYKTFILLPYNTEFHWVLLLFDLDACTVNVYDSMDKKESTFDKVFELIDRAWYRFRHLVRGKWRERLRRKFKFPFIRMRDNLTTHKEFIAAVQEQLMGFINEEILDPKGEFYYDGNTIHRSLASELAASTTTSPSRASPWTRWRRRR

SEQ ID NO: 118945 - protein, 2211 aa, Oryza sativa
  Clone ID: PAT_MRT4530_22208C.1.pep
MDRQWMYADRRSKEFIDGVHYFLRVAEANRQRGFICCPCNKCKNQKEYSASRTIHFHLFESGFMPSYNCWTSHGEQGVEMEEDEVEDDNIPDFAQYVGFEGNQTGEEEIAADGNDVADDLGQMLQDAREDCESEKEAHKLDKMLEDHRTSLYLGCEQGHKKLDTTLELLQWKAKNGVSDKAFGDLLKLVKNILPGGNKLPETTYEAKKIVCPLGLEVHKIHACPNDCILYRGEEYENLEACPVCKALRYKIRRDDPGEVDGQLTKKRIPAKVMWYFPIIPRLRHLFRNKGNARMLRWHAEERQQDGMLRHPADGSQWRNIDRKFKEFGKDARNIRFGPKQPGNDIDVYLRPLVEDLKQLWKKEGVPVWDEDKQEEFNLRALLFVTINDWPALSNLSGQSNKGYKACTHCMDETESTYLKHCRKVVYMGHRRFLAANHPVRKKGKHFEHKADHRTKPKHRSGKTVFAMVKDLKVVFGKGPGSQHIESEDGHAAMWKKNSIFWELPYWEFLDHMEQRGDLHPEPKEKGSHYLSPASYTLSKAEKESMFECLESIKVPSGYSTNIKRIISTKEKKFTNLKSHDCHVLMTQLLPVVIRGILPDNVRATITKICAFMNAISQKVIDPDRLETLQNEVVQCLVSFELIFPPSFFNIMMHLLCHLVKEIRILGPMYLHNMFHFERYMGVLKKYVRNRARPEASIAKGYGTEEVIKFCIEFIEDLRPIGVPESRHEGRLRGKGTLGRKAITTVDNNLFRKAHFTVLQHSSLVAPYIEEHLALVRARNIGKSDAWITRHHIDTFPAWLRQHLMGNESINQQLAFLARGPSGSIATFQGYEINGYTFYTRAQDMKSTNQNSAVRVDAMGHDGTTATYYGAIEDIWELDYGPLKVPLFRCQWVRLTGGGVMIDDSGMTTVDLNKVGYSDEPFVLANDVTQVFFVKDMSSKGKKGRGPDEPKRQVVLPGKRKIVGVEDKTDEDYDQLDGQPPFTVTIDPSILLSNEDTPYSRSDHKEGTIVRRKKDVLSESSVKHLMADRDEEQILYDTIAEGSSQYWNEEEGNEDPNQYLNEEGNVERDAEGNQQGHVERDVEGNQEEEASGSQPSVGQKRARGQRGAAKKLEGRHIITEVEEDGRPSAPAEAAKNYVRHSGWVVRDNVPVSTVYWRRTRARGDHESFVPDSEKEMLWTTMLETFTLPAGTEDKVKRWTLKKMAEQFQSFKGDLYQKYILKGQTPNFDTFPKLRDHWDEFVAYKTGEQGQAMMERNKENAAKKKYHHHLGSGGYSVAMPKWEQMEASLIERGIEPATANWPERSKFWYYAHGGTLNPADGSLVFGYQIQEAARRLTDAVEASCQGTFRPDRDRDELTLTLQTPEHPGRTRGKGVIPWKIGFKEDIHTYRSRMRSKRDTEAKIADLEFRVSSYELNMQEEVARKVDERMAAHRSHDPQPTIPPAMVSPSGNRSSCASTGQVGSQSMDAMQTQDESTCPVDDITQRTPCELHIPFKNLSIKVASGMAIPTDPSGTYHCRPIPAGYSKVEVELVEGAYEDLELDYPGGDGETHLRDTCHAIILWRRRYIILPGRQAASRAPSPPAPPSPPQDPAPSPPHAPPAPSPPQAPASTPPQDPAPTPPRAPTPTPPQAPLPAPSKSRAPPAPPLAHTRATKKAKVDAAKNKDPGYDCTQEELDAYVASEVKRQFKPRSPEKKIPIDPSVRNFFRGMSASVKEAIKLSDYERTLKKASSGKSKPVPQLGEQPNQEIEPLVTGKEMTIEQFITDTGLTTDQLLGVAPIEKAEVKYMYELGKPLVKPELLQSLPTQMYKFHQLYMEMSATGREMIGARIRDTDFLQGDDILWINFRGIYELYQLDALDVSIMSCWILMEIQRARRRRVFDTGFIDPRKVNVAMLDQYPQETEDNLVHLLKAQHYKTFILLPYNTEFHWVLLLIDLEACTVNVYDSMDKKESTFDKVFELIDRAWYRFRHLVRGKWRERLRRKFKFPCAKQKQGTNLCGYYVCEYCHCLADQIITTRELDFIRMRDNLTIHKEFIAAVQEQLMGFINEEILDPKGEFYYDGNTIHRDNRCRILPRSLGRHLVSIEGKVFEDGVAEEVGNGLHHGGRNENEARDLDEYIMATKHMTCLCERRGHVGVCHVRLAHMQCDRGLGKRILGRFVLVLEGGSHGDSPVLAHGTRLKKKKKKKKKKKKWLLSERWELTVVKPCGSIVDGCK

SEQ ID NO: 118946 - protein, 1968 aa, Oryza sativa
  Clone ID: PAT_MRT4530_22209C.1.pep
MEMIDRQWMYADRRSKEFIDGVHYFLRVAEANRQRGFICCPCNKCTNQKEYSASRTIHFHLFESGFMPSYNCWTSHGEQGVEMEEDEVEDDNIPDFAQYVGFEGNQTGEEEIAADGNDVVDDLGQMLQDAREDCESEKEAHKLDKMLEDHRTSLYPGCEQGHKKLDTTLELLQWKAKNGVSDKAFGDLLKLVKNILPGGNKLPETTYEAKKIVCPLGLEVHKIHACPNDCILYRGEEYENLEACPVCKALRYKIRRDDPGEVDGQLTKKRIPAKVMWYFPIIPRLRRLFRNKGNARMLRWHAEERQQDGMLRHPADGSQWRNIDRKFKEFGKDARNIRFGPKQPGNDIDVYLRPLVEDLKQLWKKEGVPVWDEDKQEDFNLRALLFVTINDWPALSNLSGQSNKGYKACTHCMDETESTYLKHCRKVVYMGHRRFLAANHPVRKKGKHFEHKADHRTKPKHRSGKTVFAMVKDLKVVFGKGPGSQHIESEDGHAAMWKKNSIFWELPYWEFLDVRHAIDVMHLTKNLCVNLLGFLGVYGKSKDTLEARNDLKHMEQRGDLHPEPKEKGSHYLSPASYTLSKAEKESMFECLESIKVPSGYSTNIKRIISTKEKKFTNLKSHDCHVLMTQLLPVVIRGILPDNVRATITKLCAFMNAISQKVIDPDRLEALQNEVVQYPYSRAYVPTQHVSFREYMGVLKKYVRNRARPEASIAKGYGTEEVIEFCVEFIEDLRPIGVPESRHEGRLRGKGTLGRKAITTVDNNLFRKAHFTVLQHSSLVAPYIEEHLALVRARNIGKSDAWITRHHIDTFPAWLRQHLMGNESINQQLAFLARGPSGSITTFQGYEINGYTFYTRAQDMKSTNQNSAVRVDAMGHDGTTATYYGAIEDIWELDYGPLKVPLFRCQWVRLTDGGVMIDDSGMTTVDLNKVGYSDEPFVLANDVTQMADRDEEQILYDTIAEGSSQYWNEEEGNEDPNQYLNEEGNVERDAEGNQQGHVERDVEGNQEEEASGSQPSVGQKRARGQRGAAKKLEGRHIITEVQEDGRPSAPAEAAKNYVRHSGWVVRDNVPVSTVYWRRTRLRGDHESFVPDSEKEMLWTTMLETFTLPAGTEDKVKRWTLKKMAEQFQSFKGDLYQKYILKGQTPNFDTFPKLRDHWDEFVAYKTGEQGQAMMERNKENAAKKKYHHHLGSGGYSVAMPKWEEMEASLIERGIEPATANWPERSKFWYYAHGGTLNPADGSLVFGDQIREAARRLTDAVEASSQGTFRPDRDRDELTLALQTPEHPGRTRGKGVIPWKIGFKEDIHTYRSRMRSKRDTEAKIADLEFRVSSYELNMQEEVARKVDERMSAHRSHDPQPTIPPAMVSPSGNRSSCASTRQVGSQSMDAMQTQDESTCPVDDITQRTPCELHIPFKNLSIKVASGMAIPTDPSGTYHCRPIPAGYSKVEVELVEGAYEDLELDYPGGDGETHLRDTSHAIILWRRRYIILPGRQAASRAPSPPAPPSPPQDPAPSPPHAPPAPSPPQAPTSTPPQDPAPTPPRAPTPTPPQAPLPAPSKSRAPPAPPAAHTRATKKAKVDAAKNKDPGYDCTQEELDAYVASEVKRQFKPRSPEKKIPIDPSVRNFFRVPQLGEQPNQEIEPLVTGKEMTIEQFITDTGLTTDQLLGVAPIEKAEVKYMYELGKPLVKPELLQSLPTQMYKFHQLYMEMSAAGREMIGARIRDTDFLQGDDILWINFKGIYELYQLDALDVSIMSCWILMEIQRARRRRVFDTGFIDPRRVNVAMLDQYPQETEDNLVHLLKAQHYKTFILLPYNTEFHWVLLLFDLEACTVNVYDSMDKKESTFDKVFELIDRAWYRFRHLVRGKWRERLRRKFKFPCAKQKQGNNLCGYYVCEYCHCLANQIITTRELDFIRMRDNLTTHKEFITAVQEQLMGFINEEILNPKGEFYYDGNTIHRSLASELAASTTTSK

SEQ ID NO: 118947 - protein, 46 aa, Oryza sativa
  Clone ID: PAT_MRT4530_2220C.1.pep
MSRASTVPHAGRSAGRPALLARLRLFLRSNLALAASLNMGTRGVQD

SEQ ID NO: 118948 - protein, 1974 aa, Oryza sativa
  Clone ID: PAT_MRT4530_22210C.1.pep
MDRQWMYADRRSKEFIDGVHYFLRVAEANRQRGFICCPCNKCKNQKEYSASRTIHFHLFESGFMPSYNCWTSHGEQDVEMEEDEVEDDNIPDFAQYVGFEGNQTGEEEIAADGNDVADDLGQMLQDAREDCESEKEAHKLDKMLEDHRTSLYPGCEQGHKKLDTTLELLQWKAKNGVSDKAFGDLLKLVKNILPGGNKLPETTYEAKKIVCPLGLEVHKIHACPNDCILYRGEEYENLEACPVCKALRYKIRRDDPGEVDGQLTKKRIPAKVMWYFPIIPRLRRLFRNKGNARMLRWHAEERQQDGMLRHPADGSQWRNIDRKFKEFGKDARNIWFGPKQPGNDIDVYLRPLVEDLKQLWKKEANHPVRKKGKHFEHKADHRTKPKHRSGKTVFAMVKDLKVVFGKGPGSQHIESEDGHAAMWKKNSIFWELPYWEFLDERHAIDVMHLTKNLCVNLLGILGVYGKSKDTLEARNDLKHMEQRGDLHPKPKEKGSHYLSPASYTLSKAEKESMFECLESINVPSGYSTNIKRIISTKEKKFTNLKSHDCHVLMTQLLPVVIRGILPDNVRATITKLCAFMNAISQKVIDPDRLEALQNEVVQCLVSFELIVPPSFFNIMTHLLCHLVKEIRILGPMYLHNMFPFERYMGVLKKYVRNRARPKASIAKGYGTEEVIEFCVEFIEDLRPIGVPESRHEGRLRGKGTLGRKAITTVDNNLFRKAHFTVLQHSSLVAPYIEEHLALVRARNIGKSDAWITRHHIDTFPAWLRQHLMGNESINQQLAFLARGPSGSIATFQGYEINGYTFYTRAQDMKSTNQNSAVRVDAMGHDGTTATYYGAIEDIWELDYGPLKVPLFRCQWVRLTGGGVMIDDSGMTTVDLNKVGYSDEPFVLANDVTQVFFVKDMSSKGKKGRGPDEPKCQVVLPGKRKIVGVEDKTDEDYDQLDGQPPFTVTIDPSILLSNEDTPYSRSDHKEGTIMADRDEEQILYDTIAEGSSQYWNKEEGNEDPNQYLNEEGNVERDAEGNQQGHVERDVEGNQEEEASGSQPSVGQKRARGQRGAAKKLEGRHIITEVEEDGRPSAPAEATKNYVRHSGWVVRDNVPVSTVYWRRTRARGDHESFVPDSEKEMLWTTMLETFTLPAGTEDKVKRWTLKKMAEQFQSFKGDLYQKYILKGQTPNFDTFPKLRDHWDEFVAYKTGEQGQAMMERNKENAAKKKYHHHLGSGGYSVAMPKWEQMEASLIERGIEPATANWPERSKFWYYAHGGTLNPADGSLVFGDQIREAARRLTDAVEASSQGTFRPDRDRDELTLALQTPEHPGRTRGKGVIPWKIGFKEDIDTYRSRMRSKRDTEAKIADLEFRVSSYELNMQEEVTRKVDERMAAHRSHDPQPTIPPAMVSPSGNRSSCASTGQVASGMAIPTDPSGTYHCRPIPAGYSKVEVELVEGAYEDLELDYPGGDGETHLRDTCHAIILWRRRYIILPRRQTASRAPSPPAPPSPPQDPAPSPPHAPPAPSPPQAPASTPPQDPAPTPPRAPTPTPPQAPLPAPSKSRAPPAPPPAHTRATKKAKVDAAKNKDPGYDCTQEELDAYVASEVKRQFKPRSLEKKIPIDPSVRNFFRGMSASVKEAIKLSDYERTLKKASSRKSKPVPQLGEQPNQEIEPLVTGKEMTIEQFITDTGLTTDQLLGVAPIEKAEVKYMYELGKPLVKPELLQSLPTQMYKFHQLYMEMSATGREMIGARIRDTDFLQGDDILWINFRGIYELYQLDALDVSIMSCWILMEIQRARRRRVFNTGFIDPRKVNVAMLDQYPQETEDNLVHLLKAQHYKTFILLPYNTEFHWVLLLFDLEACTVNVYDSMDKKESTFDNVFELIDRAWYRFRHLCAKQKQGTNFCGYYVCEYCHYLADQIITTRELDFIRMRDNLTTHKEFIAAVQEQLMGFINEEILDPKGEFYYDGNTIHRSLASELAASTTTSKS

SEQ ID NO: 118949 - protein, 811 aa, Oryza sativa
  Clone ID: PAT_MRT4530_22211C.1.pep
MKPKSLPFIAFEHKRDAYGFAVRPQHLQRYKEYAGIYKEEEEERSDRWKNFLERQSEPSGQEEKGEAAGRVVDSSGIGGSSLLQEKIVQGPHKIEIWKPIRPSLGNIEQIMSVRVEEKQSPASGNQDTKDVIHPVKVQEGKLSEDSDDEFYDVDKVETSQEMHSSDSANTGIDNRGQEENFPSMEELECLVHGGLPMALRGELWQAFVGIGVRRVKGYYDSLLVAEGELEDTSGSRSSTSDVAGENTEVSSEKWKGQIEKDLPRTFPGHPALDEDGRNALRRLLLAYARHNPAVGYCQAMNFFAGLLLLLMPEENAFWTLVGIIDDYFDGYFSEEMIESQVDQLVLEELVREKFPKLANHLDYLGLQVAWVTGPWFLSIFTNVLPWESVLRVWDVLLFDGNRVMLFRTALALLEFYGPALVTTKDAGDAVTLLQSLAGSTFDSSQLVLTARMGYQSVDETGLQELRNKHRPSVLSSMEERAKGLGALDTNGLASKLYNFKHDPEPLVSISDSQDQMSDVGDGNANQSDSGNMDDMYGGLTVSSEIEALPDPKDQISWLKFELCRLLEERRSAVLRADELETALMEMVKQDNRRQLSAKVEQSEQELSELRQTLLDKQEQEQAMCQVLLRVEQELKIAEEARISAEQDAAAQRYAVNVLQEKYEEAMASLAKMENRAVMAETMLEATLQYQTSQQKALLSPLPSPRTSMIDASPGRANHDSSQEFQPKKINLLSPFSLSWRDKNKGKQNNVDDSAKLTDAHDQREEITNNNDEKQVETPKLDVLEESMGSPKEDNKSRVEVPKETAIWQASK

SEQ ID NO: 118950 - protein, 1110 aa, Oryza sativa
  unsure (1)..(1110): unsure at all Xaa locations
  Clone ID: PAT_MRT4530_22212C.1.pep
MDRQWMYTDRWSKEFIDDVHYFLRVAEANRQRGFICCPCNKCKNQKEYSASRTIHFYLFESGFMPSYNCWTSHGEQGVEMEEYEVEDDNILDFAQYVGFEGNQTGEEERDADGNDVADDIGQMLQDAKEDCESEKGAHKLDKMLEDHRISLYPGCEQGHKKLDTTLEFLQWKAKNGVSDKAFGDLLKLVKNILPEGNKLPETTYEAKKIVCPLGLEVQKIHACPNDCILYRGEEYENLEACPVYKALRYKIRRDDPGEVDGQLTKKRIPAKVMWYFPIIPRLRRLFRNKGNARMMRWHVEERQQDGMLRHPADGSQWRNIDRKFKEFGKDARNIRFGLSTDGMNPFGEMSSGHRTWPVTMCIYNXPPWLCMKRKYIMMPIIIQGPKQPGNDIDVYLRPLVEDLKLLWKKEGVPVWDEDKQEEFNIRALLFVTINDWPALSNLSEQSNKGYKACTHCMDETESTYLKHYRKVVYMGHHRFLAANHPVRKKGKHFEHKADHRMKPKHRSGKTVFAMVKDLKVVFGKGPGSQPIESEDGHAAMWKKNSIFWELPYWEFLDVRHAIDVMHLTKNLCVNLLGFLGVYGKSKDTLEARNNLKHMEQRSDLHPEPKEKGSHYLSPASYTLSKAEKESMFECLESIKVPSGYSTNIKRIISTKEKKFTNLKSHDCHVLMTQLLPVVIRGILPNNVWATMTKLCAFMNAILQKVIDPDRLEALQNDVVQCLVSFELIFLPSFFNIMTHLLCYLVKEISILGPVYLYNIFPFERYMGVLKKYVHNRAHPEASIAKGYGTEEVIEFCVEFIEDLRPIGVPESRHEGRLRGKGTLGRKAIMTVDNNLFRKAHFTVLQQSSFVAPYIEEHLALVRARNIGKSDAWITRHHIDTFPAWIRQHLMGNEXINQQLAFLARGPSXSIATFQGYEINGYTFYTRAQDMKSTNQNNAVRVDAMGHVGTTGTYYGAIEDIWELDYGPLKVPLFRCQWVRLTGGGVMIDDSGMTTVDLNKVGYLDEPFVLADDVTQVFFVKDMSSKGKKGRGPDEPKNHVVLPGKRKIVEVEDKTDEDYDQLDGQPPFTVTIDLSILLSNEDTPYSRSDHKEGTILRRKYVRSTVTVDVLP

SEQ ID NO: 118951 - protein, 47 aa, Oryza sativa
  Clone ID: PAT_MRT4530_22213C.1.pep
SRFVIDEQSYVTIEGAVHSVIISVYSSAFVGQVSEQVVGNDLWMTYV

SEQ ID NO: 118952 - protein, 224 aa, Oryza sativa
  Clone ID: PAT_MRT4530_22214C.1.pep
MGIPRALLLLLLHVAVVVVLRSLPVSSADLYALVYKGCSNQSFPGGAVPPTVAALSSSLSDQSASAKFYKTSSSSSASSTSVFGLFQCRGDLSGSDCAACVSRAMSSWSEVCGASVAARVQLTGCLALYEISGFPQVSGTQMLFKTCGTGGGGGTDFEMRRDTAFAQMEASVGGGNGGFYATSYQQVYAMAQCEGDLSSGDCGQCVTQAVQHVEVECGGAPSGQ

SEQ ID NO: 118953 - protein, 71 aa, Oryza sativa
  Clone ID: PAT_MRT4530_22215C.1.pep
METRIQKKGKQKEHKTNSTHPSSRFSEGDQAIPPHPIGIPRRAIADFGRIDRRKERKAINEEEGFYLPPSG

SEQ ID NO: 118954 - protein, 199 aa, Oryza sativa
  unsure (1)..(199): unsure at all Xaa locations
  Clone ID: PAT_MRT4530_22216C.1.pep
CKIKGVFDYYSVMNNWHWRLLVLIFGIYLRNGFRDDWNLQVNKNCXCDLGTIRPGMCCRLEXMHVVGEDSIWHTMDVLFVYGMRSXIWKXFKFGMIGXVKFVSCKRRFPRWIRTSSMSLVCGFRLRTLCINRERASDRRHRGGQTDGAMAVRPTVTSGTAGXSRRSNRSSXILVRPTASRRSDRRNTFGQTAIRRIRGF

SEQ ID NO: 118955 - protein, 149 aa, Oryza sativa
  unsure (1)..(149): unsure at all Xaa locations
  Clone ID: PAT_MRT4530_22217C.1.pep
MEDNNNDHHGXGGGRRRKKETRLVLKKKKINQMADNSGYPSKQMKVSLARRQAQNKSLQQQNEQLKLENEKLKKKNYAIKLQEFNSICSTCHMRAENACLGTEIQRLYARATNQETEAQPEEVDLPFPPTAGSQEGAPLNQDEPAPPSK

SEQ ID NO: 118956 - protein, 93 aa, Oryza sativa
  unsure (1)..(93): unsure at all Xaa locations
  Clone ID: PAT_MRT4530_22218C.1.pep
XPFKKKKNPFKKKIFSPKGGKXGPKFXPPFLGFPXPPFWENWENQGLGXGIWPQLGGKKKTFKFWEINSQXFWVFFLGLTNFWVFGFQKKXFN

SEQ ID NO: 118957 - protein, 421 aa, Oryza sativa
  Clone ID: PAT_MRT4530_22219C.1.pep
MAAPPSMEEPLLGGGNGEEKKGGSSRLAVVAEVRKQLYLAGPLIAGWLLQNVVQMISVMFVGHLGELELSSASIATSFAGVTGFSLLAGMASSLDTLCGQAFGAKQHRLVGVYKQRAMVVLGLASVCVAAVWAYTGELLLLFGQDPEIAAAAGSYIRWMIPALLAYGPLQCHVRFLQTQNAVMPVMLSSGAAAACHLPVCWLLVYGAGLGSKGAALANAVAYLANAAALAAYVRLSPACRSTWTGFSSEAFHDLVGFMRLAVPSALMVCTRVSNELGAGRPEAARLASRVVMALGLVVGVAIGLAMILVRHLWGYAYSNEEEVVQYVAKMMPILAVSFLFDDLQCVLSGVARGCGWQKIGAIVNLGAYYLVGIPAALCFAFVYHLGGMDTVANLVTALAAAHAVTSTGKNGDLLLATLTKA

SEQ ID NO: 118958 - protein, 177 aa, Oryza sativa
  Clone ID: PAT_MRT4530_2221C.1.pep
MEALAGGRPLSGRARQVGRSREEELLGLLSDFSGDSGEFGRELSFSDLVVVEDTANNPSPRGGDGGGDRAAPTAAAAENGQARPSSSSEQEEAAEAASRRQQQQQAAAAARERRLRRRRSDSRGSCGGSGDGVLLNFYVPGLLTRSMTTPRPAARGTLPGAAAAAAAPATAAAGKAR

SEQ ID NO: 118959 - protein, 105 aa, Oryza sativa
  Clone ID: PAT_MRT4530_22220C.1.pep
MALTERQTSAAVCRQRRDGGEARYSGRRGCGGGRVGQQVGGIARATSSSVMRPRCPAQLGPISAVTSRTMRHHYRQPRPKTLPPPAHPCRLGASEAFYFFYEIYM

SEQ ID NO: 118960 - protein, 485 aa, Oryza sativa
  Clone ID: PAT_MRT4530_22221C.1.pep
MGSLGAAGKPHAVCMPYPAQGHITPMLNVAKLLHARGFDVTFVNTEYNHARLVRTRGEAAVAGAPGFRFATIPDGLPPSDDDDVTQDIPSLCRSTKETCLAPFRRLLAQLNDPATGHPPVTCVVSDVVMGFSMAAAKELGLPYVQLWTASSISYLGYRHYRLLMERGLAPLKDVDQLTNGYLDTPVEDVPGLRNMRIKDFPSFIHTTNPEEYMVGYVIEETERCKDASAIIVNSFGDLEGEAVAAMEALGLPKVYTLGPLPLVARKDPPSPRRSSIRLSLWKEQEECLQWLDGKEAGSVVYVNFGSITVMTNEQLVEFAWGLANSGREFLWIVRRDLVKGDTAVLPPEFLAETAERGLMASWCPQQDVLNHPAVGAFLTHSGWNSTLESLAAGVPVISWPFFADQQTNCRYQCNEWGVGMEIDSNVKRGAVACLIAELMEGQKGKEMRRKAEEWREKAIRAAKPGGSSHRNFEELVRHVLLAKES

SEQ ID NO: 118961 - protein, 982 aa, Oryza sativa
  unsure (1)..(982): unsure at all Xaa locations
  Clone ID: PAT_MRT4530_22222C.1.pep
MADRDEEQILYDTIAEGSSQYWNEEEGNDDPHQYLNEEGNVERDAEGNEEGNDEEEASGSHPSAGQKRARRQRGAAKKIEGRHIITEMDEDGRPSAPAEAAKNFVRHSGWVVRDNVPVSTVYWRRTRARGDNDSFVPDLEKEMLWTTMLETFTLPAGTENIVKQWTLKKMAEQFESFKGDLYKKYILKGLTPNFDVFPKLRDHXDEFVAYKTGQQGQAMMARNKDNAAKKKYHHHLGSGGYSVAMPKWEEMEASLIERGIEPATAKWPDRSKFWYYAHGGTFNPVDGSLVFSDQIREAVSRLTDAVIASSQGTFRPDREKDELSLALQTPEHPGRIRGKGVIPXKIGFKEDIHTYRSRMRSKRDTEAKIADLEYRVSSYELSMQEEVARKVDERMAAHRSXDPHPYIHPAMVSPSGNRSSCASTGQVGSQSMDAMQTQDETICPVDEITQRTPCELHIPFKNLSILVASGMAIPTDPSGTYHCRPIPAGYSRVEVELVEAAYEDLELDYPGGDGETHLRDTSHAIILWRKQYIILPGRQAASRAPTPPAPPPPPAAPSPPAPPAPPPPPCPPAPPKTRSRQAPPPARTRATKKVKVDATKNKEPPYDCSQEELDAYVAGEVKRQLKPRSPEKKIPIDPSVKNFFKGMSTTNKEALQILDYDRTLQRAYHKKSKPVPQLGEQPNQEVEPLVTGEDFGITEFISNTGLTVDQLVGGAPIPKAEVAYKFELGKPLVKPEQLQSLPTQMYKFHERYMEMSAKGREMFRARIRNPDFLQGEDVLWIHFKDLFDLYQLDALDVSLLSAWILMEIQRARRRRVYDTGFIDPRKINTEMIDKYEKDTKDNLVHLLTQQHFKTYILLPYNTEFHWVLLFFDLYACRVTVYDSMNKEEKIFDKVFKLIDRAWDRFRQLVRGTWKEKLGRRFHFLVIHMRDNLPHKDFITAVQEQLMGFINEEVLNPDGEFYYDGSTIHNVGPSSSDITPASK

SEQ ID NO: 118962 - protein, 71 aa, Oryza sativa
  Clone ID: PAT_MRT4530_22223C.1.pep
MDKGILDWREPLSSTTIELEDKMILTRMAKDNWERWAPPTIILLFPTDRAAQAPQRVATKGACTVLKGTPL

SEQ ID NO: 118963 - protein, 1150 aa, Oryza sativa
  unsure (1)..(1150): unsure at all Xaa locations
  Clone ID: PAT_MRT4530_22224C.1.pep
TPTPGPRCRRXRHAAAFAAARATPPPPRHAAAQRRRRMQCHAAAAVATPXRRAKRRPDAATPLLTNTXNENEHVNVRCRENVNENENDRTNESENEHVNVRCRENVNENENDRTNESENENDRTNXRERERQRMADRDEEQILYDTIAEGSSQYXNEEEGNEDPNQYLNEEGNMERDAEGNQQGHVERDVEGNQEEEASGSQPSIGQKRARGQRGAVKKLEGRHIITEVEEDGRPSAPAEAAKNYVRHSGWVVRDNVPVSTVYWRRTRAHGDHESFVPDSEKEMLWTTMLETFTLPAGTEDKVKRWTLKKMAEQFQSFNRDLYQKYILKGKTPNFDTFPKLRDHWDEFVAYKTGEQGQAMMERNKENAVKKKYHHHLGLGGYSVAMPKWEEMEASLIERGIEPATANWLERSKFWYYAHGGTLNPADGSLVFGDQIREAARRLTDTVEASSQGTFRPDRDRDELTLALQTPEHPGRTRGKGVIPWKIGFKEDIHTYMSRMRSKRDTEAKIADLEFRVSSYELRMQEEVARKVDERMAAHRSHDPQPTIPPAMVSPSGNRSSCASTGQVGSQSMDAMQTQDESTCPVDDITQRTPCELHFPYKNLSIKVASGTAIPTDPSGTYHFRPIPAGYSKVEVEFVEGAYEDLELDYPGGDGSCTVSSSCSASTVSTSGSSTDSSSGSCTDSSSGSYTYSSASSSSGTFKVKGPPXAPPPAHTRATKKAKVDTAKNKDPGYDCTQEELDAYVASEVKRQFKPRSPEKKIPIDPSVRNFFRGMSAPVKEAIKLSDYERTLKKASSGKSKPVPQLGEQPNQEIEPLVTGEDMTIEEFIIDTGLTTDQLLGVEPIEKAELKYMYKLGKPLGKPLVKPELVQSLPTQMYKFHQLYMEMSATGRXMIGARIRDPDFLQGDDILWINFKGIYEVYQLDALDVSIMSCWILMEIQRARRRSVFDTGFIDPRRVNVAMLNQYPQETEDNLVHLLKAQHYKTFILLPYNTEFHWVLLLFDLSACTVNVYDSMDKKESTFDKVFELIDRAWYRFRHLVHGNWRERLRRRFKFPCAKQKQRTNLCGYYVCEYCHCLADQIITTRELDFIRMRDNLTTHKEFIVAVQEQLMGFINEEILDPKGEFYYDGNTIHRSLASELAASTTATSK

SEQ ID NO: 118964 - protein, 94 aa, Oryza sativa
  Clone ID: PAT_MRT4530_22225C.1.pep
MEISTYTREIHGGGEPKKTTIISMPRAREKKLKKKKKKKKKKKKKKKNQCKRNAGRTGPGQARASPHLSFSSSAWSGRAPMARQAGSGSGRIDR

SEQ ID NO: 118965 - protein, 1973 aa, Oryza sativa
  Clone ID: PAT_MRT4530_22226C.1.pep
MLEDHRTSLYPGCEQGHKKLDTTLEFLQWKAKNGVSDKAFGDLLKLVKNILPGGNKLPETTYEAKKIVCPLGLEVHKIHACPNDCILYRGEEYENLEACPVCKALRYKIRRDDPGEVDEQLTKKRIPAKVMWYFPIIPRLRRLFRNKGNARMLRWHAEERQQDGMLRHPTDGSQWQNIDRKFKEFEKDARNIRFGPKQPGNDIDVYLRPLVEDLKQLWKKEGVPVWDEDKQEEFNLRALLFVTINDWPALSNLSGQSNKGYKACTHCMDETESTYLKHCRKVVYMGHRRFLAANHPVRKKGKHFEHKADHRMKPKHRSGKTVFAMVKDLKVVFGKGPGSQPIESEDGHAAMWKKNSIFWELPYWEFLDVRHTIDVMHLTKNLCVNLLGFLGVYGKSKDTLEARNDLKHMEQRGDLHPEPKEKGSHYLSPASYILSKAEKESMFECLESIKVPSGYSTNIKRIISTKEKKFTNLKSHDCHVLMTQLLPVVIRGILPDNVRAIITKLCAFMNAISQKVIDPDRLEALQNEVVQCLVSFELIFPPSFFNIMTHLLCHLVKEIRILGPVYLHNMFPFERYMGVLKKYVRNRARPEASIANGYGTEEVIEFCIEFIEDLRPIGVPESRHEGRLRGKGTLGRKAIMTVDNNLFRKAHFTVLQHSSLVAPYIEEHLALVRARNIGKSDAWITRHHIDTFPTWLRQHLIGNESINQQLAFLARGPSGSIATFQGYEINGYTFYTRAQDIKSMNQNSVVCVDAMGHDGTTATYYGAIEDIWELDYGPLKVPLFRCQWVRLTGEGVMIDDSGMTTVDLNKVGYSDEPFVLANDVTQVFFMKDMSSKGKKGRGPDEPKRQVVLPGKRKIVGVEYKTDEDYDQLDRQPPFTVTIDPSILLSNEDTPYSRSDHKEGTMKRRVVGVVPQAGVEELALEMADRDEEQILYDTIAEGSSQYWNEEEGNEDPNQYLNEEGNVERDAEGNQQGHVERDVEGNQEEEASGSQPSVGQKRARGQRGAAKKLEGRHIITEVEEDGRPSAPAEAAKNYVRHSGWVVRDNVPVSTVYWRRTRARGDHESFVPYSEKEMLWTTMLETFTLPAGTEDKVKRWTLKKMAEQFQSFKGDLYQKYILKGQTPNFDTFPKLRDHWDEFVAYKTGEQGQAMMERNKENAVKKKYHHHLGSGGYSVAMPKWEEMEASLIERGIEPATANWPERSKFWYYAHSGTLNPADGSLVFGDQIREAARRLTDAVEASSQGTFRPDRDRDELTLALQTPEHPGRTRGKGVIPWKIGFKEDIYTYRSRMRSKKDTEAKIADLEFRVSSYELRMQEEVARKVDERMAAHRSHDPQPTIPLAMVSPSGKRSSCASTGQVGSQSMDAMQTQDESTCSVDDITQRTPYELHIPYKNLSIKVASGMAIPTDPSGTYHCRQIPAGYSKVEVELVEGAYKDLELDYPGGDSETHLRDTSHAIILWRRWYIILPGRKAASRAPSPPQDPAPSPPHALPAPSPPQAPELTPPQDPAPTPPRAPTPTPPQAPLSAPSKSRASPAPPPTHTRATKKAKVDAAKNKDPGYDCTQEELDAYIASEVKRQFKPRSLEKKIPIDPSVRNFFRGMSAPVKEAIKLSDYERTLKKASSGKSKPVPQLGEQPNQEIEPLVTGEDMTIEEFIIDTGLTTDQLLGVEPIEKAELKYMYELGKPLVKPELVQSLPTQMYKLHQLYMEMSATGREMIGARIRDPDFLQGDDILWINFKGIYEVYQLDALDVSIMSCWILMEIQRARRRRVFDTGFIDPRRVNVAMLDQYPQETEDNLVHLLKAQHYKTFILLPYNTEFHWVLLLFDLSACTVNVYDSMDKKESTYDKVFELIDRAWYRFRHLVRGNWRERLRRRFKFPCAKQKQGTNLCGYYVCEYCHCLADQIITTRELDFIRMRDNLTTHKEFITAVQEQLMGFINEEILDPNGEFYYDGNTIHRSLASELAASTTTTSKS

SEQ ID NO: 118966 - protein, 193 aa, Oryza sativa
  Clone ID: PAT_MRT4530_22227C.1.pep
MGFIPRTETQRTGRARERRRPVPRREEVVVVTELELRMQLLGGGGNCYNINDNADLLAEILARLDGRSLAAAACVCRLWAAVARRDAVWEALCLRHVGPASGPTAGPATRAVVAALGGYRRLYRLCLGPALDRLGRGGGAIAHAHARARLSLSLSLSLFSIDCYERLGGGGGAGAGRQPQPSSLLFLCKPVDV

SEQ ID NO: 118967 - protein, 2111 aa, Oryza sativa
  unsure (1)..(2111): unsure at all Xaa locations
  Clone ID: PAT_MRT4530_22228C.1.pep
MDRQWMYADQRSKEFIDGVHYFLRVAEANRQKGFICCPCNNCKNRKEYSASRTIHFHLFESGFMPSYNCWTSHGEQDVEMEEDEVEDNNIPDFAQYAGFEGNQTGEEERDADGNNVADDLGQMLQDAKEDCESEKEAHKLDKMLEDHRTSLYPGCEQXHKKLDTTLEFLQWKAKNGVSDKAFGDLLKLVKNILPEGNKLPETTYEAKKIVCPLGLEVQKIHACPNDCILYRGEEYENLEACPVCKALRYKIRRDDPEEVDGQLTKKRIPAKVMWYFPIIPWLRRLFRNKGNARMMRWHAEERQQDGMLRHPADGSXWQNIDRKFKDFGKDARNIRFGLSTDGMNPFGEMSSGHSTWPVMMCIYNLPPWLCMKRKYIMMPIIIQGPKQPGNVNVYLRPLVEDLKLLWKKEGVPVWDEDKQEEFNLRALLFVTINDWPALSNLSEQSNKGYKACTHCMDETESTYLKHCRKVVYMVLRRFLAANHPIRKKGKHFEHKADHRTKPKYRGGKTVFAMVIDLKVVFGKGLGSQPIESEDGHAAMWKKNSIFWELPYWEFLDVRHAIDVMHLTKNLCVNLLGFLGVYGKSKDTLEARNDLKHMEQRGDLHSEPKEKGSHYLSPASYTLSKAEKESMFECLESIKVPSGYSTNIKRIISTKEKKFTNLRSHDCHVLMTQLLPVVIRGILPDNIRATITKLCAFMNAISQKVINPDRLEALQNDVVQCLVRFELIFPPSFFNIMTHLLCHLVKEIGILGPVYLHNMFPFERYMGVLKKYVRNRARPEASIAKGYGTEEVIEFCVEFIEDLRPIGVPESRHEGRLRGKGTLGRKAIMTVDNNLFRKAHFTVLQQSSLVTPYFEEHLALVRARNIGKSDAWITRHHIDTFSTWLRQHLMGNETINQQLAFLARGPSGSIATFQGYEINGYTFYTRAQDMKSTNQNSDVRIDAMGHDGTTGTYYGAIEDIWELDYGPLKVPLFRCQWVRLTGGGVTIDDSGMTTVDLNKVRYSDEPFVLANDVTQVFYVKDMSSKGKKAKGLDDPKHHVILPVRPRLLHHHLDIFXISARSPSPPPCLGQPHADTAVVSRHHLAVLAASAADAPAASLECFLYAQMADRDEEQILYDTIAEGSSQYXNEGEGNEDPNQYLNEEGNMERDAEGNEEGNDKEEASGSHPSAAXKRARGQRGAAKKIEGRHIITEVDKDGRPSAPAEAAKNFVRHSGWVVRDNVPVSTVYWRRTRARGDNDNFVLDSEKEMLWTTMLKMFMLPAGTENIVKQWTLKKMAEQFXSFKGDLYKKYILKRLTPNFDVFPKLRDHWDEFVAYKTGQQGQAMMARNKDNAAKKKYHHHLGSGGYSVAMPKWEEMEASLIERGIEPATAKWPDRSKFWYYAYGGTLNPVDGSLVFNDQIREAASRLTDVVVASSQGTFRPDREKDELSLTLQTPEHPGRTRGKGVIPWKIGFKEDIHTYRSRMRSKRDTKAKIADLEYRVSSYELSMQEEVARKVDERMAAHRSQDPQLYIHPAMVSPSGNRSSCASTGQVGSQSMDAMQTQDETTCPVDEITQRTPCELHIPFKNLSIKVASGMAIPTDPFGTYHCRPISAGYSRVEVELVEHAYEDLELDYPGGDDETHLRDTSHAIILWHKRYIILPGRQAASRAPSPPAPPSPPTPSPPVPPPRPPAPSLPAPPPPPAAPSPPAPPAPPPPPCPPAPPKTRSRQAPPPARTRATKKTKVDATKNKEPPYDCSQEELDAYVAGEVKRQLKPRSPEKKIPIDPSVKNFFKGMSTTNKEALQISDYDRTLQRAYHKKSKPVPQLGEQPNQEVEPLVTGEDFGITEFISDTGLTVDQLVGGAPIPKAEVAYKFELGKPLVKPEQLQSLPTQMYKFHERYMEMSAKGREMFGARIRNPDFLQGEDVLWIHFKDLFDLYQLDALDVSLLNAWILMEIQRARRQRVYDTGFIDSRKINTEMIDKYEKDTEDNLVHLLTQQHFKTYILLPYNTEFHWVLLFFDLDACRVTVYDSMNKEEKIFDKVFKLIDRAWNRFRELVRGTWTEKLGRRFHFPRIHIRDNLPHKDFITAVQEQLMGFISEEVLNPDGEFYYDGSTIHNSLPPITTTAVRARRI

SEQ ID NO: 118968 - protein, 211 aa, Oryza sativa
  Clone ID: PAT_MRT4530_22229C.1.pep
MDWFVRCYMLAIANGVCIGGAAMIVYGIVQVSRTGGDAGSLVVLSLFLALWVAVGSCVYASFCGAFFPWASLRRPLAPVRDALSRCARALLPRRNGGGGDGLPSHLRDGVQPRETPTVRGGGGARVATADDIPAYEQPPAGEGEGGAAAAPECAVCLGEVEKGEMAKRLPACLHVFHQRCIDAWLRGNSTCPVCRRNAFATAAPPLPAQMV

SEQ ID NO: 118969 - protein, 48 aa, Oryza sativa
  Clone ID: PAT_MRT4530_2222C.1.pep
SELAFLTRLYHKHLVVFVGYCEENDKQLLIYKYMKNGVLNITSTMAAR

SEQ ID NO: 118970 - protein, 1795 aa, Oryza sativa
  unsure (1)..(1795): unsure at all Xaa locations
  Clone ID: PAT_MRT4530_22230C.1.pep
RQWMYADRRSKEFIDGVHYFLRVAEANGQRGFIRCPCNKSKNQKKYSASRTIHFHLFESGFMPSYNCWTSHREQGVEMEEDEVEDDNIPDFAQYVGFEGNQTGEEERDADGNDVADDLGQMLQDAKEDCESEKGAHKLDKMLEDHRTSLYPGCEXGHKKLDTTLEFLQWKAKNGVSDKTFGDLLKLVKNILPEGNKLLETMYEAKKIVCPLGLEVQKIHICPNDCILYRGEEYENLEACPVCKALRYKIRRDDPGEVDGQLTKKRIPTKVMWYFPIIPRLRRLFRNKGNARMMRWHVEERQXDRMLRHPADGSQWRNIDRKFKEFGKDARNIRFGLSTDGMNPFGEMSSGHSTWPVTMCIYNXPPWLCMNRKYIMMPIIIQGPKQPGNDIDVYLRPLVEDLKLLWKKEGVPVWDEDKQEVFNLRALLFVTINDWPALSKLSGQSNKGYKACTHCMDETESVYGKSKDTLEARNDLKHMEQRGDLHPEPKEKGSHYLSPASYTLSKAEKESMFECLESIKVPSGYSTKEKMFTNLKSHDCHVLMIQLLPVVIRGILPDNVRATITKLCAFMNAISXKVIDPDRLEALXNDVRYMGVLKKYVRNRARPEASIAKGYETEEVIEFCVEFIEDLRPIGVPESRHEGRLQGKGTLGRKAIMTVDNNLFRKAHFTVLQQSSLVAPYIEEHLALVRARNIGKSDAWITRHHIDTFPAWLLQHLVGNESINQQLTFLARGPSWSIATFQGYEINGYTFYTRAQDMKSTNQSSAVRVDAMGHDGTTGTYYGAIEDIWELDYGPLKVPLFRCQSVRLTGGGVMIDDSGMTTVDLDKVGYSDEPFVLANDVTQVFYVKDMSSKGKKGRGPDEPKRHVVLLVKRKIVGAEDKTDEDYDQLDGQPPFTVMIDPSILLSNEDTPYSRSDHKEGTIYLNEEGSVERDAEGNQEGHVERDVEGNQEEEASGSQPSVGQKRGRGQRGATKKLEGRHIITEVDEDGRPSAPAEAAKNYVRHSGWVARDNVPVSTVYWRRTRARGDHESFVPDSEKEMLWTTMLETFTLPAGTEDKVKRWTLKKMAEQFRSFKGDLYQKYILKGQTPNFDTFPKLRDHWDEFVAYKTGEQGQAMMERNKENAAKKKYHHHLGSGGYSVAMPKWEEMEASLLERGIEPATANWPERSKFWYYAHGGMLNPADGSLVFGDQIREAARRLTDTVEASSXGTFRPNREKDELSRMRSKRDTEAKIADLEFRVSSYELSMQEEVARKVDECMAAHRSHDPQPTIPPAMVSPSGNRSSCASKGQVASGMAIPTDPSGTYHCRPIAAGYSKVEVELVEDAYEDLELDYPGGDGETHLRDTSHTIILWRKRYIILPGRQAASRAPSPLAPPSPPQAPAPSPPHAPAPSPPQAPPAPSKSRATQAPPPAPTRAIKKAKVDTAKNKDPGYDCTQEELEAYVASEVNRQFKPRSPEKKIPIDPSVRNFFRGMSAPAKEAIKLSDYERTLKKASSGKSKPVPQLGEQPNQEIEPLVTGEDFGIQEFINDTGLTTDQLLGDAPIEKAEVKYMYELGKPLVKPELLQSLPTQMYKFHQLYMEMSATGREMIGARIRDTDFLQGDDILWINFKGIYELYQLDALDVSIMSCWILMEIQRAXRRGVFDTGFIDPRKVNVAMLDQYPQATEDNLVHLLKAQHYKTFILLPYNTELNVYDSMDKKESTFDKVFELIDRAWYRFYHLVRGKWRERLRRKFKFPFIRMRDNLITHKEFIAAVQEQLMGFINKQILDPKGEFYYDGNTIHRSLASELATTTTSKS

SEQ ID NO: 118971 - protein, 75 aa, Oryza sativa
  Clone ID: PAT_MRT4530_22231C.1.pep
MDSATGAMGNLLLKLGELAMDEYKLQKGVKRNVEALRRELESMQAALRKVGDVPSDQFDEQVELWARDVREVFYD

SEQ ID NO: 118972 - protein, 1107 aa, Oryza sativa
  unsure (1)..(1107): unsure at all Xaa locations
  Clone ID: PAT_MRT4530_22232C.1.pep
MSTPRRRRRRHAAAAFAAARAMPPPPRHAAAATAPQRHAVAAVATPPPPPPRRRANRRPDAATPPLTNENENDRTNESENEHVNVRCRENVNENENDRTNESENENDRTKTSENEGTNVNENKRTNVNENERTNVNELGNMADRDEEQILYDTIVEGSSQYWNEEEGNEDPNQYLNEKGNVERDAEGNQQGHVERDVEGNQEEEASGSQPSVEQKRARGQRGAAKKLEGRHIITEVEEDGRPSAPAEAAKNYVRHSGWVVRDNVPVSTVYWRRTRARGDHESFVPDSEKEMLWTTMLETFTLPAGTEDKVKRWTLKKMAEQFQSFKGDLYQKYILKGQTPNFDTFPKLRDHWDEFVAYKTGEQGQAMMERNKENAAKKKYHHHLGSGGYSVAMPKWEQMEARLIERGIEPATANWPERSKFWYYAHGGTLNPADGSQVFGYQIQEAARRLTDAVEASSQGTFRPDRDRDELTLALQTPEHPGRTQGKGVIPWKIGFKEDIHTYRSRMRSKRDTEAKIADLEFRVSSYELNMQEEVARKVDERMAAHRSHDPQPTIPPAMVSPSGNRSSCASTGQVGSQSMDAIQTQDESTCPVDDITQRTPCELHIPFKNLSIKVASGMAIPTDPSGTYHCRPIPAGYSKVEVELVEGAYEDLELDYPGGDXTVSTSGSSIDSSSGSCTDSSSCSYTYSPASSSSGTFKVKGXPTPPLAHTRATKKAKVDAAKNKDPGYDCTQEELDAYVASEVKRQFKPRSPEKKIPIDPSVRNFFRGISASVKEAIKLSDYERTLKKASSGKSKPVPQLGEQPNQEIEPLVTGKEMTIEQFITDTGLTTDQLLGVAPIEKAEVKYMYELGKPLVKPELLQSLPTQMYKFHQLYMEMSATGREMIGARIRDTDFLQGDDILWINFRGIYELYQLDALDVSIISCWILMEIQRARRRRVFDTGFIDPRKVNVAMLDQYPQETEDNLVHLLKAQHYKTFILLPYNTEFHWVLLLIDLEACTVNVYDSMDKKESTFDKCAKQKQGTNLCGYYVCEYCHCLADQIITTRELDFIRMRDNLTTHKEFIAAVQEQLMGFINEEILDPKGEFYYDGNTIHRSLASELLRRNRS

SEQ ID NO: 118973 - protein, 90 aa, Oryza sativa
  Clone ID: PAT_MRT4530_22233C.1.pep
IYVYHHGYLLGRDEPLRRTCTYYRNIVNGGLHSKVQGPPTLCLDNNLSTIIDLRIQYIILRTTSSSSIHLLYSIIPRPLISYHHILGKNF

SEQ ID NO: 118974 - protein, 1015 aa, Oryza sativa
  unsure (1)..(1015): unsure at all Xaa locations
  Clone ID: PAT_MRT4530_22234C.1.pep
MADHDEEQILYDTIAEGSSQYWNEEEGNEDPNQYLNEEGNVERDAEGNQEGHVERDVEGNQEEEASGSQPSVGQKRARGQRGATKKLEGRHIITEVEEDGRPSAPAEATKNYVRHSGWVVRDNVPVITVYWRRTRARGDHESFVPDLEKEMLWTTMLETFTLPAGTEDKVKRWTLKKMAEQFQSFKGELYKKYILKGXDTFPKLRDHWDEFVAYKTGEQRQAMMERNKENAAKKKYHHHLGSGGYSVAMPKWEEMEASLLERGIEPATANWPERSKFWYCAHGGTLHPADGSLVFGDQIREAARXLTDAVEASSQGTFRPDRERDELSLALQTPEHPGRTRGKGVIPWKIGFKEDIHTYRSRMRSKRDTEAKIADLEFRVSSYELSMQEEVARKVDERMAAHRSNDPQPTIPPAMVSPLGNRSSCASTGQVGSQSMDAMQTQSMDAMQTQDESTCPVDDITQRTPCELHIPFKNLSIKVASGMAIPTDPSGTYHCRPIPAGYSKVEVELVEGVYEDLELDYPGGDGETHLRDTSHAIILWRRRYIILPGRQAASRAPSPLAPPSPPQDPAPSPPHAPAPSPPQAPAPTPPRAPTPTPPQAPLPAPSKSRAPKAPPPAHTRATKKAKVDAAKNKDPGYDCTQEKLDAYVASEVKRQFKPRSPEKKIPIDTSVMNFFRGMSAPAKEAIKLSDYERTLKKASSGKSKPVPQLGEQPNQEIEPLVTGKEMTIEEFITDTSLTTDQLLGVAPIEKAEVKYMYELGKPLVKPELLQSLPTQMYKFHQLYMEMSATGREMIGARIRDTDFLQGDDILWINFKGIYELYQLDALDISIMSCWILMEIQRARRRGVFDTGFIDPRKVNIAMLDQYPQATEDNLVHLLKAQHYKTFILLPYNTEFHWVLLLFDLSACTVNVYDPMDKKESTFDKIFELIDRAWYRFRHLVRGKWRERLRRKFKFPFIRMRDNLTTHKEFIAAVQEQLMGFINEQILDPKGEFYYDGNTIHRSLASELATTTTSKS

SEQ ID NO: 118975 - protein, 509 aa, Oryza sativa
  Clone ID: PAT_MRT4530_22235C.1.pep
MRRRSPPPAAAQPPRPPTRAAESGEEGGDPGKDEVAAPPKGDSALPRSGSGFGSGNAAAPDGPAKSPMKPKKRVTAPPSSDHGSRENLAAGSPSNEVPTPQGDDAAQEDDLPESPPKSKKNRKKKKKALRAGDSGKVAAPDDPAEPTRPQQDVGEVDGRLAESEQEVPPNAGKAKKKASAQARKKPSAKQHAAAQEEEDGDLMAEAEEEVAPWQGDEEDGKGPLPQRKSKRVAALSGSICPPDPKRAKIVDAQKPGFGRKWNGNDEIMILEALVDQIRSGGNVPQEPGHPLFHELVQRLEGRTFNHSDVRDKVRSLKRRYNDVVLSGLAITKDHDLQLHELSCEIWGRSVAHAGDDKQRCLARDEQSSLARDEQKSFARDEEKSLARDEQSSLARDEQKSFARDEKSLARDEEKSLASDEQRSFDDMCKQFPLLAKEIKVLMEGQPAIMELFPRLDGDQVVAIEKKLENLRWIDMKRKKKMAVKMAKIRKGLIYKLEGAAILADGNMIH

SEQ ID NO: 118976 - protein, 127 aa, Oryza sativa
  Clone ID: PAT_MRT4530_22236C.1.pep
MQAILAAAMAAQTLWFSATDPSASLFQFPCSARPLHSLRLAAGPAGAAAARALVVADATKKAASVLKGTSQVEGVVTLTQDDQGPTTVNARVTGLNDGLQGVHPHEFGDTTNGCISTGPHFTQTFDA

SEQ ID NO: 118977 - protein, 1107 aa, Oryza sativa
  unsure (1)..(1107): unsure at all Xaa locations
  Clone ID: PAT_MRT4530_22237C.1.pep
MDRQWMYADRRSKEFIDGMHYFLRVAEANRRKGFICCPCIKCKNQKEYSASRTIYFHLFESGFMPSYNCWTSHGEQGVEMEEDEVEDDNIPDFAQYVGFEGNQTGXDADGNDVADDLDQMLQDAKEDCESEKVAHKLDKMLEDHRTSLYPGCEQGHKKLDTTLEFLQWKAKNRVSDKAFGDLLKLVKNILLEGNKLPKTTYETKKIVCPLRLKVQKIHACPNDCILYRGEEYENLEACPVCKALRYKIRRDDPGEVDGQLTKKRIPAKVMWYFPIIPRLRRLFRNKGNAGMMRWHAEEHQQDGMLRHPADGSQWQNIDRKFKDFGKDAGNIRFGLSTDGMNPFGEMSSGHSTWPVTMCIYNLPPXLCMKRKYIMMPIIIQGPKQPGNDIDVYLRPPVEGLKLLWKKEGVPVWDEDKQEEFNLRVLLFVTINDWPALSNLSGQSNKGYKACTHCMDETESTYLKHCRKVVYMGHRRFLAANHPVRKKGKHFEHKANHRTKPKHRSGKTVFAIVKDLKVVFGKGPGSQPIESEDGHAAMWKKNSIFWELPYWEFLDVRHAIDVMHLTKNLCVNLLGFLGVYGKSKDTLEARNDLKHMEQSSDLHPEPKEKGSHYSSPASYTLSKAEKESMFECLESIKVPSGYSTNIXRIISTKEKKFTNLKFHDCHVLMTQLLLVVIRGILPDNVRATITKLCAFMNAISQKVIDPDRLEALQNDVVQCLVSFELIFPPSFFNIMTHLLCHLVKDISILGTVYLHNMFPFERYMGVLKKYVRNRACPEASIAKGYGTEEVIEFCVEFIEDLHPIGVPESHHEGRLRGKGTLGRKAIMTVDNNLFRKAHFTVLQQSSLVAPYIEEHLALVRTRNIGKSDAWITRHHIDTFPAWLRQHLMGNELINQQLAFLARGPSGSIATFEGYEINGYTFYTRAQDMKSTKQNSAIRVDAMGHDGTTGTYYGAIEDIWELDYGPLKDPLFRCQWVRLTGGGVMIDDSGMTTVDLNKVGYSDEPFVLANDVTQVFYVKDMSSKRKKGRGPDEPKRHVVLPGKRKIIGVKDKTDEDYDKLDGQPPFTVTIDPSILLSNEDTPYSRSDHKEGTIVRRKYVRSTVTADVLP

SEQ ID NO: 118978 - protein, 100 aa, Oryza sativa
  Clone ID: PAT_MRT4530_22238C.1.pep
MAHGSSDIDNQEGGGASCTSAAGCLGKLRLSHRPPGRASPTTAAGCPSDLRPPPLALEPVAAPIPSLASGRLPHAKPRLFQPATATIPIRGEREGRDDTG

SEQ ID NO: 118979 - protein, 2385 aa, Oryza sativa
  Clone ID: PAT_MRT4530_22239C.1.pep
MDISEANEGYASCGSVIEMSRQMKTTRVGARLKRLCNNMDRQWMYADRRSKEFIDGVHYFLRVAEANRQRGFICCPCNKCKNQKEYSASRTIHFHLFESGFMPSYNCWTSHGEQGVEMEEDEVEDDNIPDFAQYVGFEGNQTGEEEIAADGNDVADDLGQMLQDAREDCESEKEAHKLDKMLEDHRTSLYPGCEQGHKKLDTTLELLQWKAKNGVSDKAFGDLLKLVKNILPGGNKLPETTYEAKKIVCPLGLKVHKIHACPNDCILYRGEEYENLEACPVCKALRYKIRRDDPGEVDGQLTKKRIPAKVMWYFPIIPRLRRLFRNKGNARMLRWHAEERQQDGMLRHPDDGSQWRNIDREFKEFGKDARNIRFGLSTDGMNPFGEMSSGHSTWPVTMCIYNLPPWLCMKRKYIMMPIIIQGPKQPGNDIDVYLRPLVEDLKQLWKKKGVPVWDEDKQEEFNLRALLFVTINDWPALSNLSGQSNKGYKACTHCMDETESTYLKHCRKVVYMGHRRFLAANHPVRKKGKHFEHKADHRTKPKHRSGKTVFAMVKDLKVVFGKGPGSQHIESEDGHAAMWKKNSIFWELPYWEFLEVRHAIDVMHLTKNLCVNLLGFLGVYGKSKDTLEARNDLKHMEQRGDLHPEPKEKGSHYLSPASYTLSKAEKENMFECLESIKVPSGYSTNIKRIISTKEKKFTNLKSHDCHVLMTQLLPVVIRGILPDNVRATITKLCAFMNAISQKVIDPDRLDALQNEVVQCLVSFELIFPPSFFNIMTHLLCHLVKEIRILRPMYLHNMFPFERYMGVLKKYVRNRARPEASIAKGYGTEEVIEFCVEFIEDLRPIGVPESRHEGRLRGKGTLGRKAIMTVDNNLFRKAHFTVLQHSSLVAPYIEEHLALVRARNIGKSDAWITRHHIDTFPAWLRQHLMGNESINQQLAFLARGPSGSIATFQGYEINGYTFYTGAQDMKSTNQNSAVRVDAMGHDGITATYYGAIEDIWELDYGPLKVPLFRCQWVRLTGGGVMIDDSGMTTVDLNKVGYSDEPFVLANDVTQVFFVKDMSSKGKKGRGPDEPKRQVVLPGKRKIVGVEDKTDEDYDQLDGQPPFTVTIDPSILLSNEDTPYSCSDHKKGTIMADRDEEQILYDTIAEGSSQYWNEEEGNEDPNQYLNEEGNVERDAEGNQQGHVERDVEGNQEEEASGSQPSVGQKRARGQRGAANKLEGRHIITEVEEDGRPSAPAEAAKNYVRHSGWVVRDNVPVSRVYWRRTRARGDHESFVPDSEKEMLWTTMLETFTLPTGTEDKVKRWTLKKMAEQFQSFKGDLYQKYILKGQTPNFDTFPKLRDHWDEFVAYKTGEQGQAMMERNKENAAKKKYHHHLGSGGYSVAMPKWEEMEASLIERGIEPATANWPERSKFWYYAHGGTLNPADGSLVFGDQIREAARRLTDAVEASSQGTFRPDRDRDELTLALQTPEHPGRTRGKGVIPWKIGFKEDIHTYRSRMRSKRDTEAKIADLEFRVSSYERMAAHRSHDPQPTIPPAMVSPSGNRSSCASTGQVGSQSMDAMQTQDESTCPVDDITQRTPCELHIPFKNLSIKVVSGMAIPMDPSGTYHCRPIPAGYSKVEVELVEGAYEDLELDYPGGDAPSPPQAPAPTPPQAPTPTPQAPLPAPSKSRAPQAPPPAPTRATKKAKVDAAKNKDPGYDCTQEELDAYVASEVRRQFKPRSLEKKIPIDPSVRNFFRGMSAPAKEAIKLSDYERTLKKASSGKSKPVPQLGEQPNQEIEPLVTGEDFGIQDFINDTGLTTDQLLRDAPIEKAEVKYMYELGKLLVKPELLQSLPTQMYKFHQLYMEMSATGREMIGARIRDTDFLQGDDILWINFKGIYELYQLDALDVSIMSCWILMEIQRARRRGVFDTGFIDPRKVNVAMLDQYPQATKDNLVHLLKAQHYKTFILLPYNTEFHWVLLLFDLEAYTVNGEGILDVLDAKPFSGAAARTAEAPTRRCAVARRQSSRITVALAHASDSRMRCLRRPATHLLCSARSAHAGNAPRVLDEMPLPPLAPSRRTTTLVRAHHLLGAMRGPGFCTTVGSESDVEPRFTVVPGAAQEGLAPGVSEAAERVCRVVSAQPEHRIAPVLDALGVTVSPQLVAEVLKNLSNAGILALAFFRWAERQQGFRYSAEGFHNLIEALGKIKQFRLVWSLVEAMRCRSCLSKDTFKIIVRRYARARKVKEAVETFEKMSSFGLKTDLSDYNWLIDILSKSKQVKKAHAIFKEMKRKGRFIPDLKTYTVLMEGWGHEKDLLMLKAVYQEMLDAGIKPDVVAYGMLISAFCKSGKCDEAIKVFHEMEESGCMPSPHVYCMLINGLGSMERLDEALKYFQLSKESGFPMER

SEQ ID NO: 118980 - protein, 59 aa, Oryza sativa
  Clone ID: PAT_MRT4530_2223C.1.pep
KKLIFFSKTKTTAPKTWLGHYDFFDKLRAQKTLEKEKEKHNIPPITYHSLNLKKFLSKC

SEQ ID NO: 118981 - protein, 328 aa, Oryza sativa
  unsure (1)..(328): unsure at all Xaa locations
  Clone ID: PAT_MRT4530_22240C.1.pep
MEEDEVEDDNIPDFAQYARFEGNQTGEEERDADGNNVADDLGQMLQDAKEDCERAQKVGYHSGVLAMEGKXNGVSDKAIGDLLKLVKNVLPEGNKLSETTNKGNARMMRWHAEERQQDGMLRHPADGSQWRNIDRKFKDFGKDARNIQFGLSTDDMNPFREMSSGHSTWPVTMCIYNLPPWLCMKRKYIMMPIIIQGPKQPGNNIDVYLRSLVEDLKLLWKKEGVPVWDEDKQEEFNLRALLFVTINDWPALSNLSGKSNKGYKACTHYMDETESTYLKHCRKVVYMGHRRFLAANHPVWKKGKHFEHXVDHRTKPKHRRGKTVFAMV

SEQ ID NO: 118982 - protein, 54 aa, Oryza sativa
  Clone ID: PAT_MRT4530_22241C.1.pep
TSTMNYQKNNRLPSNNLQNCSEAVCCRCVVPTPLVVFLFYDFLIYLQILVLFFS

SEQ ID NO: 118983 - protein, 62 aa, Oryza sativa
  Clone ID: PAT_MRT4530_22242C.1.pep
RKYYSNLKSPNGRPSTVWGIKLILYGATNHCLYISKTPKGLQQEASGVSCRHIQGPHRIPGI

SEQ ID NO: 118984 - protein, 66 aa, Oryza sativa
  unsure (1)..(66): unsure at all Xaa locations
  Clone ID: PAT_MRT4530_22243C.1.pep
QHVYTKHPAYAYTTKSDLIXHSLTXIYPFXLKEVFLSDVRLLPLLYYGLGGGGHFSPVISTLLQHI

SEQ ID NO: 118985 - protein, 880 aa, Oryza sativa
  Clone ID: PAT_MRT4530_22244C.1.pep
MAGLFASSAVKWAIDNLSSLLPAAAAAGSNRGLDALEELRMLERTMRRIHATLRDAEQRWNIREESAKLRLEELKELAYDAEDVVEEYEYEVNRRKVEALERLAAVHGGGGASKRKREEVHEEQFSTESGIVPVPSELADRTRTVIQRFCEIKDYCDSFSLSDNDGDRRIVPDINAMRQTSSFVFAPRILGRKKDMENVIAKLLSGEGSRVGGCMSVLAIVGMGGLGKTTLAQLVYNDPRGALANEIKDKRVFLVFDDVWNERSDYWELLITPMFASKCCDIIVTTRNETVARLVQTTQMYNMNCLSPDESWSLFKQTAFTEQENISPANLVEIARMVSEKCKGLPLVIKTVGSILRFETNEIKWRDVLQSELWDLEQTQNEVLPVLELSYKHMPIDLKQCFVALSLYPKYYYLDENMVVWLWKLLGLLQGDEIGKLYFNELVQRSLLQSSIHGQKEGEEFFRLEEDKQTEVPRGARYMSIMPRSLCRKRIQISNASQSLRAIIVIMGDIDIVNPEVLFTHCKKLRIIYVVQGSVQKALLDFIGGMKLLRHLTLSGYECATHLSRPNSMSELFNLQTLDIQAYTLLKIGRLINLQTLPEIHLMKCGCFVDIRELRNMNKIRKLCIRGLRNVPSIMHADEAHLQSKRNLEVLELDFDELFLDKDFDELRSCEHTEHGDANEAAVTQSRGQLLEKLRPHYQSLKVLRIQNLNHGNYPSWLGSASFSKLTELKLQACQSQHLPTLGELPSLKSLDISRMEFVEHIGHEFCSLQQRFKGFQALQDLSFDGMTRLSECSGLEDGIKAETHRYTTNNDGGAQSQDVSAKLNTKATQKLPHRKRGVIIAEPISEQLRLHQQKQPKSMSPTTRMKQTQEGEGLTEHKV

SEQ ID NO: 118986 - protein, 890 aa, Oryza sativa
  unsure (1)..(890): unsure at all Xaa locations
  Clone ID: PAT_MRT4530_22245C.1.pep
MTYRLSKYFLYEQMADRDDEQILYDTIAEGSSQYWNEEESNEDPNKYLNEEGNVERDAEGNEEEEASGSQPSAVQKRACGQRGAAKKIEGQHIITEVDEDGRPSAPAEAAKNYVRHSDWVVRDNVHVSTVYWRRRRARGDHDRFVPDSEKEMLWTTMLETFTLPVGTENIVKMWTLKKMAEQFQSFKGDLCQKYILKGQTLNFNTLPKLRDHWDEFVAYKTGQQGQEMMDRNKENAAKKKYHHHLGSGGYSVAMPKWEEMEASLIERGIEPATAKWPDRSKFWYYAHGGTLNPVDGSLVFSDQIREAASRLMDAVEAFSQGTFQPDREKDELSLALQTPEHPARTRGKGVVPWKIGFKEDIHTYRSSMRSKRDTEVKIADLEYRASSNELSMQEEVARKVGSQSMDAMQTQDETTCPVDEITQRTPCELHIPFKNLSIKVASGMAIPTDPSGTYHCRSIPAGYSRVEVELVEAAYEDLELDYPGGDGSYTDSSSGSSYSSFCIDSSTGSCADSSSSSSSGTFQVKVSPXAPPPAHTRAXEKTKVDTAENKPPPGIFAPAKKAIKLTDYERTLKKAYYRKSKPVPQLGEQPNQEVEPLVTEEEIGIKEFISDTGLTRAQLLRGAPIPKAEVRHQYELGKPLVKPEQLQSLPTQMYKFHQLYMEMSATGREMIGARIRHMDFLQGEDIIRINFKGIYELYQLDALDVSLLSCWILMEIQRARRRGVFDSGFIDPRKVNVEMIDKYPQATEDNLIHLLKEQHYKTFTLLLYNTEFHWVLLLFDLEACIVNVYDSMDKKESTFDKVFELIDRAWYQFCHLVCGNWKEKLRRKFKFAVIRTRDNLTHKEFIAAVQEQLIGFINEQVLDPEGEFYYDGNTIHKSLASELTTSTSKS

SEQ ID NO: 118987 - protein, 95 aa, Oryza sativa
  Clone ID: PAT_MRT4530_22246C.1.pep
LQVLTGLLDLNIADQVRKALKMDAVHSVLNASAGSWPEVQAEKLLRLALRCCSLERKRRPAITCDAEWRSLDIMLRMANSPSKSRKWTSISIHAT

SEQ ID NO: 118988 - protein, 311 aa, Oryza sativa
  unsure (1)..(311): unsure at all Xaa locations
  Clone ID: PAT_MRT4530_22247C.1.pep
MQTQDETTCPVDDMTQRTPCELHIPFKNLSIKVASGMAIPTDPSGTYHYRPIPAGYSKVKVEFVEATYEDLDLDYAGGDAPTPSPPHAPAPSPPQASAPTPPQAPTPTPPQAPRPAFSKSRAXRRATKKAKVDTAKNKDPGMEIQTARRRGVFDTGFIDPRKVNVEMITKYPQATEDNLVHLLKAQHYKTFILLSYNIEFHWVLLLFDLEACVVNVYDSMDKKESTFDQCAKQAQGTNLCSYFVCEYCHCLANQIINTTELDVIRMWDNLTHKEFITAVQEQLMGFINEQILDPEGEFYCDGNTIHRSFLR

SEQ ID NO: 118989 - protein, 153 aa, Oryza sativa
  Clone ID: PAT_MRT4530_22248C.1.pep
MEEVVGVEDDDGVEFDEQEEEEDFHDLEQEFLRFHWFLLLFDLEACTVNVYDSMDKKESTFDKVFELIDRVWYQFRHLVRGKWRERLRWKFNFPFIRMKDNLTHKEFIAAVQEQLMGFINEQILDPKGEFYYDGNTIHTSLASKITTTTTSKS

SEQ ID NO: 118990 - protein, 105 aa, Oryza sativa
  Clone ID: PAT_MRT4530_22249C.1.pep
ISRCLSFICSAQSKSRELTCAAITCASIATALQTKSSPQESSMYFIRMRDNLTTHKEFITAVQEQLMGFINEEILDPKGEFYYDGNTIHRSLASELAASTTTSKS

SEQ ID NO: 118991 - protein, 567 aa, Oryza sativa
  unsure (1)..(567): unsure at all Xaa locations
  Clone ID: PAT_MRT4530_2224C.1.pep
VLALDVAAGQWKWRVTDCHPGCSXSKHGRSLYTGGTDGMVCRINASDGSVVEKFKSSSKAISALAVSPDGEILATAAGQLRTFDASDNKKIQKFSGHPVAVRSMVFSGDSQYVLSSGVGERYVAIWKLGSGKTQSSSCILSMEHPAIFVDCKCSDINDTEGEIHVLAISEIGVCYFWSGTNMDDLRNKKPTKIALSDSSLSRSKQGFAIFAAKLQGIDGPNSAHVLLAYGSVVKPSFDKLLVRYGMDISLGVSDDGVLLPMIQPTKPQKGQSAKKQGIITALDRANAEDAILPLPQLHTQEKKRKHNATESSGDIQSAPHSDLSSTKLIEKRAPMQRIEDDSVCIEDMMRKCGVIDSRVDQGMEGHPSIPTSILSDLFGSSSKIDANLPNKKIRAHLRSLKPGDACELLEKLVSSWKTRSGSAEVVLRWIYCLLIIHGRFIPFEKSKKIISDLEKWSWGVKLLATIALNDCRMWITYSDSNLKTTNAGRMCGERYKAAEDLLKLSGRLRLLMAQIVKDPNDVSELPSEEMQDSAAAQSDEEEEDDEIDETVYGEDADSSQTSDDDAE

SEQ ID NO: 118992 - protein, 620 aa, Oryza sativa
  unsure (1)..(620): unsure at all Xaa locations
  Clone ID: PAT_MRT4530_22250C.1.pep
WRRRRQPCWRPPPATSTPDHLGRTRGKGVXPWKIGFKEDIHTYRSRMRSKRDTEAKIADLEYRVSSYELSIQEEVARKVDKRMAAHRSQDPQPYIPPAMVSPSGNRSSCASTGQVGSQSMVAMQTQDETTYPVDEITQRTPCELHIPFKNLSIKVVSGMAIPTDPSGTYHCRPIPAGYSKVKVELVEAAYEDLELDYPGGDGETHLRDTSHAIILWCKRYIILPGREAASRAPSPPAPPSPPQAPAPSPPQAPAPILPQAPTPTPHQAPTQASAVTPLQAPAPTPPQAPCPSPSKSRSHQAPPPVRTRATKKVKVDAAENKEPAYNCMQEELDAYVAAEEAIKLSDYKRTLKKAYSGKSKPIPQLGEQPNQEVEPLVTGEEFGIKEFISDTGLTTDQLLRGAPIPKTEVKYKHELSKSLVKPEQLQSLPTQMYKFHQLYMEMSATGREIIGARIRDTDFLLGEDILWINFKSIYKLYQLDALDVSIMSCWILMEIQRARRWGVFDTRFIDPRKVNVSMIDKYPEAIEDNLVHLLKAQHYKTFILFPYNTQLVFTIFLPNFIPVIRMRYNLAHKEFIMAVQEQLMGFINEQVIDPQGEFYYDGNTIHKSLASEITTTTSKS

SEQ ID NO: 118993 - protein, 154 aa, Oryza sativa
  Clone ID: PAT_MRT4530_22251C.1.pep
MEGLTSEQMVAFQEAFLLFDKNGDGCITLEELAAVTRSLGLEPTDQELNDMMREVDTDGNGIIDFQEFLSLIARKMKDGDGDEELKEAFEVLDKDQNGFISPTELRTVMTNLGEKMTDEEVEQMIREADTDGDGQVNYDEFVIMMKNAERKISG

SEQ ID NO: 118994 - protein, 59 aa, Oryza sativa
  Clone ID: PAT_MRT4530_22252C.1.pep
SVSKVSARSDKIRKSQRSISLFTQGKPSTLTKKNEGKELQFIGNETTQQKHLTTCNLTQ

SEQ ID NO: 118995 - protein, 153 aa, Oryza sativa
  Clone ID: PAT_MRT4530_22253C.1.pep
FHWVLLLFDLEACPVNVYDSMDKKESTFDKIFELIDRAWYRFRHLVRGKWRERLRRKFNFPCAKQAQGTNLCGYYMCEYCHCLADQIITTRELDFIHMRDNLTHKEFIAAVQEQLMGFINEQILDPKGEFYYDGNTIHRSLAAEIMTTTTSKS

SEQ ID NO: 118996 - protein, 792 aa, Oryza sativa
  unsure (1)..(792): unsure at all Xaa locations
  Clone ID: PAT_MRT4530_22254C.1.pep
SSTGGGGRSSCVVVRPRRSPPTRSGSLSRPPYFLCRIMSDSTAMDKSWMDLSNRSLPEYQQGVDQFIQFAFKDYNADKFLRCPYRKCKNNHFFDQNNIKEHLFIHGVQKDYKLWVYHGXNVPDSEDSGNIDMDENYDNYGMDQMMNDFGEPMVVNMGSLGGSTPGLNDDMDNSTVTNEETNKFYRLLEDAEQELYPGCGTFSTLAFIALFSMLCKAFPSSSNVPKSYSDAKKTMTDLGLDYTKIDACLNDCILYRGAYDKADSCPVCGISRWKNEGHNNVSKSRRRRVKKVPXKVLRYFPLVPRLKRMYLSTKLATHMRWHKEKLVDDGYKRHPANSKEWKDFDGKFSSFALDARNIRLGLASDGFNPFGNMSSSYSIWTVVLVIYNLPPWMCMKDPYMVMSMIILGPKAPGNDIDVYLXPYASTKQTFNLRAALLWTINDFPAFENLSGISTKGKYACPSCHTETCYHRLVNGHKYCYMGHRRFLPRRHVWRNNDASFDGQKEKRSAPKPLSEDDIISQYEKFEQVFGKSGKKRKHSSTLYGTXRKKSTFFFQLPYWSKLTIRLATGAPSPCSRFSLSSLGFLXDRGKEDEEEKRRKKEGYDKWAPLHTNPKRRRDHRIIGRNMFNRWLGRRSGDHTSGHRRPHLDRRRHCRSARRGVVVDDARGDPVGHRLVXDWYRFRHLVHGKXRERLRRKFNFLCAKQKQGTNLCGYYVCEYCHCLADQIITTRELDLIRMRDNLITHKEFIVAVQEQLMGFINEQILDHKGEFYYDGNTIHRSLASEITTTTTSKS

SEQ ID NO: 118997 - protein, 76 aa, Oryza sativa
  Clone ID: PAT_MRT4530_22255C.1.pep
SKGGKKKSSSSRSLMYEAPLGYSIEDVRPAGGVKKFQSAAYSNVSIKYRFNSLLCIFRCVANHVNCSFCCSARRSH

SEQ ID NO: 118998 - protein, 160 aa, Oryza sativa
  Clone ID: PAT_MRT4530_22256C.1.pep
QKRDLSTNTKTDVQHTQHHSEHHPSKEPENHSFDNCRLHQAQPITGSGSPIHHHLGRVVILLLLGDDPDSVDDAGEVAEEGEQQADPELNPAAELEEDAERRQDDGEDDVDAGRRAVRHSSACSQLTTMHNCTNKKKKKNQRLSSKLRRRERSQESRPVG

SEQ ID NO: 118999 - protein, 66 aa, Oryza sativa
  Clone ID: PAT_MRT4530_22257C.1.pep
MWLREDEDGELRELTGNWKYSFLVDDQQMIKFMVDGKCNQLEIKWLTFAFDAAVHRLCEMRVWRRR

SEQ ID NO: 119000 - protein, 103 aa, Oryza sativa
  Clone ID: PAT_MRT4530_22258C.1.pep
RTKQSNKKVKRWRISPGRARLHLAAFISHRLPSQTNTCLFCTLCPHSCAPERQFPVGHPSQIALGQACLTLEFFGNRLSEKKLQLVDMSIILILLNPRLGCHT

SEQ ID NO: 119001 - protein, 2051 aa, Oryza sativa
  unsure (1)..(2051): unsure at all Xaa locations
  Clone ID: PAT_MRT4530_22259C.1.pep
MDRQWMYADRRSKEFIDGMQYFLRVAEANRQRGFICCPCNKCKNQKEYSTSRIIHFHLFESGFMPSYNCWTSHGEQGVEMEEDEVEDDNIPDFAQYVGFEENQTGEEEIAADGNDVADDLGQMLQDAREDCESEKEAHKLDKMLEDHRISLYPGCEQGHKKLDTILEFLQWKAKIGVSDKAFGDLLKLIKKILPGGNKLPETTYEAKKIVCPLGLEVHKIHACPNDCILYRGEEYENLEACPVCKALRYKIRRDDPGEVDGQLTKKRIPAKVMWYFPIIPRLRPLFRNKGNARMLRWHAEECQQDGMLRHPADGLQWRNIDRKFKEFGKDARNIRFGLSTDGMNPFGEMSSGHSTWPVTMCIYNXPPWLCMKRKYIMMPIIIQGPKQPGNDIDVYLRPLVEDLKQLWKKEGVPVWDEDKQEEFNLRALLFVTINDWPALSNLSGQSNKGYKACTHCMDETESTYLKHCRKVVYMGHRRFLAANHPVRKKGKHFEHKADHRTKPKHRSGKTVFAMVKDLKVVFGKGLGSQPIESEDGHAAMWKKNSIFWELPYWEFLDVXHDCHVLMTQLLTAVIRGILPDNVRATITKLCAFMNAISXKVIDPDRLEALQNEVVQCLVSFELIFPPSFFNIMTHLLCHLVKEICILGPVYLHNMFPFERYMGVLKKYVRNHARPEASIAKGYETEEVIEFCVEFIENLRPIGVPESRHEGRLRGKGTLGRKAIMTVDNNLFRKAHFTVLQHSSLVAPCIEEHLALVRARNIGKSDAWITRHQIDTFPTWLRQHLMGNESINQQLAFLARGPSGSIATFQGYEINGYTFYTRAQDMKSTNQNSAVRVDAMGHDGTTATYYGAIEDIWELDYGPLKVPLFRCQWVRLTGGGVMIDDSGMTTVDLNKIGYSDEPFVLANDVTQVFFVKDMSSKGKKGRGPDEPKRQVVLPARPHLLHQQLXIFGRSISLGLSPXSPPLPRANPRADAAVSRRRLELVVLAATSVSSAAAASLGCFXYQQMADRDEEQILYNTIAEGSSQYWNEEEGNEDPNQYLNEEGNVERDAEGNQQGHVERDVEGNQEEEASGSQPSVGQKRARGQRGAAKKLEGRHIITEVEEDGRPSAPAEATKNYVRHSGWVVRDNVPVSTVYWRRTRACGDHESFVPDSEKEMLWTTMLETFTLPAGTEDKVIRWTLKKMAEQFQSFKGELYKKYILKGQTPNFDTFPKLRDHWDEFVAYKTGEQGXAMMERNKENAAKKKYHHHLGSGGYSVAMPKWEEMEASLIERGIEQATANWPERSKFWYYAHGGTLNPADGSLVFGDQIREAARRLTDAVEASSQGTFRPDRDRDELTLALQTPEHSGRTRGKGVIPWKIGFKEDIHTYRSRMRSKRDTEAKIADLEFRVSSYELSMQEEGARKVDERMAAHRSHDPQPTIPPAMVSPLGNRSSCASTGQVRSQSMDAMQTQDESTCLVDDITQRTPCELHIPYKNLSIKVASGMAILTDPSGTYHCRPIPAGYSKVEVELVEGAYEDLELDYPGGDGETHLRDTSHAIILWRRRYIILPGRQAASRAPSPLAPPSPPQDPAPSPPHDLPAPTPPQDPAPTPPRASTPTPPQAPLPAPSKSRAPPAPPPAHTRETKKAKVDAAKNKDPGYDCTQEELDAYVASEVKRQFKPRSPEKKILIDPSVRNFFRGMSASVKEAINLSDYERTLKKASSGKSKPVPQLGEQPNQEIEPLVTGKEMTIEQFITDTGLTTDQLLGVAPIEKAEEKYMYELGKPLVKLELLQSLPTQMYKFHQLYMEMSATGREMIGARIRDTEFLQGDDILWINFKGIYELYQLDALDVSIMSCWILMEIQRARRWRVFDTGFIDTRRVNVAMLDQYPQETKDNLVHLLKAQHYKTFILLPYNTEFHWVLLLFDLSACTVNVYDSMNKKESTFDKVFEPIDRAWYRFRHLVHGKWRERLRRKFKFPFIRTRDNLTTHKEFIAAVQEQLMGFINEEILDPKGEFYYDGNTIHRSLASELAASTTTTSKSKLIFFKTRDACTLTHMNADTHGSNNPMNKIK

SEQ ID NO: 119002 - protein, 60 aa, Oryza sativa
  Clone ID: PAT_MRT4530_2225C.1.pep
FPLFFRFFVHPCLAYCCSSRFLPVCLTLMFALWPSCSACSPTYALLLFFGCFPVLFYLSL

SEQ ID NO: 119003 - protein, 131 aa, Oryza sativa
  Clone ID: PAT_MRT4530_22260C.1.pep
MNISCVVSAIRLNNGFFFMSIIFQRNLVIDLPMVHMYGVGLGVQSPACDVCQDRLLQNTAYKYWTADIIGQSVASLNVTSGRSWTYNLWMARSGSARRRLPWTPKYCEHYMPVRSGVIVHFFFFFSNAIFQ

SEQ ID NO: 119004 - protein, 2003 aa, Oryza sativa
  unsure (1)..(2003): unsure at all Xaa locations
  Clone ID: PAT_MRT4530_22261C.1.pep
IDRQWMYADRRSEEFIDGVHYFLRVAEANMHKGFICCPYNKCKNQKKYSASRIIHFHLFKSGFMPSYNCXTSHGEQGVEMEEDEVEDDNILEFAQYAGFEGNQTGKEERDADGNDVADDLGQMLQDAKEDYESENGAHKLDKMLEDHTTSLYPGCEQGHKKLDTTLEFLQWKAKNGVSDKAFGDLLKLVKNILPEGNKLPETTYEAKKIVCPLGLEVQKIHACPNDCILYRGEEYENLEACPVCKALRYKIRRDDPGEVDGQLTKKRIPAKLMWYFPIIPRLRRLFRNKGNARMMRWHAEEHQQDGMLRHPADGSQWRNIDRKFKDFGKDARNIRFGLSMDGMNPFREMNSGHSTWPVTMCIYNLPPWLCMKRKYIMMPIIIQGPKQPGNDIDVYLRPLVEDLKLLWKKEGVPMWDEDKQEEFNLRALLFVTINDWPALSNLSGQSNKGYKACTHCMDETESTYLNHCRKVVYMGHRRFLAANHPIRKKGKHFEHKADHRTKPKYRSGKTVFAMVKDLKVVFGKGPRSQPIESEDGHAEMWKKKSIFWELPYXEFLDVRHAIDITKNLCVNLLGFIGVYGMSKDTLEARNDLKHMEQRSDLHPEPKEKGSHYLSPASYTLSKAEKESMFECLESIKVPSGYSTNIKRIKSTKEKKFTNLKSHDCHVLMTQLLPVVIRGILPDNVRATITKLCAFMNAISQKVIDPDRLEALQNDVVQCLVSFELIFPPSFFNIMTHLLCHLVKEIGILGPVYLNNMFPFERYMGVLKKYVHNRARPEASIAKGYGIEEVIEFCVEFTEDLRPIGVPESRHEGRLRGKRTLGRKAIMTVDNNLFRKAHFTVLQQSSLVAPYIEEHLALVRARNIGKSDAWITRHHIDTFPAWLRQHLMGNETINQQLAFLARGPSGSIVIFQGYEINGYTFYTRAQDMKSTNQNNAVRNDAMGHDEKTGTYYGAIDDIWELDYGPLKVPLFRCQWVGLTGGGVTIDDNGITTVDLNKVGYSDEPFVLANDVTQVFYVKDMSSKGKKGRGPDEPKRHVVLPARPRHLHQHLEVFSXDRSLSASPSPPLPRASPCRXAVVSRHRLAGVIVAASAAAASLGLSKYFLYEQMADRDKEQILYDTITEGSSQYWNEEEGNEDPNQYLNEEGNMERDAEGNQEGNVERDAEGNEEEEASASQPSTGQKRARGQRGAAKKIEGRHIITEVVEDGRPSAPAEAAKNYVRHSGWVVRDNVPVCTVYWRRTRARGDHESFVPDSEIEMLWTTMLETFTLPAGTEDKVKRWTLKKMAEQFQSFKGDLYEKYTLKGQTLNIDTFPKLRDHWDEFVAYKTGQQGRXMMERNKENAAKKKYHHHLGSGSYSIAMPKWEEMEASLLERGIEPATAKWPDQSEFWYYAHGGTLNPVDGSQVFSDQICEAARRLTDAVEASSQGTFRPDREKDELSLALQTPEHPGRTRGKWVIPWKIGFKEDIHTYRSRMRSKRDTEAKITDLEYRVSSYELSMQEEVARKVDERMAAHRSHDPQPYIPPAMVSPSGNGSSCSSTGQVGSQSMDAMQTXDETTCPVDDIAQRTPCELHIPFKNLSIKVASGMAIRTDPSGTYHYRPIPAGYSKVKVELVEGAYEDVELDYPGGDGETHLRDTSHTIILWRKRYIILPRRQAASRAPSPPVPPSPPQALAPSPPRAPAPSPPQAPAPTPPQAPTPTPPQALRPAPSKSRAPQAPPPAPTRAPKKAKVDAAKNKDPGYDCTQEELDAYVASEVRRQLKPRSPEKKILIDPSVSNFFRGMSAPPKEAIKLSDYERTLKKASSGKSKPVPQLGEQPNQEIEPLVTGEDFGIQEFINDTGLTTDQLLRGAPIEKAEVKYMYELGKPLVKPEQLQSLPTQMYKFHQLYMEMSATGREMIGAWIRDTDFLXGDDILWINFKGIYELYQLDALDVSIMSCWILMEIQRARRWGVFDTGFIDPRKVNVAMLDQYPQATEDNLVHLLKAQHYKTFILLPYNTELVFTIFL

SEQ ID NO: 119005 - protein, 2199 aa, Oryza sativa
  unsure (1)..(2199): unsure at all Xaa locations
  Clone ID: PAT_MRT4530_22262C.1.pep
MDRQWMYADRRSEEFIDGVHYFLRVAEANKQKGFICCPCNKCKNQKEYSASRTIHFHLFESGFMPSYNCWTSHGEXGVEMEEDEVEDDNIPDFAQYAGFEGNQTGEEDRDADYNDVADDLGXMLQDAKEDCESEKGAHKLDKMLEDHRTSLYPGCEQGHKKLDTTLEFLQWKAKNGVSDKAFGDLLKLVKNILPEGNKLPETTYEAKKIVCPLGLEVQKIHACSNDCILYHGEEYENVEACPVCKALRYKIRRDDPGEVDGQLTKKRIPAKVMWYFPIIPRLRSLFRNKGNARMMRWHAEERQQDGMLRHPADGSQWRNIDRKFKDFGKDARNIRFGLSTDGMNPFGEMSSGHSTWPVTMCIYNLPPWLCMKRKYIMMPIIIQGPKQPGNDIDVFLRPLVKDLKLLWKKEGVPVWDQDKQEEFNLRALLFITINDWPALNNLSGQSNKGYKACTHCMDETESTYLKHCRKVVYMGHRRFLAANHPVRKKGKHFEHTADHRTKPKHRSGKTVFAMVKDLKVVFGKWPGSQPIESEDGHAAMWKKNSIFWKLPYWEFLDVRHAIDVMHLTKNLCVNLLGFLGVYGKSRDTLEARNDLKHMEQRGDLHPEPKEKGIHYLSPASYTLSKAEKESMFQCFESIKVPSGYSTNIKRIISTKEKKFTNLKSHDCHVLMTQLLPVIIRGILPDNVRATITKLYSFMNAISQKVIDPDRLEALQNDVVQCLVSFELIFPPSFFNIMTHLLCHLVKEIGILGPVFLHNMFPFERYMGVLKKYVRNRARPEASIAKGYGTEEVIEFCVEFIEDLRPIGVPESRHEGRLQGKGTLGRKAIMTVDNNLFRKAHFTVLQQSSLVAPYIEEHLALVRARNIGKSDAWITRHHIDTFLAWLRQHLMGNETINQQLAFLARGLSGSIATFQGYEINGYTFYTRAQDMKRTNQNSAVRIDAMGHDGTTGTYYGSIEEIWELDYGPLKVPLFRCQWVRLTGGGVTIDDSGMTTVDLNMVGYSDEPFVLANDVTQVFYVKDMSSKGKKGNGPDEPKRHVVLPVRPRLLHQHLDVFXRDRALASPSPPSSSIGFSFAAVVSHRRLPVLAASATDAAAASLGCFFYEQMADRDEEQILYDTIASGSSQYWNEEEGNNDPNQYLNEEGNAERDAKGNEEGNVERDAEENEEEASGSHPSAGQKRARGQRGAAKKIEGRHIITEVDADGRPNAPAQAAKNFVRHSGXWLRDNVPVSKVYWRRTRARGDDDSFVPESEKEMLWTTMLETFTLLAGTENIVKQWTLKKMAEQFQTFKGDLYRKYILKGQTPNFDVFPKLRDHWDEFVAYKTGQQGHAMMERNKXNAAKKKYYHHLGSGGYSVAMPKWEKMEASLLEKGIELATAKWPDRLKFWYYAHGGTLNPGDGSLVFSDQIREAANRLTDAVEASSQGTFRPDREKDELSLALQTPEHPGRTRGKGVIPWKMGFKEDIHTYRSRMRSKRDTEAKIADLVYRVSSYELSMQEEVARKVDERMAAHRSHDPQPYIPPPMVSPSGNRSSCASTGXVVSHSMNAMQTQDETTCPVDEITHRTPCELHIPFKNLSIKVASGMAIPTDILGTYHCRPIPVGYSRVEVELVEAMYEDLELDYPGGDGETHLRDTSHAIILWREQYIILPRRPAASRAPSPPAPPSPPAPSPPAPPPSPPAPSPPAPPPPPPAPSPPAPPSPPAPSPPAPPPPPPAPSPPAPPPPPPPASTRATKKAKVETTKNKEPPYGCCQEELDAYVAGEVKRQLKPRSPEKKIPIDPSVKNFFKGMSTANKEALKLSDYDRTLRKAYYKKSKPVPQLEEQPHQVTGEDFGITDFISDTGLTMAQLVGGAPIPKAEVAYKFELGKPLVRPEQLQSLPTQMYKFHERYMEMSANGREMFGARIRNPDFLQGEDVLWIHFKDVFDLYHRDALDVSLLSAWILMEIQRARRRRVYDTGFIDPRKIXTEMLDKYEKDIEDNLVHLLTQQHYKTFILLLYNTEFHWVLFFFDLDACRVTVYDSMNKEEKVFDKVFQLIDRAWDRFRQLVRGTWKEKLGRRFHFPRIHMREKLPHKDFIMAVQEQLMGFINEEVLNPDGEFYYDGSTIRNVGPSSSDVTQASKPPRPKPPPRPRLRLLRATSTTPARAPRSPRPLPSLSRSRPRPRWPGFDFRIPPLSPPPLLPRWPAKSRLSRPRPALPSPI

SEQ ID NO: 119006 - protein, 64 aa, Oryza sativa
  Clone ID: PAT_MRT4530_22263C.1.pep
NWVQNIKDHKISHHNNLTVTDDHTEVISTETDIGQPYQIMAMKDICSSSLHIFEQSEGWMIKVA

SEQ ID NO: 119007 - protein, 1023 aa, Oryza sativa
  unsure (1)..(1023): unsure at all Xaa locations
  Clone ID: PAT_MRT4530_22264C.1.pep
MADRDEEQILYDTIAEGSSQYWNEEEGNEDPNQYLNEEGNVERDAEGNEEGNVERNAEGNEEEASGSHPSAGQKRARRQRGAAKKIEGRHIITEVDADGRPSAPAEATKNFXVRHSGWVVRDNVPVSKTRARGDNDSFVPESEKEMLWTTMLKTFTLPAGTENIVKXWTLKKMAEQFXTFKGDLYKKYILKGLTPNFDVFPKLRDHWDEFVAYKTGQQGQAMMVKNKXNVAKKKYHHHLGSGGYSVAIPKWEEMEARMIERGIEPATAKWPDRSKFWYYAHGGTLNPVDGSLVFSDQIREAASRLTDAVEASSHGTFQPDREKDELSLALQTLEHPGRTRGKGVIPWKIGFKEDIHTYKSRMRSKRDTEAKIADLEYRVSSYELSMQEEVVRKVDERMAAHRSHDPQPYIPPPMVSPSGNRSSCASTGQVESHSMDAMQTQDETTCPVDEITQRTPCKLHIPFKNLSIKVASGMAIPTDISGTYHYWPIPAGYSRVEVELVEAVYEDLELDYPGGDGETHLRDTSHAIILWRKRYIILPGQQAASRAPSPPAPPSPPAPSPPAPLPPPPAPSPPAPLPPPPAPSPPAPPPPPPPPPPCPPAPPKTRSRQAPPPASTRATKKAKVDTTKNKEPPYGCSQEELDAYVAGEVKRQLKPRSPEKKIPINPSVKNFFKGISTANKEALKLSDYDRTLRKAYYKKSNPVPQLGKQPHQVVEPLVTGEDFGITDFISDTGLTVALLVGGAPIPKAEVAYKFELGKPLVRPERLQSLPTQMYKFHERYMEMSANGREMFGARIRNPDFLQGEDVLWIHFKDVFDLYHRDALDVSLLSAWILMEIQRARRRGVYDTGFIDPRKINTEMLDKYEKDTEDNLVHLLTQQHFKTFILLSYNTEFHWVLFFFDLDACRVTVYEEKVFDKXVFQLIDRAWDRFRQLVRGTWKEKLGSRFHFPRIHMREKLPHKEFITAVQEQLMGFINEEVLNPDGEFYYDGSTIHNSFSPSLSVCTVNRPPPLRECDTSLYVCHVE

SEQ ID NO: 119008 - protein, 2369 aa, Oryza sativa
  Clone ID: PAT_MRT4530_22265C.1.pep
MDRQWMYADRRSKEFIDGVHYFLKVAEASRQRGFICCPCNKCKNQKEYSASRTIHFHLFESGFIPSYNYWTSHGEQGVEMEEEEVEDDNIPDFAQYVGFEGNQTGEEEIAADGNDVADDLGQMLQDAREDCESEKEAHKLDKMLEDHRTSLYPGCEQGHKKLDTTLELLQWKAKNGVSDKAFGDLLKLVKNILPGGNKLPETTYEAKKIVCPLGLEVHKIHACPNDCILYRGEEYENLEACPVCKALRYKIRRDDPGEVDGQLTKKRIPAKVMWNKGNARMLRWHAEERQQDGMLRHPADGSQWRNIDRKFKEFGKDARNIRFGLSTDGMNPFGEMSSGHSTWPVTMCIYNLPPWLCMKRKYIMMPIIIQGPKQPGNDIDVYLRPLVEDLKQLWKKEGVPVWDEDKQEEFNLRALLFVTINDWPALSNLSGQSNKGYKACTHCMDETESTYLKHCRKVVYMGHRRFLAANHPVRKKGKHFEHKADHRTKPKHRSGKTVFAMVKDLNVVFGKGPGSQHIESEDGHAAMWKKNSIFWELPYWEFLDVCYAIDVMHLTKNLCVNLLGFLGVYGKSKDTLEALVIRGILPDNVQATITKLCAFMNAISQKVIDLDRLEALQNEVVQCLVSFELIFPPSFFNIMTHLLCHLVKEIRILGPMYLHNMFPFERYMGVLKKYVRNRARPEASIAKGYGTEEVIEFCVEFIEDLRPIGVPESRHEGRLRGKGTLGRKAITTVDNNLFRKAHFTVLQHSSLVAPYIEEHLALVRARNIGKSDAWITRHHIDTFPAWLRQHLMGNESINQQLAFLARGPSGSIATFQGYEINGYTFYTRAQDMKSTNQNSDVRVDAMGHDGTTVTYYGAIEDIWELDYGPLKVPLFRCQWVRLTGGGVMIDDSGMTTVDLNKVGYSDEPFVLANDVTQVFFVKDMSSKGKKGRGPDEPKRQVVLPMADRDEEQILYDTIAEGSSQYWNEEEGNEDPNQYLNEEGNVERDAEGNQQGHVERDVEGNQEEEASGSQPSVGQKRARGQRGAAKKLEGRHIITEVEEDGRPSAPAEAAKNYVRHSGWVVRDNVPVSMVYWRRTRARGDHESFVPDSEKEMLWTTMLETFTLPAGTEDKVKRWTLKKMVEQFQRFKGDMYQKYILKGQTLNFDTFPKLRDHWDEFVAYKTGEQGQAMMERNKENAAKKKYHHHLGSGGYSVAMPKWEQMEASLIERGIEPATANWPKRSKFWYYAHGGTLNPADGSLVFGDQIREAARRLTDAVEASSQGTFRPDRDKDELTLALQTPEHPGRTRGKGVIPWKIGFKEDIHTYRSRMRSKRDTEAKIADLEFRVSSYELNMQEEVARKVDERMAAHRSHDPQPTIPPAMVSPSGNRSSCASTGQVGSQSMDAMQTQDESTCPVDDITQRTPCELHIPFKNLSIKVASGMAIPTDPSGTYHCRPIPAGYSKVEVELVEGAYEDLELDYPGGDGETHLRDTCHAIILWRRRYIILPGRQAASRAPSPPAPPSPPQDPAPSPPHAPPAPSPPQAPASTPPLDPAPTPPRAPTPTPPQAPLPAPSKSRAPPAPPPAHTRATKKAKVDAAKNKDPGYDCTQEELDAYVASEVKRQFKPRSPEKKIPIDPSVRNFFRGMSASVKEAIKLSDYERTLKKASSGKSKPVPQLGEQPNQEIEPLVTGKEMTIEQFITDTGLTTDQLLGVAPIEKAEVKYMYELGKPLVKPELLQSLPTQMYKFHQLYMEMSATGREMIGARIRDTDFLQGDDILWINFRGIYELYQLDALDVSIMSCWILMEIQRAQRRRVFDTGFIDPRKVNVAMLDQYPQETEDNLVHLLKAQHYKTFILLPYNTEFHWVLLLFDLEACTVNVYDSMDKKESTFDKVFELIDRAWYRFRHLVRGKWRERLRRKFKFPFIRMRDNLTTHKEFIAAVQEQLMAFINEEILDPKGEFYYDGNTIHRSWPPGFTGSTARKPPRALAWDHFRRRMERTWMNCKLFSKEHPEGVTEFMDFVSKNLSGSQKILCPCRRVEDDLLMYGMSNTYTRWIHHGEPLVMVTENVEHLNEDVSCNVEFETNEPQDDPEDDQMYRMVQDLYPDQNHGPRTKSKFATILEEMKQVLHPGGPYTRFSFVVKLLHIKSFYRISNVAFSAFLDLLSSAFPNCSLPASYAEAKNFIRALGLGYESIHVCPNNCVLFRKELAKMDACPICGASRWRDADSRRQIPEKVLRHFPLRGEIPIILCKLEKIFPPAFFDVMVHLCIHLIDDAILRVPVQYGWMYPVERRLLTLKRFVRKMARPEGSIAEAYVANECLTACSRYFADVDTRHNRDGRNKERVPMSRCGLSIFQHGANLLGAPPGHIEWRMEIHNKNIEHSTYIVDFD

SEQ ID NO: 119009 - protein, 2115 aa, Oryza sativa
  unsure (1)..(2115): unsure at all Xaa locations
  Clone ID: PAT_MRT4530_22266C.1.pep
YTRQWMYADRRSKEFIDGVHYFLRVAEANGQRGFIRCPCNKSKNQKKYSASRTIHFHLFESGFMPSYNCWTSHREQGVEMEEDEVEDDNIPDFAQYVGFEGNQTGEEERDADGNDVADDLGQMLQDAKEDCESEKGAHKLDKMLEDHRTSLYPGCEXGHKKLDTTLEFLQWKAKNGVSDKTFGDLLKLVKNILPEGNKLLETMYEAKKIVCPLGLEVQKIHICPNDCILYRGEEYENLEACPVCKALRYKIRRDDPGEVDGQLTKKRIPTKVMWYFPIIPRLRRLFRNKGNARMMRWHVEERQXDRMLRHPADGSQWRNIDRKFKEFGKDARNIRFGLSTDGMNPFGEMSSGHSTWPVTMCIYNXPPWLCMNRKYIMMPIIIQGPKQPGNDIDVYLRPLVEDLKLLWKKEGVPVWDEDKQEVFNLRALLFVTINDWPALSKLSGQSNKGYKACTHCMDETESTYLKHCRKVVYMGHRRFLAANHPVRKKDKHFEHKADHRTKPKHRSGKTVFAMVKDLKVVFGKGPGSQPIESEDGHAAMWKKNSIFWELPYWEFLDVRHAIDVMHLTKNLCVNLLGFLGVYGKSKDTLEARNDLKHMEQRGDLHPEPKEKGSHYLSPASYTLSKAEKESMFECLESIKVPSGYSTKEKMFTNLKSHDCHVLMIQLLPVVIRGILPDNVRATITKLCAFMNAISXKVIDPDRLEALXNDVVQCLVSFELIFLPSFFNIMTHLLCHLVKEISILGPVYLHNMFPFERYMGVLKKYVRNRARPEASIAKGYETEEVIEFCVEFIEDLRPIGVPESRHEGRLQGKGTLGRKAIMTVDNNLFRKAHFTVLQQSSLVAPYIEEHLALVRARNIGKSDAWITRHHIDTFPAWLLQHLVGNESINQQLTFLARGPSWSIATFQGYEINGYTFYTRAQDMKSTNQSSAVRVDAMGHDGTTGTYYGAIEDIWELDYGPLKVPLFRCQSVRLTGGGVMIDDSGMTTVDLDKVGYSDEPFVLANDVTQVFYVKDMSSKGKKGRGPDEPKRHVVLLARPRLLHQHLEVFARSISLXSPSPPLPRAXPISRRRLALVVVAAASASSTAAPHLRCFLYEQMADRNEEQILYDTIAEGSSQNWNEEEGNKDPNQYLNEEGSVERDAEGNQEGHVERDVEGNQEEEASGSQPSVGQKRGRGQRGATKKLEGRHIITEVDEDGRPSAPAEAAKNYVRHSGWVARDNVPVSTVYWRRTRARGDHESFVPDSEKEMLWTTMLETFTLPAGTEDKVKRWTLKKMAEQFRSFKGDLYQKYILKGQTPNFDTFPKLRDHWDEFVAYKTGEQGQAMMERNKENAAKKKYHHHLGSGGYSVAMPKWEEMEASLLERGIEPATANWPERSKFWYYAHGGMLNPADGSLVFGDQIREAARRLTDTVEASSXGTFRPNREKDELSLTLQTPEHPGRTRGKGVIPWKIGFKEDIHTYRSRMRSKRDTEAKIADLEFRVSSYELSMQEEVARKVDECMAAHRSHDPQPTIPPAMVSPSGNRSSCASKGQVGSXSMDAMQTQDESTCPVDDITQRTPCELHIPFKNLSIKVASGMAIPTDPSGTYHCRPIAAGYSKVEVELVEDAYEDLELDYPGGDGETHLRDTSHTIILWRKRYIILPGRQAASRAPSPLAPPSPPQAPAPSPPHAPAPSPPQAPAPTPPXAPALTPLQAPAPTPPXAPLPAPSKSRATQAPPPAPTRAIKKAKVDTAKNKDPGYDCTQEELEAYVASEVNRQFKPRSPEKKIPIDPSVRNFFRGMSAPAKEAIKLSDYERTLKKASSGKSKPVPQLGEQPNQEIEPLVTGEDFGIQEFINDTGLTTDQLLGDAPIEKAEVKYMYELGKPLVKPELLQSLPTQMYKFHQLYMEMSATGREMIGARIRDTDFLQGDDILWINFKGIYELYQLDALDVSIMSCWILMEIQRAXRRGVFDTGFIDPRKVNVAMLDQYPQATEDNLVHLLKAQHYKTFILLPYNTEFHWVLLLFDLEACNVNVYDSMDKKESTFDKVFELIDRAWYRFYHLVRGKWRERLRRKFKFPFIRMRDNLITHKEFIAAVQEQLMGFINKQILDPKGEFYYDGNTIHRSLASELATTTTSKS

SEQ ID NO: 119010 - protein, 265 aa, Oryza sativa
  Clone ID: PAT_MRT4530_22267C.1.pep
MEPASSSSPAPAPEAAAAGRRVPEAAELKLRRRTLETVLEQCQRALEMMREADLGIAVSEEEEEEEGADAVAANPEVGGSDGCDEEGAPPPSPPSEADYETDELCDLLKSRVASPEFLEKLDNIQKSVYQNGAVDETISWDIISAADIWDDIDKGMNISDDSEDGYVLIKQEDIVDGIASFMAAYLLSLKQTKDLTPNQLQQALSKTFSAKKRKSKLQKAWDGTKVIYNIASWSATAIGIYQNPAILKAATAAFWTSCRVASKFL

SEQ ID NO: 119011 - protein, 2042 aa, Oryza sativa
  unsure (1)..(2042): unsure at all Xaa locations
  Clone ID: PAT_MRT4530_22268C.1.pep
MDRQWMYADRRSKEFIDGVHYFLRVAEANRQRGFICCPCNKCKNQKEYSASRTIHFHLFESGFMPSYNCWTSHGEQGIEMEEDEVEDDNILDFAQYVGFEENQTDEEEIAADGNDVADDLGQMLQDAREDCESEKEAHKLDKMLEDHRTSLYPGCDKAFSNLLKLVKNILPGGNKLPETTYEAKKIVCLLGLEVHKIHACPNDCILYHGEEYENLEACPVCKALRYKIRRDDLGEVDGQLTKKRIPAKVMWYFPIIPRLRRLFRNKGNARMLRWHAEERQQDGMLRHPADGSXWRNIDRKFKEFGKDARNRRFGFSTDGMNPFGEMSSGYSTWPVMMCIYNXPPWLCMKRKYIMMPIIIQGPKQPGNDIDVYLRPLVEDLKQLWKKEGVPVWDEDKQEEFNLRALLFVTINDWPALSNLSGXSNKGYKACTHCMDETKSTYLKHCRKVVYLGHRRFLATNHPVRKKGKHFEHKADHRMKPKHRSGKTVFAMVKDLKVVFGKGPGSQPIESEDGHAAMWKKNSIFWELPYWEFLDVRHAIDVMHLTKNLCVNLLGFLGVYEKSKDMERNDLKHMXRATITKLCAFMNAISXKVIDPDRLEALQNEVVQCLVSFELIFPPSFFNIMTHLLCHLVKEIRILGPVYLHNMFPFERYMGVLKKYVRNRAHPEASIAKGYGTEEVTEFCVEFIEDLRPIGVPESRHEGRLRGKGTLGRKAIMTVDNNLFRKAHFTVLQHSSLVAPYIEEHLALVHARNIGKSDAWITQHHIDTFPTWLRQHLMGNESINQQLAFLARGPSGSIATFXGYEINGYTFYTRAQDMKSTNQNSAVRVDAMGHDGTTATYYGAIEDIWELDYGPLKVPLFRCQWVRLTGGGVMIDDSGMTTVDLNKVGYSDEPFVLANDVTQVFFVKDMSSKGKKGRGPDEPKRQVVLPARPHLLHQHLXVFGRSISLGLSPSPPLPTANPRADAAVSRRRLELVVLAAASASSAAAASLRYFLYQQMADCDEEQILYDTIAEGSSQYWNEEEGNEDPNQYLNEEGNVERDAEGNQQGHVERDVEGNQEEEASGSQPSVVQKRARGQRGVAKKLEGRHIITXVKEDGRPSAPAEAAKNYVRHSGWVVRDNVTVNTVYWRRTRARGDHESFVPDSEKEMLWTTMLETFTLPTGTEDKVKRWTLKKMAEXFQSFKGELYKKYILKGQTPNFNTFPKLRDHWDEFVAYKTGEQGQAMMERNKENATKKKYHHHLGSGGYSVAMPKWEEMEANLIERGIEPATANWPERSKFWYYAHGGTLNPADGSLVFGDQIREAARXLTDAVEASSQGTFRPDRDRDELTLALQTPEHPGRTRGKGVIPWKIGFKVDIHTYRSRMRSKRDTEAKIADLEFRVSSYELSMQEEVARKVDERMAAHRSHDPQPTIPPAMVSPSGNRSSCASTGQVGSQSMDAMQTQDESTCPVDDITQRTPCEPHIPYKNLSIKVASGMAIPTNPSGTYHCRPIPAGYSKVEVELVEGAYEDLELDYPGGDGETHLRDTSHAIILWRRRYIILPGRQAASRAPSPPAPPSPPQDPAPSPPHDPPAPSPPQAPAPTPPQDPAPTPPRAPTPTPPQASLPAPSKSRXPPAPPPAHTRATKKAKVDAAKNKDPGYDCTQEELDAYVASEVKRQFKPRSPEKKIPIDPSVRNFFRGMSASVKEAIKLSYYERTLKKAYSGKSKTVPQLGEQPNQEIEPLVTGKEMTIEEFITDTGLTTDQLLGVAQIEKAEVKYMYELGKPLVKPELLQSLPTQMYKFHQLYMEMSATGREMIGARIRDTDFLQGDDILWINFKGIYELYXLDALDVSIMSCWILMEIXRARRRRVFDTGFIDPRRVNVAMLDQYPQETEDNLVHLLKAQHYKTFILLPYNTEFHWVLLLFDLSACTVNVYDSMDKKESTFNKVFELIHRAWYRFRHLVRGKWRERLRRKFKFPFIRMRDNLTTHKEFIAAVQEQLMGFINEEILDPKGEFYYDGNTIHRSLPPGGTAVTGGNRGNRAKPRQIYKSKFEFKNSGKPRDV

SEQ ID NO: 119012 - protein, 61 aa, Oryza sativa
  Clone ID: PAT_MRT4530_22269C.1.pep
TIAADDTIQSGESRLPLNSRNGTVTPNNAVRQLIWKQKRTFAWCHSCKQPIKEHVKKCVLI

SEQ ID NO: 119013 - protein, 234 aa, Oryza sativa
  unsure (1)..(234): unsure at all Xaa locations
  Clone ID: PAT_MRT4530_2226C.1.pep
ISALTDKTSSREAAGEQVSPTHALRHSANKARRQGLRARRFRPPTPFAIVPIRYGVKGSGRRGFATRHALRHSTNKARRFRHTHNLRHSTNKVRFATPTPFAIVPIRYGVKGWGRKXESSKLGGYKATLASGAFCHTHTLRXKYPQGTATRTVGENELLPSWRATRPPXASGAFRHTHDLHHSIRKFITDNNKRFDSEKSKEMCEGLKLEIKFALVAHPQTNGAAERDEWQNPS

SEQ ID NO: 119014 - protein, 1830 aa, Oryza sativa
  unsure (1)..(1830): unsure at all Xaa locations
  Clone ID: PAT_MRT4530_22270C.1.pep
AAAAFAAARAMPPPPRHAAAATAPQRHAXPPPRRRANRRPDAATPPLTNENENDRTNESENEHVNVRCRENVNENENDRTNESENEHVNVRCRENVNENENDRTNESENENDRTKTSENEGTNVNENKRTNMNENERTNVNELGNMADRNEEQILYDTIAEGSSQYWNEEEGNEDPNQYLNEEGNVERDAEGNQQGHVERDVEGNQEEEASGSQPSVGQKRARGQRGAAKKLEGRHIITEVKEDGRPSAPAEAAKNYVRHSGWVVRDNVPVSTVYWRRTRARGDHESFVPDSEKEMLWTTMLETFTLPAGTEDKVKRWTLKKMAEQFQSFKGDLYQKYILKGQTPNFDTFPKLRDHWDEFVAYKTGEQGQAMMERNKENAAKKKYHHHLGSGGYSVAMPKWEQMEASLIERGIEPATANWPERSKFWYYAHGGTLNSADGSLVFGDQIREAARRLTDAVEASSQGTFRPDRDRDELTLALQTPEHPGRTRGKGVIPWKIGFKEDIHTYRSRMRSKRDTEAKIADLEFRVSSYELNMQEEVARKVDERMAAHRSHDPQPTIPPAMVSPSGNRSSCASTGQVASGMAIPTDPSGTYHCRPILAGYSKVEVELVEGAYEDLELDYPGGDGGTSSSLGXQAASRSCTDSSSCSYTYSPASSSSGTFKVKGPPXAPPPAHTRATKKAKVDAAKNKDPGYDCTQEELDAYVASEVKRQFKPRSPEKKIPIDPSVRNFFRGMSASVKEAIKLSNYKRTLKKASSGKSKPVPQLGEQPNQEIEPLVTGKEMTIEQFITDTGLTTDQLLGVAPIEKAEVKYMYELGKPLVKHELLQSQPTQMYKFHQLYMEMSATGREMIGARIRDTDFLMEIQRARRRRVFDTGFIDPRKVNVAMLDQYPQETEDNLVHLLKAQHYKTFHWVLLLFDLEACTVNCAKQKQGTNLCGYYVCEYCHCLADQIITTRELDFIRMRDNLTTHKEFIAAVQEQLMGFINEEILDPKEPSSTGKPSRARTLAIPVKLLVTLSTECHPVKGCRCAGTIAPTPSSKDAAIVIATVWACLTETPPAGDAFTLVAVSSVTIDVYSSQSSSTAARGGDRRRLLLRAGVQPAAAALKAAEQRRKSDEEVRQCNVSEALKQQHQSAASVSVEAGPKQAGINSDDPAWAHCFCPDITKKHHLRCKYCDKVCTAGITRIKYHLAGIKGFNTTKCQKVPSPVQQEMFDLLTKKTSEKEQKNKEKEVARAEVDIENSDCESGSEGSDHGNNVLVKRKEKVMDGFKEHKESWELTVECSGDRKDGKYIFELVDRYIEEIGEQHVVQVVTDNASVNTTAASLLTAKRPSIFWNGCAAHCLDLMLEDIGKLGPVEETIANARQAKGKKASKVIISETFWKNVDIAVNYFEPLANVLRRMDSDVPSMGFFHGLMLEAKKEISQRFDNDKSRFIEVWDIIDKRWDNKLKTLLHLAGYYLNPYYYYPNKQEIESDGSFRAAKWWLNHGTSTPNLRKLAARILSLTCSSLACERNWSVFEQVDTKKRNRLLHERMRDLVFVKFNSKLRNKRENKGRDPIEKEVDDVVADGDNEFITGVVPSSSEMDQQCAKESQQHTTPQAPAPAKKKRPVHAKKRKAGTDLHWLASVASASVVSAAPGGRGSVYAATWWDGLPLHHATVHSRRRRALSDLDCRLAHLVLAPPLRRAVGEADHRRALRLLYLSSPPPAPSPHVGSPRIFGLITSSGVWLQRLLQPIVIEHASTPLSFGCSAAAPLGCSAAACDPPPLVVGTLRGALLSMASLLVWQTRLDVSSFTVRLHRLFGVTFLNDRRDYVTVFVSSASSLEVSALLML

SEQ ID NO: 119015 - protein, 98 aa, Oryza sativa
  unsure (1)..(98): unsure at all Xaa locations
  Clone ID: PAT_MRT4530_22271C.1.pep
YPPRIVKPQGRQQTQSCGWIWVLTWVVSXLCCIEXFVGCALDANWAVTFVLYWVLLRALTCWVYMGLAHLLFDTNVNEYNMIGLKMVCIMFGPKKKKK

SEQ ID NO: 119016 - protein, 1147 aa, Oryza sativa
  unsure (1)..(1147): unsure at all Xaa locations
  Clone ID: PAT_MRT4530_22272C.1.pep
MDRQWMYADRRSKEFIDDVHYFLRVADANKHKGFICCPCNKXKNQKEYSTLRTIHFHLFESGFMPSYNCWTSHGEQGVEMEEDEVEDDNIPDFAQYAGFEGNQTGEEERDADGNDVADDLGQMLQDAKEDCESEKGAHKLDKMLEDYRMSLYPGYXQGHKKLDTTLKFLQWKAKNGVSDKAFGDLLKLVKNILPEGNKLPETTYEAKKIVCPLGLEVQKIHACSNDCILYRGEEYENLEACPVCKALPYKIRRDDPGEVDGQLTXKRIPTKVMWYFPIIPRLRRLFRNKGNARMMRWHAEERXQDGMLRHFADGSXWRNIDRKFKDFGKNERNIRFGLSTDGMNPFGEMSNGHSTWPVTMCIYNLPPWLCMKRKYIMMPIIIQGPKQPGNDIDVYLRPLVENLKLLWKKEGVPMWDEDKQEEFNLRALLFVTINDWLALSNLSGQSNKGYKACTHCMDEIESTYLKHCRKVVYMGHRRFLTANHPVRKKGKHFEHKANHRTKPKHRSGKTVFAMVKDLKVVFRKGSGSQPIESEDGHAAMWKKNSIFWELPYWEFLDVRHAIDVMHLTKNLCVNLLGFLGVYGKSKDTLEARNDLKHMEQRGDLHPEPKEKGSHYLSPASYTLSKAEKESIFECLKSIKVPSGYSTNIKRIISTKEKKFTNLKSHDCHVLMTQLLPVVIRGILPDNLRAIITKLCAFMNAISQKIIDPDRLEALQNDVVQCLVSFKLIFPPSFFNIMTHLLCHLVKEIGILGPVYLHNMFPFESYMGVLKKYVRNRARPEASIAKGYGTEEVIEFCIEFIEDLRPIGVPESRYEGKLRGKGSLGRKAIMTVDNNLFRKAHFTVLQQSSLVAPYIEEHLALVRARNIGKSDAWITRHHIDTFPAWLRQHLMGNKTINQQLAFLVRGPSGSIATFQGYEINGYTFYTRAQDMKSTNQNSAVRTDAMGHDGTTGTYYGAIEDIWELDYGPLKVPLFWCQWVRLTGGGVTIDDSGMTTVDLNKVGCSDQPFVLANDVTQVFYVKDMSSKAKKGKGPDESKRHVVFPARPRLLHQHLEVFSPIDLSRLLLRRHCLGHPRTDAAVVSRRRLGHLQKMLHPPPSLSRRPRSLSNISCMNRWLIAMRNRYCTIQLRREAASTGTKKRGTRIQTST

SEQ ID NO: 119017 - protein, 208 aa, Oryza sativa
  unsure (1)..(208): unsure at all Xaa locations
  Clone ID: PAT_MRT4530_22273C.1.pep
RQRGGRGRRXRDEPDGGLLERRRRPERRRRTAGLTAAAAAHGHSWLGRYERQQAKTRLATERGGPGDPFIGARRRRRRPMATGGEMEGFRVRGERSIRIELKSVGFQTKLDEDSKRGDPEDHFPSIDLAGEGKEWPNFGRVAAARAARARLRRREVEDXLTGGPHLSAAPRERGGRARRTGPAWAGREQAEAKGETWADLGPKPQGRF

SEQ ID NO: 119018 - protein, 1375 aa, Oryza sativa
  unsure (1)..(1375): unsure at all Xaa locations
  Clone ID: PAT_MRT4530_22274C.1.pep
LYHILCFHIYPTFTGGETIFRRSAEFHNNVADDLGXMLQDTKKDCESEKEPHKLNKMAKNGVSDKAFGDLLKLVKNILLEGNKLPETTYEAKKIVCPLGLEVQKIHACPNDCILYHGEEYENLEACPVCNALRYKIRRDDPGEVDGQLTSKRIPAKDGMPRHPADGSQXRNIDRKFKDFGKDARNIQFGLSTDGMNPFGEMSSGHSTWPVTMCIFNXPPWLCMKRKYIMMPIIIQGPKQPGNDIDVYLRPLVEDLKLLWKKEGVPVWDEDKQEEFNLRALLFITINDWPALSNLSGQSNKGYKACTHCMDERESTYLKHCRKVVYMGHRRFLAANHPVWKKGKHFEHKADNRRKPKHRSGKTVFAMVKDLKVVFGKGPGSQPIESKDGVYGKSKDTLEARNDLKHMEQRGDLHPEPKEKXSHYLSPASYTLSKAEKESMFECLESIKMADRDDEQILYDTIAEGSSQYWNEEKGNKDPNQYLNEEGNVERDAEGNQEEEASGSQPSAGQKRARGQRGAAKKLEGQHIITEVDEDGRPSAPAEAAKNYVRHSGWVVQDNVPVSTVYWRRTRACGDHESFVPDSEKEMLWTTMLETFTLPAEQFQSFKGDLYQKYILKGKTPNFDTFPKLRDHWDEFVAYKTGEQGQAMMERNKENAAKKKYHHHLGSGGYSVAMPKWEEMEASLLEWGIEPATANWPERSKFWYYAHGGTLNPADGSLVFGDQIREAARXLTDAVEGSSQGTFRPDREKDELSLALQTPEHPGRTXGKWVIPWNIGFKEDIHTYRSRMRSKRDTEAKIADLEFRVSSYELSMQEEVARKVDERMAAHRSNDPQPTIPPAMVSPSGNRSSCASTGQVGSQSMDAMQTQDKTTCPVDDITQRTPCELHIPFKNLSIKVASGMAIPTDPSGTXHCKPIPAGYSKVEVELVEGAYXDFELDYPGGDGEAHLRDTSHAIILWRKRYIILPGRQAASRAPSPPAPAPSPPHAPAPSPPQAPAPTPPQAPAPTPPXLLHRLLRKLLLRHLPSQGPPKLHRLPPQRQRRTQEELDAYVASEVRRQFKPRSPEKKIPIDPSVRNFFRGMSAPAKEAIKLSDYEXTLKKACSRKSKPVPQLGEQPNQEIEPLVTGQDFGIQDFINDTGLTTDQLLGDAPIEKAEVKYMYELGKPLVKPELLQSLPTQMYKFHQVYMEMSATDREMIGARIRDTDFLQGDDILWINFKAIYELYQLDALGVSIMSCWILMEIQRARRRGVFDTGFIDPRKVNVAMLDQYPQATEDNLVHLLKAQLYKTFILLPYNTELNVYDSMDKKESTFDKVFELIDRDWYRFRHLVRGKWRETLRRKFKSPCGKQKQGTNLCGYYVCEYCHCLADQIITTRELD

SEQ ID NO: 119019 - protein, 328 aa, Oryza sativa
  Clone ID: PAT_MRT4530_22275C.1.pep
MTSDGGGGGAVEGREQATIEEEPVLLPPVYEAPRVEAVHGCGARRRDLDRDAEMARRGGSGMEVGGEYAHEAESQKGAFDSFVVRETQDATVADGHGGDVEEVEVNVAQGDAVEANIDEGDVDNIADEGHAANIAEEGHETHDGNIADEASVPVAPRLTDGQICRSPFLRVVGGRFAGRCLAAGVMDAELRLVAGARSSRSWDDIHRCPDVEGTQLCSLLNELYHKPVVPAGILLPPDTGDDRDRSDMMRWLDKQLARSVVYVALGTEAPITSGTVRELDSSRRYATPASGCRRGTRRGVVEMRHLTQIILSSLVICLPRTRIAESEQ

SEQ ID NO: 119020 - protein, 44 aa, Oryza sativa
  Clone ID: PAT_MRT4530_22276C.1.pep
YDNIRSKRRLAGQGSKSPKRGGAGHYCVRPLLQNRKKITLPSMS

SEQ ID NO: 119021 - protein, 249 aa, Oryza sativa
  Clone ID: PAT_MRT4530_22277C.1.pep
SFFSFGCFVALGVCFFVCHCFPCFVGSGGLLVTDGKVRESQDSEGDRPTSSHSRACRNSCLPDPQRSPRTHAAIAKPSGGGLLDLEHHFAFHGAYHSNAVNVFIHTLFVWPIFFTALLLLHLAAVYGAFYLLLDRRAGALAALLCFLCWSASAALAARLGFSAGWKVVLVAQLFCWTMQFIGHGVFEKRAPALLDNLVQAFLMAPFFVLLEALHKFVGYEPCPGFHAKVQKLIDEARKEWEDKKAKKMT

SEQ ID NO: 119022 - protein, 140 aa, Oryza sativa
  Clone ID: PAT_MRT4530_22278C.1.pep
HLVAEDAEVDVDVVRSHGHGGAASAAGLVPFSPLVSLPPAAAPRPFSQPATALSPPPALPAGQPPRVTTGRASLYRTGTRLAGFRLVVPASVTPVAPSSTTPAAPASLCRTLHAGLHTAGRASSTPADTCMAASPPPAAA

SEQ ID NO: 119023 - protein, 109 aa, Oryza sativa
  Clone ID: PAT_MRT4530_22279C.1.pep
FFFFFEIGVGYPFRFDEPSSPSSTLLIKNIHPQHKIHPQQAHPFNTKLGINHIRIHSSTTLVDSNLCNKKKIHLFEPSRQFPSASPPLPTAARAESPPRDPRGATVSAT

SEQ ID NO: 119024 - protein, 80 aa, Oryza sativa
  Clone ID: PAT_MRT4530_2227C.1.pep
APRIGRSIDGSDAAHHHLHGGKTEQTDVMSMDRQQTGAKQIMAEKKRINGQVRAKTKPSEGGGRQGSKEEMITHLSCNRN

SEQ ID NO: 119025 - protein, 66 aa, Oryza sativa
  Clone ID: PAT_MRT4530_22280C.1.pep
MAGWMAGWMDDTDVALDVPVPNEEEERNMKHYAWVLTGRTFYFLRVINTPENWGLQQSPIKPSCDK

SEQ ID NO: 119026 - protein, 142 aa, Oryza sativa
  Clone ID: PAT_MRT4530_22281C.1.pep
MGSGRRRGERGDHPAMSPLQPSASVCPAARCSRAFRSPQPQPRLSPPPPLVAIVALACQSRRPASARPAAAFARRSPPPPLVEGRAGLRSPPSSPRLRLPRGLASARRPASTCHPASAGRHASRRRRRRTEVGAPSAGAVPR

SEQ ID NO: 119027 - protein, 112 aa, Oryza sativa
  Clone ID: PAT_MRT4530_22282C.1.pep
LVTIESCPLLISWPKKKMTSALFFYFSPPTSSITLSFFSSSTAPIAAPVLNLAASVYPWTSSVPRASSMDSPNTCITFCYYSYSDLFKIYFYDVVFFLYIPYNGTLLSFNFL

SEQ ID NO: 119028 - protein, 123 aa, Oryza sativa
  Clone ID: PAT_MRT4530_22283C.1.pep
HEAETLAAASAVAVAVETLAAASSRSDRVAMAMRSLLTKLRIPAAASRRTLPPFRSSSTAPQAKGKLSSTATAQDGTPVPGEGRRILEQIMEEGDKRQGKLMWYEIIGNFIAFNATLYTVYLL

SEQ ID NO: 119029 - protein, 762 aa, Oryza sativa
  Clone ID: PAT_MRT4530_22284C.1.pep
MAVVAAAAATGSTTRSGGGGGEGTRSGRKKPPPPPLQERVPLGRRAAWAWRLAGLAVLLLLLALLALRLLRHHGGAGGDGGVWRVALVCEAWFAALCALNVSAKWSPVRFVTRPENLVAEGRTPSTTAAEYGELPAVDMLVTTADPALEPPLVTVNTVLSLLALDYPRAGERLACYVSDDGCSPLTCHALREAAGFAAAWVPFCRRYGVAVRAPFRYFSSSSSPESGGPADRKFLDDWTFMKDEYDKLVRRIKNTDERSLLRHGGGEFFAEFLNVERRNHPTIVKTRVSAVMTNAPIMLNMDCDMFVNNPQAVLHAMCLLLGFDDEASSGFVQAPQRFYDALKDDPFGNQMECFFKRFISGVQGVQGAFYAGTGCFHRRKAVYGVPPNFNGAEREDTIGSSSYKELHTRFGNSEELNESARNIIWDLSSKPMVDISSRIEVAKAVSACNYDIGTCWGQEVGWVYGSLTEDILTGQRIHAMGWRSVLMVTEPPAFMGSAPIGGPACLTQFKRWATGQSEIIISRNNPILATMFKRLKFRQCLAYLIVLGWPLRAPFELCYGLLGPYCILTNQSFLPKASEDGFSVPLALFISYNTYNFMEYMACGLSARAWWNNHRMQRIISVSAWTLAFLTVLLKSLGLSETVFEVTGKDKSMSDDDDNTDGADPGRFTFDSLPVFIPVTALAMLNIVAVTVGACRVAFGTAEGVPCAPGIGEFMCCGWLVLCFFPFVRGIVWGKGSYGIPWSVKLKASLLVAMFVTFCKRN

SEQ ID NO: 119030 - protein, 135 aa, Oryza sativa
  Clone ID: PAT_MRT4530_22285C.1.pep
TTTVVLSPCAACKILRRRCVDRCVLAPYFPPTEPHKFTTAHRVFGASNIIKLLQELPEEQRADAVSSMVYEANARIRDPVYGCAGAICQLQKQVNDLKAQLARAHAELAGARAQHAHLKNSWHSQLLTFKLGFQN

SEQ ID NO: 119031 - protein, 220 aa, Oryza sativa
  unsure (1)..(220): unsure at all Xaa locations
  Clone ID: PAT_MRT4530_22286C.1.pep
QGAEVLKQGVIWRIGSGDNVKIWGDPXLPRSTSRKPVTPQGQNLFSTVYDLVDPITXQWDKELVQDTFWTEDAETILPIPRHGRMDDILAWHLDAKGYVLGERQRLSHQGTASTSHPALVADXFWKMRCPNRIKHFMWRMAHNSLVLCCNLKKEGYGCLTRNALCAKEXGHLIFPVQICXNASNLEEIRETLASQQTSVEMVENIHCRPGDEERGGGRRR

SEQ ID NO: 119032 - protein, 646 aa, Oryza sativa
  Clone ID: PAT_MRT4530_22287C.1.pep
MAAAPPGGQEKVIAAAQHIVKSLANSKNAADDMIRILSGFDDRLTFMSDLFPPPPPAAAAVREPSVVEEEEAGPDDAREDEVEEAAELVERWDSPEEGDRLVFDSAKDAGDYLGAAAVLVGARGARAEAALQAAMARLEDEFRHLLARGMSPLAGEDLHASLLRRLSLTVPSFASSASDLDCPSFASHTGDGDESGGAGGRASVSDEEISPYLISPDTVGALRGIADVMLRAGYGPELCQVYGEMRRDTLMECLAVLGVDKMSLEEVQRVEWGVLDGKMKKWIQALKVVVRGLVAEERRICNQIFAADAEAEEDCFTEAAKGCVLQLLNFGDAIAIGKRSSEKLFRILGMYEALDEVLPELEGLFSGDARDFIKEEAVGILMRLGDAVRGTVAEFANAIQGETSRRALPGGEIHPLTRYVMNYVRLLADYSRSLNQLLKDWDTELENGGDNVNMTPLGQCVLILITHLQAKIEEKSKLYEDEALQNIFLMNNLLYIVQKVKDSELKTLLGDNWIRQRRGQIRRYSTGYLRSSWTRVLACLRDDGLPQTMGSSSALKASLKERFKNFNLAFEELYKTQTTWKVVDPQLREELKISISEKVLPAYRSFVGRFRGQLEGGRNSARYIKYNPEDLENQVSDFFEGRRPNA

SEQ ID NO: 119033 - protein, 690 aa, Oryza sativa
  Clone ID: PAT_MRT4530_22288C.1.pep
MPPKKVVKERVTKRKEGGSEGDMVAEVGAEPSAPEGEATASPPPVASPSLPPSAPASSIEAETAKAAAAAKALWTRDVILSSQAPGVPPATAFAQPATTSTAIIVSQANANLDAQGEADIGAMHQNMAKLQDTLRQMQEQQQAYEAARQTKTHTQQLYAQPQVFPPHAVPAPVYFAKPATAVAVRATPQVVSALVRLVAPQGQYLKPTHTPQKMMEAATTLQAQFQAFLQQLNRPHNNVPRASPPAQAKGSPSQVKRLYDAGFIRPCRYAEWVSSIVPVIKKNGKVRVCIDFRNLNKATPKDEYPMPVADQLVDAASGHKILSFMDVAHGDENTKAKVIHLVLDGIGESTREYMRRFSQARCQVQDITKASIVNAGSAGLLEGELTRKIGRKEPRTIEHLFRIIDGYARGEEDTKRRQEIQAEYDKAAAAATATVQANAQTQVQAQVVSSAPVLVHPTPPANPAQHSRPNQAPMTWKKFRTDRGGKAVMALLNVAFGTQGNKREEEILFDIVDIPYNYNAIFGRGTLTKFEAIYHHNYLKLKMLGLVDVIVVKGSQPSATTVASFDREVHTLEVEGQERARPMLRPAPHGRMSFGLRNAGATFARLVYKVLGSQLGRNVEAYVDDIVVKRRKAFDHASDLQETFDNLHAAGMKLNWRSVCSVFARVSYWGSLCLKGELKLTLKKSMPFSK

SEQ ID NO: 119034 - protein, 83 aa, Oryza sativa
  Clone ID: PAT_MRT4530_22289C.1.pep
MQWSVAEKQDTKRLTWLERQKAIASVYIGFGSHAVMTLEKTTEFAWGLAARHGKDEVVEHVGQSAVIISSQQQVDLQGSVACV

SEQ ID NO: 119035 - protein, 164 aa, Oryza sativa
  unsure (1)..(164): unsure at all Xaa locations
  Clone ID: PAT_MRT4530_2228C.1.pep
AARTVGGAVAGDARTTGGAVVYGPCCGGAVAGDTHAARGAVAAXGAWMTARAAGEAVAEKRRALAGGPFDGGAVVARLRGGRDGGRRRPRGGRGGGRRRPRGGMSVAGGPCGGRAVAGDACAAGGRLDDGASRGETAAIGTSFLMAYLHGLDQPTRLPGAMLAH

SEQ ID NO: 119036 - protein, 52 aa, Oryza sativa
  Clone ID: PAT_MRT4530_22290C.1.pep
VQNHETDRCSGWDTFTNCQNMISTTDHDPSAQFSFEMRAQANQTDLLMNRVT

SEQ ID NO: 119037 - protein, 94 aa, Oryza sativa
  Clone ID: PAT_MRT4530_22291C.1.pep
ILPGRQAASRAPSPPAPPSPPQAPAPSPPHAPAPSPPQAHCRFHWVLLLFDLEATETERRAPSAPRPSKPPPPRPSRRCSTAPRPSKPHHHCTA

SEQ ID NO: 119038 - protein, 49 aa, Oryza sativa
  unsure (1)..(49): unsure at all Xaa locations
  Clone ID: PAT_MRT4530_22292C.1.pep
MASNKVVISALLVVVVSVLAVTTXMADHHQEQELYTLRPAMSCHNSLYP

SEQ ID NO: 119039 - protein, 71 aa, Oryza sativa
  Clone ID: PAT_MRT4530_22293C.1.pep
MDTEKVHFISLNYGSSFIDGQMSRRLAQFEHDLARAQDQSGRHDPTYMPGRAMPAHGLHQRPRHDPIRLGP

SEQ ID NO: 119040 - protein, 2134 aa, Oryza sativa
  unsure (1)..(2134): unsure at all Xaa locations
  Clone ID: PAT_MRT4530_22294C.1.pep
MDRQWMYADRRSKEFIDGVHYFLRVAEANKXKGFICCPCNKCKNQKEYSASRTIHFHLFESGFMPSYNCWTSHGEQGVEMEEDEVEDDNIPDFAQYAGFEGNQTGEEDREADYNDVADDLGQMLQDAKEDCESEKGAHKLDKILEDHRTSLYPGCEQGHKKLDTTLEFLQWKAKNGVSDKAFGDLLKLVKNILPEGNKLPETMYEAKKIVCPLGLEVQKIHACPNDCILYRGEEYENLEACPVCKALRYKIRRDDPGEVDGQLTKKRIPAKVMWYFPIIPWLRRLFRNKGSARMMHWHAEERQQDGMLRHPADGSQWRNIDRKFKDFGKDARNILFGLSTDGMNPFGEMSSGHSTWPVTMCIYNLPPWLCMKRKYIMMPIIIQGPKQPGNNIDVFLRPLVEDFKLLWKKEGVPVWDEDKQEEFNLRALLFVTINDWPALSNLSGQSNKGYKACTHCMDETESMYLKHCRKVVYMGHRRFLATNHPVRKKGKHFKHTADHRTKPKHRSGKTVFDMVKDLKVVFGKGLGSQPIESEDGHAAMWKKXNSIFWELPYWEFLDVRHAIDVMHLTKNLCVNLLGFLGVYEKSKDTLEARNDLKHMEQCGDLHPEPQEKGSHYLSSASYTLSKAEKESMFQCLESIKVPSGYSTNIKRIISTKEKKFTNLKSHDCHVLMTQLLPVIIRGILPDNVRATITKLCYFMNAISQKVIDPDRLETLQNDVVQRLVSFELIFPPSFFNIMTHLLCHLVKEIDILGLVFLHNMFPFERYMDVLKKYVRNRARPEASIAKGYGTEEVIELCVEFIEDIHPIGVPESRHEGRLRGKGTLGRKAIMTVDNNLFRKAHFTILQQSSLVAPYIEEHLALVRARNIGKSDAWITRHHIDTFPAWLXQHLMGNETINQQLAFLARGPSGSIATFQGYEINGYTFYTRAQDMKSTNQNSAVRIDACXHDGTTGTYYGAIEEIWELDYGPLKVLLFWCQWVRLIGGGVTIDDSRMTTVDLNKVGYSDEPFVLANDVTQVFYVKDMSSKGKKDKGPDNXKRHVVLPVRPRLLHQHLHVFPSRSXSASPSPPLPRATPRRXAVVSHRRLAVLAASTADATAASLGKYFCYEQMADRDEEQILYDTIALGSSQYWNKEEGNEDPNQYLNEEGNAERDAEGNEEGNVERDAEGNEEEASGSHPSAGXKRARGQXGAAKKIEGRHIITEVDADGRPSAPAQAAKNFVRHSGWVVRDNVPVSKVYWRRTRARGGDDSFVPESEKEMLWTTMLETFTLPAGTENIVKQWTLKKMAEQFQTFKGDLYRKYILKGQTPNFDIFPKLRDHWDEFIAYKTGQQGQAMMERNKENAAKKKYHHHLGSGGYSVAMPKWEEMEASLLERGIEPATAKWPDRSKFWYYAHGGMLNPVDGSLVFSDQIREAANRLTDAVEASSQGTFRPDREKDELSLALQTPEHPGQTRGKGVIPWKMGFKEDIHTYRSRMRSKRDTEAKIADLEYRVSSYELSIQEEVARKVDERMAAHRSHDPQPYIPPPMVSPSGNRSSCASTGQVVSHSMDAMQTQDETTYPVDEITQRTPCELHIPFKNLSIKVAXGMAIPTDISGTYHCRPIPAGYSRVEVELVEAVYEDIELDYPGGDGETHLRDTSHAIILWRKRYIIVPGRQAASRAPSPPAPPSPPAPSPPAPPPPPPALSPPAPPPPPPAPSPPAPLPPPPAPSPPAPPPPPPPPPPCPPAPPKTRSRQAPPPASTRATKKAKVDTTKNKEPPYGCSQEELDAYVAGEVKRQLKPQSPKKKIPINPSVKNFFKGMSTANKEALKLSDYDRTLRKAYYKKSKPVPQLGEQPHQVVEPLVTGEDFGITDFISDIGLTMAQLVGGAPIPKAEVAYKFELGKPLVRPEQLQSLPTQMYKFHERYMEMSANGREMFGARIRNPDFLQGEDVLWIHFKDVFDLYHRDALDVSLLSAWILMEIQRARRRGVYDTGFIDPRKINTEMLDKYEKDTEDNLVHLLTQQHFKTFILLPYNTEFHWVLFFFDLDACRVTVYDSMNKEEKVFDKVFQLIDRAWDRFRQLVRGTWKEKLGRRFHFPRIHMREKLPHKDFITAVQEQLMGFINEEVLNPDGEFYYDGSTIRNVGPSSSDVTQASK

SEQ ID NO: 119041 - protein, 2579 aa, Oryza sativa
  Clone ID: PAT_MRT4530_22295C.1.pep
MASAGGHGDDGDSGRRPPADPALGSNHKDEVEAAANQRRVEDDGGEFYSLRSWGELVRRWLRRDDGDDDDDSFFAMPAWRGCAPATATAATRRRARDRGDDDSSFALAAWRRCTLATPTSTAATTRRARARGVMGVPVTAPASTVRSDASTSKSEPTSTVRDDASASASSTDSAPKSASLLRHDASGTYSAPKSASPNAPVLPFTAASDAATAFKSMPPDAYAAIHALILACSKTSDSASASPPMPPEAYAALHSLMLACSKASNTASASAPPMPPEAYAALHALVLACSKASDTASASPPPPPDAHALAFTDLLSSSTRLATSLTNSQVSLAAPADHLAHSMSILAEKIVEGSNGLEEAAANVKNAASTLLVAADNPKASEELAGESRDLAARILQLIHDVEDQAREDAAGAKFTDQDVLPGCEQCADRSCLCPWLFGSCTSPSGGCSTSQPRRAVDEKQETLRDKWTTFFTFSMPASLAVLPLLEKHISQGYSALLGYSYGAIFFSAAAGAFFLEILHPQNTTDRVPRRLREGCGREMNRQWMYADRRSKEFIDGVHYFLRVAEANRQRGFICCPCNKCKNQKEYSASRTIHFHLFESGFMPSYNCWTSHGEQGVEMEEDEVEDDNIPDFAQYVGFEGNQTGEEEIAADGNDVADDLGQMLQDAREDCESEKEAHKLDKMLEDHRTSLYPGCEQGHKKLDTTLELLQWKAKNRVSDKAFGDLLKLIKNILPGGNKLPETTYEAKKIVCPLGLEVHKIHACPNDCILYRGEEYENLEACPVCKALRYKIRRDDPGEVDGQLTKKRIPAKVMWYFPIIPRLRRLFRNKGNARMLRWHAEERQQDGMLRHPADGSQWRNIDRKFKEFGKDARNIRFGPKQPGNDIDVYLRPLVEDLKQLWKKEGVPVWDEDKQEEFNLRALLFVTINDWPALSNLSGQSNKGYKACTHCMDETESTYLKHCRKVVYMGHRRFLAANHPVRKKGKHFEHKADHRTKPKHRSGKTVFAMVKDLKVVFGKGPGSQHIESEDGHAAMWKKNSIFWELPYWEFLDVHHAIDVMHLTKNLCVNLLGFLGVYGKSKDTLEARNDLKHMEQRGDLHPEPKEKGSHYLSPASYTLSKAEKESMFECLESIKVPSGYSTNIKRIISTKEKKFTNLKSHDCHVLMTQLLPVVIRGILPDNVRATITKICAFMNAISQKVIDPDRLEALQNEVVQCLVSFELIFPPSFFNIMTHLLCHLVKEIRILGPMYLHNMFPFERYMGVLKKYVRNRARPEASIAKGYGTEEVIEFCVEFIEDLRPIGVPESRHEGRLRGKGTLGRKAITTVDNNLFRKAHFTVLQHSSLVAPYIDEHLALVRARNIAQDMKSTNQNSAVRVDAMGHDGTTATYYGAIEDIWELDYGPLKVPLFRCQWVRLTGGGVMIDDSGMTTVDLNKVGYSDEPFVLANDVTQVFFVKDMSSKGKKGRGPDEPKRQVVLPGKRKIVGVEDKTDEDYDQLDGQPPFTVTIDPSILLSNEDTPYSRSDHKEGTIMADRDEEQILYDTIAEGSSQYWNEEEGNEDPNQYLNEEGNVKRDAEGNQQGHVERDVEGNQEEEASGSQPSVGQKRARGQRGAAKKLEGRHIITEVEEDGRPSAPAEAAKNYVRHSGWVVRDNVPVSTVYWRRTRARGDHESFVPDSEKEMLWTTMLETFTLPASTEDKVKRWTLKKMAEQFQSFKGDLYQKYILKGQTPNFDTFPKLRDHWDEFVAYKTGEQGKAMMERNKENAAKKKYHHHLGSGGYSVAMPKWKQMEASLIERGIEPATANWPERSKFWYYAHGGTLNPVDGSLVFGYQIQEAARRLTDAVEASSQGTFRPDRDRDELTLALQTPEHPGRTRGKGVIPWKIGFKEDIHTYRSRMRSKRDTEAKIADLEFRVSSYELNMQEEVARKVDERMAAHRSHDPQPTIPPAMVGPSGNRSSCASTGQVGSQSMDAMQTQDESTCPVDDITQRTPCELHIPFKNLSIKVASGMAIPTDPSGTYHCRPIPAGYSKVEVELVEGAYEDLELDYPGGDGETHLRDTCHAIILWRRRYIILPGRQAASRAPSPPAPPSPPQDPAPSPPHAPPAPSPPQAPASTPQDPAPTPPRAPTPTPPQAPLPAPSKSRAPPAPPLAHTRATKKAKVDAAKNKDPGYDCTQEELDAYVASEVKRQFKPRSPEKKIPIDPSVRNFFRGMSASVKEAIKLSDYERTLKKASSGKSKPVPQLGEQPNQEIEPLVTGKEMTIEQFITDTGLTTDQLLGVAPIEKAEVKYMYELGKPLVKPELLQSLPTQMYKFHQLYMEMSATGREMIGARIRDTDFLQGDDILWINFRGIYELYQLDALDVSIMSCWILMEIQRARRRRVFDTGFIDPRKVNVAMLDQYPQETEDNLVHLLKAQHYKTFILLPYNTEFHWVLLLIDLEACTVNVYDSMDKKESTFDKVFELIDRAWYRFRHLVRGKWRERLRRKFKFLCAKQKQGTNLCGYYVCEYCHCLADQIITTRELDFIRMRDNLTTHKEFIAAVQEQLMGFINEEILDPKGEFYYDGNTIHRSLASELAASTTTSKS

SEQ ID NO: 119042 - protein, 187 aa, Oryza sativa
  Clone ID: PAT_MRT4530_22296C.1.pep
MAGVGCHFLLSLSPPLYSIRRPAAAHRPAKARSHISCCSRHDDAEACSTSKPLTNGKEEEKTTPSRRKCLACLCAVTLISASGPTMLTPNGLASDMMSKPAVCRNCNGSGAVLCDMCGGTGKWKALNRKRAKDVYLFTECPNCYGRGKLVCPVCLGTGLPNNKGLLRRPDAKKLLDKMYNGKILPDS

SEQ ID NO: 119043 - protein, 988 aa, Oryza sativa
  unsure (1)..(988): unsure at all Xaa locations
  Clone ID: PAT_MRT4530_22297C.1.pep
EPPHLHSCISISPISISLRRLLRRATPSPHANATPPPPSPRRRRFCRRACNAAAATPRHATAATPRHRAPRPHNATPPPPSPRRRANRRPDAATPPLTNENENDRTNESKNEHIYLNEEGNVERDAEGNQQGHVERDVEGNQEEEASGSQPSVGQKRARGQRGAAKKLEGRHIITEVEEDGRPSAPAEAAKNYVRHSGWVVRDNVPVSTVYWRRTRARGDHESFVPDSEKEMLWTTMLETFTLPAGTEDKVKRWTLKKMAEQFQSFKGDLYQKYILKGQTPNFDTFPKLRDHWDEFVAYKTGEQGKAMMERNKENAAKKKYHHHLGSGGYSVAMPKWEQMEASLIEKGIEPATANWPERSKFWYYAHGGTLNPADGSLVFGYQIQEAARRLTDAVEASSQGTFRPDRDRDELSRMRSKRDTEAKIADLEFRVSSYELNMQEEVARKVDERMAAHRSHDPQPTIPPAMVSPSGNRSSCASTGQVASGMAIPTDPSGTYHCRPIPAGYSKVEVELVEGAYEDLELDYPGGDGETHLRDTCHAIILWRRRYIILPGXQAASRAPSPPAPPPQDPAPTPPRAPTPTPPQAPLPAPSKSRAPPAPPLAHTRATKKAKVDAAKIKDPGYDCTQEELDAYVASEVKRQFKPRSPEKKIPIDPSVRNFFRGMSASVKEAIKLSDYERTLKKASSGKSKPVPQLGEQPNQEIEPLVTGKEMTIEQFITDTGLTTDQLLGVAPIEKAEVKYMYELDKPLVKPELLQSLPTQMYKFHQLYMEMSATGREMIGARIRDTDFLQGDDILWINFRGIYELYQLDALDVSIMSCWILMEIQRARRRRVFDTGFIDPRKVNVAMLDQYPQETEDNLVHLLKAQHYKTFILLPYNTELNVYDSMDKKESTFDKVFELIDRAWYRFRHLVRGKWRERLRRKFKFPFIRMRDNLTTHKEFIAAVQEQLMGFINEEILDPKGEFYYDGNTIHRSLASELAASTTTSKS

SEQ ID NO: 119044 - protein, 273 aa, Oryza sativa
  unsure (1)..(273): unsure at all Xaa locations
  Clone ID: PAT_MRT4530_22298C.1.pep
MSQNGKKKEKEQELHHECVLGPSEVVVQGHADADNDGGDDDDIVIPASMPTRFSFQRLQRRIENSDPVLVVPEEQPDKIPEWTAKPALTPSLQSFIDIIDDLRIRGLSGYEVAADFVGRRIQPLQARTYPAFDYSGLEDTTLVSPRGLDSDTVACRVSQVMIIALATASDVPVPLCEKGLAEREAAINALPLMDVIGPLADHQAATSLKEGVTKEASDVAAATTTSSSDVPKKGRKFSSILGTRQKAPNLAASDMSXPPPQRRQRLVTIGEKE

SEQ ID NO: 119045 - protein, 269 aa, Oryza sativa
  Clone ID: PAT_MRT4530_22299C.1.pep
MVAAVHGRRRPAWWRWCTIGGGRHDGTGGSGVMASGGGLVMGAKEATVAPGGGRGGAVLGDDGGGVPQIRATWLDLEGGRRRGWRRRADDRRRQQVEAGKESCVRCGWRRAFSNSGCGGGDRDYGHWRHDGFGRLAEGVADGYFWLVRHHLDEGLETSLAQRGAADGSRGRLGVRGTSGEDGDRLGGRGATDGGRPDWRERPVRWRRPAWRERRGRWWRRRPRCEEELLVDVTRSSVHEGWPAGALVQGSHMSAELEWWWSIGALAVDS

SEQ ID NO: 119046 - protein, 157 aa, Oryza sativa
  Clone ID: PAT_MRT4530_2229C.1.pep
NTLVDGRVPARVASGGRWPAKPARQEERRPAARTVGGAVAGDARATGGAVAGGPCCGGAVAGDTHAAGGAVAAGGGWTTARAAGGPCGGGAVVGRLRGGMAVAGDPCGGRAVAGDACAAGGRLDDGAPRSETAAGQRPAWPEGSGTAACRGHSHGRG

SEQ ID NO: 119047 - protein, 151 aa, Oryza sativa
  Clone ID: PAT_MRT4530_222C.1.pep
MEKGSSSTPSAANTSEPMLGQAAIAATTAVPMTNFQLFGSTVLVPVASMATAIAPAAMAAADNGGHGSSSASQNASGSGQGQGGNMFLSLQLRPLGSTPWGFSSLQICVKIYLAAMEKGSSSTPSAANTSEPMVGQAAAATTTAAMRMTNF

SEQ ID NO: 119048 - protein, 2094 aa, Oryza sativa
  unsure (1)..(2094): unsure at all Xaa locations
  Clone ID: PAT_MRT4530_22300C.1.pep
MDRQWMYADRRSKEFIDGVHYFLRVAEANKHKGFICCPCNKCKNQKEYSRFRTIQIHLFESGFMLSYNCWTSHGEQGVEMEEDEVEDENIPDWAXYAEFEGNQTGKVDRDADDNDAADDLGQMLQDAKEDCESEKEAHKLECMLEDHRMLLYPGCEKGHKKLDTTLEFLQWKATNGVSDKAFGDLLKFIKNIFLEGNKLPETTYEAKKIVCPLGLEVQKIHACPNDCILYRGEEYENLEACLVCKALRYKIRRDDPGEVDGQPTKKRIPAKVMWYFPIIPRLRHLFRKKGNARMMRWHAEERXQDGMLRHPADGSQWQNIDRTFKDFGKDARNIRFGLSTDGMNPFGEMSSGHSTWPVTMCIYNLHPWLCMKRKYIMMLIIIQGPKQPGNDINVYLRPLVEDLKLLWKKEGVPVWDEDKQEEFNLRSLLFVTINYWPALSNLSGQSNKGYKACTHYMDKIESTYLKHCRKVVYMGHHRFLATNHPVRKKSKHFEHKADHRTKPKYRSGKTVFAMVKDLKVVFGKGPGSQPIESEDGHAAMWKKNSIFWDLTYWEFLDVCHAIDVMLLTKNLCVNLLVFLGVYGKSKDTLEARNDLKHMEQCGDLHPEPKDKGSHYFSPASYTLSKAEKESMFECLESIKVPSGYSTNIKRIISTKEKKFTNLKSHDCHVLMTXLLLVIIRGILPDNVRATITKLCAFMNAISQKVIDLDRLEALQNDVVQCLVSFELIFPPSFFNIMTHLLCHLVKEIGILRPVYLHNMFPFERYMGVLKKYVRNRARLEAIIAKGYGTEKVIEFCVEFIEDLRPIGVLESRHERRLXGKGTLGRKSIMTVDNNLFRKAHFMVLQQSSLVAPYVEEHLALVRARNIGKSDAWITRYHIDTFPAWLXQHLMCNETIDQQLAFLARGPSGSIATFXGYKINGYTFYTRAQDMKSTNQNSVVRIDAIGHDGTTGMYYGAIEDIWELDYRPLKVSLFRCQWVRLTGGGVTIDGSGMTTIDLNKVVGXPFVLANDVTQVFYMKDMSSKGKKGKGPDEPKPHVVLPGRTRLLHQHLDVFLRSXAASPSPPRLGHPLLRRRSHLAVVVVAVDAAAALGGCKYFLYEQMADRDDKHILYDTIAEGSSQYWNEEEGNEDPNQYLNEEGNVESDAEGTEEGNKEAEASGSQSSAGQKRARGQRGAAKKIEGRHIITEVDEDDRPSAPAEAAKNFVRHSGWVVKDNVPVSKVYWRRTRARGDYDSFVPESEKDTMWITMLETFTLPAGTENIVKQWTLKKMVEQFQSFKGDLYKKYILKGLTPNFDVFPKLRDHWDEFVAYKTGQQGQAMMDRNKENAAKKYHHLLGSDGYSVTMLKWEEMEAGLIERGVEPATAKWLDRSKFWYYAHGGTLNPVDGSLVFSDQIREAASRLTDVVEASCQGTFXPNRDKDELSLALQTPEHPGRTRGKGVVPWKIGFKEDIHTYKSRMRSKRDTEAKIADLEYRVSSYELSMQEEVARKVDERMAAHRCHDAQPYIPPVMVSPSGNRSSCASTGQVGSQSMDAVQTQDETTCPIDEITQRTPCELHIPFKNLSIKVTSGMTIPTDPSGTYHCRLIPAGYSRVEVELVEAAYEELELDYPGGDGKTYLRDTSHAIILWRKRYIILPGRQAVSRAPSPPAPPSPPQAPAPSPTDQAPAPSPPQAPASTSPQAPLPCPPAPSKSRTHQAPPLARTRATKKAKVDAAKNKEPPYDCTQEELDAYVAEXVKRQLKPQSPKKKIPIDPSAKKFFQKMSGPLKEALKLTDYERTLRKAHSGKSKKVPQLGEQPNQEVELLVTGQEFGIKKFISDTGLTRAQLLXSAPIPKAEVRHQYELGKPLVKPDQLQSLPTQTYQFHERYIEMSTSGREIIGARIKNADFLQGEDVLWINFKDIYELYQLDVVDVSLLSAWILMEIQWARRRGVFDTGFIDPRNVNVEMVTKYPQATEENLVHLLKEQHFKTFILLPYNTAFHWVLLLFDLEACRVNVYDSMNKDESTFDQVFELIDRAWYRFCHLVRGTWKEKLSQRFKFPVIHMRDNLTHKDFITAVQEQLMGFIKEQVLNPEGEFYYDKSTIHKTLSSEITTTSK

SEQ ID NO: 119049 - protein, 2045 aa, Oryza sativa
  Clone ID: PAT_MRT4530_22301C.1.pep
MDRQWMYADRRSKEFIDGVHYFLRVAEANRQRGFICCPCNKCKNRKEYSASRTIHFHLFESGFMPSYNCWTSHGEQGVEMEEDEVEDDNIPDFAQYVGFEGNQTGEEEIAADGNDVADDLGQMLQDAREDCESEKEAHKLDKMLEDHRTSLYPGCEQGHKKLDTTLELLQWKAKNGVSDKAFGDLLKLVKNILPGGNKLPETTYEAKKIVCPLGLEVHKIHACPNDCILYRGEEYENLEACPVCKALRYKIRRDDPGEVDGQLTKKRIPAKVMWYFPIIPRLRRLFRNKGNARMLRWHAEERQQDGMLRHPADGSQWRNIDRKFKEFGKDARNIRFGPKQPGNDIDVYLRPLVEDLKQLWKKEGVPVWDEDKHEEFNLRALLFVTINDWPALSNLSGQSNKGYKASTHCMDETESTYLKHCRKVVYMGHRRFLAANHPVRKKGKHFEHKADHRTKPKHHSGKTVFAMVKDLKELPYYEFLDVRHAIDVMHLTKNLCVNLLGFLGVYRKSKDTLEARNDLKHMEQRGDLHQEPKEKGSHYLSPASYTLSKAEKESMFECLESIKVPSGYSTNIKRIISTKEKKFTNLKSHDYHVLMTQLLPVVIRGILPDNVRATITKLCAFMNAISQKVIDPDRLEALQNEVVQCLVSFELIFPPSFFNIMTHLLCHLVKEIRILGPMYLHNMFPFERYMGVLKKYVRNRARPEASIAKGYGTEEVIEFCVEFIEDLRPIGVPESRHEGRLRGKGTLGRKAITTVDNNLFRKAHFTVLQHSSLVAPYIEEHLALVRARNIGKSDAWITRHHIDTFPAWLRQHLMGNESINQQLAFLARGPSGSIATFQGYEINGYTFYTRAQDMKSTNQNSAVRVDAMGHDGTTATYYGAIEDIWELDYGPLKVPLFRCQWVRLTGGGVMIDDSGMTTVDLNKVGYSDEPFVLANDVTQVFFVKDMSSKGKKGRGPDEPKRQVVLPGKRKIVGVEDKTDEDYDQLDGQPPFTVTIDPSILLSNEDTPYSRGDHKEGTIVRRKYVRSTVTADMADRDEEQILYDTIAEGSSQYWNEEEGNEDPNQYLNEEGNVERDAEGNQQGHVERDVEGNQEEEASGSQPSVGQKRARGQRGAAKKLEGRHIITEVEEDGRPSAPAEAAKNYVRHSSWVVRDNVPVSTVYWRRTRARGDHESFVPDSEKEMLWTTMLETFTLPAGTEDKVKRWTLKKMAEQFQSFKGDLYQKYILKGQTPNFDTFPKLRDHWDEFVAYKTGEQGQAMMERNKENATKKMYHHHLGSGGYSVTMPKWEQMEASLIERGIEPATANWPERSKFWYYAHGGTLNPADGSLVFGDQIREAARRLTDAVEASSQGTFRPDRDRDELTLALQTPEHPGRTRGKGVIPWKIGFKEDIHTYRSWMRSKRDTEAKIADLEFRVSSYELNMQEEVARKVDERMAAHRSHDPQPTIPPAMVSPSRNRSSCASTGQVASGMAIPTDPSGTYHCRPIPAGYSKVEVELVQGAYEDLELDYPGGDGETHLRDTCHAIILWRRRYIILPGRQAASRAPSPPAPPSPPQDPAPSPPHAPPAPSPPQAPASTPLQDPTPTPPRAPTPTPPQAPLPAPSKSRAPPSPPPAHTKATKKAKVDAAKNKDPGYDCTQEELDAYVASEVKRQFKPRSPEKKIPIDPSVRNFFRGMSASVKEAIKLSDYERTLKKASSGKSKPVPQLGEQPNQEIEPLVTGKEMTIEQFITDTGLTTDQLLGVTPIEKAEVKYMYELGKPLVKPELLQSLPTQMYKFHQLYMEMSATGREMIGARIRDTDFLQGDDILWINFRGIYELYQLDALDVSIMSCWILMEIQRARRRRVFDTGFIDPRKVNVTMLDQYPQETEDNLVHLLKAQHYKTFILLPYNTEFHWVLLLFDLEACTVNVYDSMDKKESTFDKVFELIDRAWYRFRHLVRGKWRERLRRKFKFPCAKQKQGTNLCGYYVCEYCHCLADQIITTRELDFIRMRDNLTTHKEFIVAVQEQLMGFINEEILDPKGEFYYDGNTIHRSLASELAASTTTSKS

SEQ ID NO: 119050 - protein, 410 aa, Oryza sativa
  unsure (1)..(410): unsure at all Xaa locations
  Clone ID: PAT_MRT4530_22302C.1.pep
DTLVHPRRVLPRRRPSPPPPAASAPVPAPAPSARPRSAPPSRNEGAITCWIAAPXPPPSWGSKRARSAAPSCRPPPXAPPPFPILPGNPPPPPPPPPPTRRPPPPPLPQRRHRRVHPHGPAGARGARPAHGDPRGPPPAVPQGRPPRRPPAEPAHPPPHRAPAVRHGPDAGAAQRPPPGTARGGFPXEASPLPTPPPPPPPPXPPPAPPLPRLRLNAPPRYRGLPLAVASDLARPPPPPPPPHSPPPLPPPXPSTPPHRHSPPPWIATPPSPTRTTTSRPSSRRTTSSRPPPPSTSPASAPRSLPPPPRXPRPLVPPLPPPLRRPPRPLPXSSYPLAARPPFACPPPSASPPPPLPPPTPRRPGCATPXPRALPPPLAALGPPRPLQPPNPPRAPLPSTARPPAHPTHTG

SEQ ID NO: 119051 - protein, 122 aa, Oryza sativa
  Clone ID: PAT_MRT4530_22303C.1.pep
THVSIPFAGPPLNTPSLQKYKRMVDAWGGWSLFQALLQTLKKVSLKHGVSISTVAVRYILNQTSVAGSMVGVRLGLSEHIKDTNAIFSLELDEEDMNSITEASNKGRNLMDIIGDCGDEYRA

SEQ ID NO: 119052 - protein, 1803 aa, Oryza sativa
  unsure (1)..(1803): unsure at all Xaa locations
  Clone ID: PAT_MRT4530_22304C.1.pep
MDRQWMYADRWSKEFIDGVHYFLRVAEANRQKGFICCPCNKCKNQKEYSASRTIHFHLFESGFMPSYNCWTSHGEXGVEMEEDEVEDDNIPDFAQYAGFEGNQTGEEERDADGNNVADDLGQMLQDAKEDYESEKGAHKLDKMLEDHRTLLYPGCEQGHKKLDTTLEFLQWKEKNGVSDKAFGDLLKLVKNILPEGNKLPETTYEAKKIVCPLGLEVQKIHACPNDCILYRGEECENLEACPVCKALRYKIRRDDTGEVDRQLTKKRIPAKVMWYFPIIPRLRCLFKNKGNARMMRWHAEERQQDGMLRHPADGSQWRNIDRKFKDFGKDARNIRFGLSTDGMNPFGEMSSGHSTWPVTMCIYNLPPWLCMKRKYIMMPIIIQGPKQPGNDIDVYLRPLVEDFKLLWKKEGVSVWDEDKXEEFNLRALLFVTINDWPALSNLSGQSNKGYKACTHCMDETESVYEKSKDTLEARNDLKHMEQRGDLHPEPKEKGSHYLSPASYTLSKAEKGSMFECLESIKVPSGYSTNIKRIISTKEKKFTNLKSHDYHVLMTQLLPVVIRGILPDNVRATITKLCAFMNTISQKVIDPDRLEALQNDVRYMGVLKKYVRNRARPEASIAKGYGTXEVIEFCVEFIEALRPIGVPESRHEGRLRGKGTFGRKAIMTVDNNLFRKAHFTVLQQSSLVAPYIEEHLALIRAKNIGKSDAWITRHHIDTFSTWLRQHLMGNETINQQLAFLARGPSSSIATFQGYEINGYTFYTRAQDMKSTNQNSAVRIDAMGHDGTTDTYYGAIEDIWELDYGPLKVPLFRCQWVRLTGGGVTIDDSGMTTVDLNKVGYSDEPFVLANDVTQVFYIKNMSSKGKKGKVTDESKRHVVLPGKRKIVGVEDKTDXDYDXFDGQPPFTMTIDPSILLSNEDTPYSRSDHKEGTIYLNEEGNVERDAEGNEEGNDAKEASGSQPSAGQKRARGQRGAAKKIEGRHIITEVDEDDXPSAPAEAAKNFVRHSGWVVRDNVPVSTVYWRRTRARGDDDSFVPNSEKEMLWTTMLETFTLPAGTDNLVKXWTLKKMAEQFQSFKGDLYKKYILKGLTPNFDVFPKLRDHWDEFVAYKTGQQGQAMMARNKENAAKKKYHHHLGSGGYSVAKPKWEEMEASLLERGIEPATANWPDRSKFWYYAHGGTLNPVDGSLVLSDQIREAASRLTDAVVASSQGTFRPDREKDELSRMRNKRDTEAKIADLEYRVSSYELSMQEEVARKVDERMAAHRSQDPQPYIHPVMVSPSGNRSSCASTGQVASGMAIPTDPSGTYHCRPIPAGYSRVEVELVEAAYEDLELDYPGGDGETHLRDTSHAIILWRKRYIILPGRQVAFRAPSPPAPPSPPAPPPPPAAPSPPAPPPPPPPPCPPAPPKTRSRQAPPPARTRATKKAKVDATKNKEPPYDCSQEELDAYVAGEVKRQLKPQSPEKRIPIDPSVKNFFKGMSKTNKEALQISDYDRTLQRAYHKKSKPVPQLGEQPNQEVESLVTGEDFGITDFIADTGLSVDXLVGAAPIPKAEVAYKFELGKPLVKPEQLESLPTQMYKFHERYMEMSANGREMFGARIRNPDFLQGDDVLWIHFKDLFDLYQLDALDVSLLSAWILMEIQRARRRRVYDTGFIDPRKINTEMIDKYEKDTEDNLVHLLTQQHFKTYILLPYNTEVTVYDSMNKXEKIFDKVFKLIDRAWDRFRQLVRGTWKEKLGRRFHFPRIHMRDNLPHKDFIMAVQEQLMRFINEEVLNPDGEFYYDGSSTIHNVGPSSSDITPASKSKS

SEQ ID NO: 119053 - protein, 49 aa, Oryza sativa
  Clone ID: PAT_MRT4530_22305C.1.pep
IFLAKAPPRVVKRRVCIVGGGEPTGQMGGRFLGLSSPPKGDKSIFLGAR

SEQ ID NO: 119054 - protein, 1196 aa, Oryza sativa
  Clone ID: PAT_MRT4530_22306C.1.pep
MADRDEEQILYDTIAEGSSQYWNEEEGNEDPNQYLNEEGNVERDAEGNQQGHVERDVEGNQEEEASGSQPSIGQKRARGQRGAAKKLEGRHIITEVEEDGRPSAPAEAAKNYVRHSGWVVRDNVPVSTVYWRRTRASGDHESFVPDSEKEMLWTTMLETFTLPAGTEDKVKRWTLKKMAEQFQSFKGDLYQKYILKGQTPKFDTFPKLRDHWDEFVAYKTGEQGQAMMERNKENAAKKKYHHHLGSGGYSVAMPKWEQMEASLIERGIEPATANWPERSKFWYYAHGGTLNPADGSLVFGYKIQEAARQLTDAVEASSQGTFRPDRDRDELTLALQTPEHPGRTRGKGVIPWKIGFKEDIHTYRSRMRSKRDTEAKIADLEFRVSSYELNMQEEVARKVDERMAAHRSHDPQPTIPPAMVSPSGNRSSCASTGQVGSQSMDAMQTQDESTCPVDDITQRTPCELHIPFKNLSIKVASGMAIPTDPSGTYHCRPIPAGYSKVEVELVEGAYEDLELDYPGGDGETHLRNTCHAIIIWRRRYIILPGRQAASRAPSPLAPPSPPQDPAPSPPHAPPAPSPPQAPASTPQDPAPTPPRAATPTPPQAPLPAPSKSRAPPAPPLAHTRATKKAKVDAAKNKDPGGMSASVKEAIKLSDYERTLKKASSGKSKPVPQLGEQPNQEIEPLVTGKEMTIEQFITDTGLTTDQLLGVAPIEKSEVKYMYELGKPLVKPELLQSLPTQMYKFHQLYMEMSATGREMIGARIRDTDFLQGDDILWINFRGIYELYQLDALDDSIMSCWILMEIQRARRRRVFDTGFIDSRKVNVAMLDQYPQETEDNLVHLLKAQHYKTFILLPYNTEFHWVLLLIDLEACTVNVYDSMDKKESTFDKVFELIDRAWYRFRHLVRGKWRERLRRKFKFPFIRMRDNLTTHKEFIAAVQEQLMGFINEEILDPKGEFYYDGNTIHRGVTNRDYKGFLHQWWPHLHLVYDVLTAAVAAADARTLRNHVDRSFLAGLVALFASEDPRERDRLKTVYHQLYSKLTVERAFRQRTMAVALLRFVYGTSPAEPERHCGVGELLEICGSIINGFVVPLKEEHRAFMARVLLPLHRTRWVHTCHRQLSYYGSIRRPGHLPPPLAGDQLPEGGAAYRRARGDRRDPRPAPLRQARRPCLLPDCPLRQQCLLPTSGFALDPSTGRA

SEQ ID NO: 119055 - protein, 363 aa, Oryza sativa
  Clone ID: PAT_MRT4530_22307C.1.pep
MASSTLALDFLRRLLCAHAAAGNAGGGDDDGAVVVQVQVQQEEGMSPCVVARLMGLDAMPPPPPETECQPLRRQRRRRRSRSVSSAEGWPPPPAPYLKEEGDEFIVLSFSPDAASRHDNGEPDGKSGHVGAKKQSGGCPRRKLHYGGDDDDDEAQHPGHGRRRAAATERGMPSSSPVSVLHAQHSSSSSSSSSTTTTTTTTTTSSCSPNHHHCKSLQIAEEIRLANNQQSSRRKLQPDFNDDLDNPLSPETSSCHVSKCSESGMRNRSVMNKSEVFIPGVSGTLQFICRLVEEDLNSVIWLTSDSENIAADMVSEILDQLTSETADELMQTGSETVHSSPGRLISMKHPSFRVDRNMQAIRSN

SEQ ID NO: 119056 - protein, 2057 aa, Oryza sativa
  Clone ID: PAT_MRT4530_22308C.1.pep
MADRDEEQILYDTIAEGSSQYWNKEEGNEDPNQYLNEEGNVERDAEGNQQGHVERDVEGNQEEEASGSQPSVGQKRARGQRGAAKKLEGRHIITEVEEDGRPSAPAEAAKNYRRTRARGDHESFVPDSEKEMLWTTMLETFTLPAGTEDKVKRWTLKKMAEQFQSFKGDLYQKYILKGQTPNFDTFPKLRDHWDEFVAYKTGEQGKAMMERNKENAAKKKYHHHLGSGGYSVAMPKWEQMEASLIERGIEPATANWPERSKFWYYAHGGTLNPTDGSLVFGYQIQEAARRLTDAVEASSQGTFRPDRDRDELTLALQTPEHPGRTRGKGVIPWKIGFKEDIHTYRSRMRSKRDTEAKIADLEFRVSSYELNMQEEVARKVDERMAAHRSHDPQPTIPPAMVSPSGNRSSCASTGQVGSQSMDAMQTQDESTCPVDDITQRTPCELHIPFKNLSIKVASGMAIPTDPSGTYHCRPIPAGYSKVEVELVEGAYEDLELDYPGGDGETHLRDTCHAIILWRRRYIILPGRQAASRAPSPPAPPSPPQDPAPSPPHAPPAPSPPQAPASTPQDPAPTPPRAPTPTPPQAPLPAPSKSRAPPAPPLAHTRATKMAKVDAAKNKDPGYDCTQEELDAYVASEVKRQFKPRSPEKKIPIDPSVRNFFRGMSASVKEAIKLSDYERTLKKASSGKSKPVPQLGEQPNQEIEPLVTGKEMTIEQFITNTGLTTDQLLGVAPIEKAEVKYMYELGKPLVKPELLQSLPTQMYKFHQLYMEMSATGREMIGARIRDTDFLQGDDILWINFRGIYELYQLDALDVCIMSCWILMEIQRARRRRVFDTGFIDPRKVNVAMLDQYPQETEDNLVHLLKAQHYKTFILLPYNTEFHWVLLLIDLEACTVNVYDSMDKKESTFDKVFELIDRAWYRFRHLVRGKWRERLRRKFKFPCAKQKQGTNLCGYYVCEYCHCLADQIITTKELDFIRMRDNLTTHKEFIAAVQEQLMGFINEEILDPKGEFYYDGNTIHREEAFRAREIAVKKLENRDFVGARKIAIKAQRLFPELENISQLLIICEVLSSAEAKISGELDWYGVLQVDKMADETVIRRQYNILSYRLHPDNNTLFGAEAAFRFVSEAHAILSDHVKRSLYDTKRQCASREVAKEATQPPNKTDSNISNVAGSMTPSASVLVFWTICPHCQKRFLYYQRNFLARCSDCGKRFFAIKLHEQSVPSRILSTAAKKSQLSTSEMLSFQRSSVPNQHQQGKCLVTRSEAIQFSAMKQTKSHICAFDNDKPGTLVPKSSDLKSISVKNLTRESAPAEENAAESSSLQILGKRKLYVTSDSSHGMNSNIKRQRKYTCPSDSDSSNEQICNDDVAVPDNQSTGQNVPIEVDSEEERNARHGSNQQTCKKNVTDTASQKSVNSVIAYPYPDFDFCKSRDAEETDESIKQYGWAGDMAGKGLVTRSDRVQFSEISQAKSHVPPADNDIPGTLVPRSPDPNSTAVQNLTGESVSAETNAPGSSSLQILGRRKLCDSSDSNRAMNSNIERKMKYNSPSDADWSTEQTCNDDVAVTENQFAKQHVPTEVDSEEEGNEKHGDNQQSHRKDDTDTSSQNSANPVIAYSSTDFFDFDKSRDVSQIAVDQIWAFTWLVHNTVNEQNSKSTNEKLPFACGNFCLGETDVLHNPSRYLSHSVSSTGKNGNSCDINPNMGEVWALYKGWSMQLSSHADRYQSYGYDIVQVLSSGSMDDGVTVSPLVRIAGFVSLFAKVKNESCFSISSCEVLHFSHSIPFYKTNGNERVGVAEGFLELDTAALPSDLDSAFTSITLESYMALDNKTNIELISYVCPDSEFYNFEQDRSHDKFEAGQIWALYSDTDKFPNFYGWVSKVEMEPFNVDLAWLEACPQRAQEKLWLEHDVPVSCGTFEIQNMETKFNENCAFSHLIETKQIGAKCKVQIHPKIGEVWAIYKNWSNKWVPSRSTRGTKYAIGKIVDSTEAFTLFGYLTKVDGYISVFKPDVRRGILKIPVKENLRFSHRIPSFCLTKEKGGKLHDCYELDPAAVPDVFLHKN

SEQ ID NO: 119057 - protein, 2107 aa, Oryza sativa
  unsure (1)..(2107): unsure at all Xaa locations
  Clone ID: PAT_MRT4530_22309C.1.pep
MDRQWMYADRRSKEFIDGVHYFLRVAEANTHKGFICCPCNKCKNQKEYSASRTIHFHLFESSFMPSYNCWTSHGEQGVEIEEDEVEDDNIPNFAQYARFEGNQTGEEKRDADGNDVANDLGQMLQDAKEDCKSEKGAHKLDEMLEDHRTSLYPGCEQGHKKMDTTLEFLQWKAKNGVSDKAFGDLLRLVKNILPEGNKLSETTYEAKKIVFPLGLEVQKIHACPNDCILYRGEEYENLEACPVCKALRYMIRRDDPGEVHGQLTKKRIPAKVMWYFPIIPRLRRLFRNKGNARMMRWHAEERQQDGMLRHPADGSQWRNIDRKFKDFGKDARNIWFGLSTDGMNPFGEMSSCHSTWPVTTCIYNLPPWLCMKRKYIMMPIIIQGPKQPGNDIDVXLRPLVEDLKLLWKKXNLRALQFVTINDWPAFSNLSGQSNKGYKACTHCMDETESTYLKHCRKVVYVGHRRFLAANHPVRKKGKHFEHKADHRTKPKHCSGKTMFAMVKDLKLVFRKGPGSQPIDSEDGHAAMWKKNSIFWELPYWEFLDVRHAIDVMHHTKNLCVNLLGFLGVYGKSKDTLEARNDLKHMEQCSDLHPEPKEKGSHYLSPASYTLSKAEKESMFECLESIKVPSGYSTNIKRIISTKEKKFTNLKSHDCHVLMTQLLPVVIRGILPDNVRTIITKLCAFMNAISQMVIDPDRLEALQNDVVQCLVSFELIFLPSFFNIMTHLLCHLVKEISILGPVYLHNMFPFERYMGILKKYVHNRARPEASIAKGYGTEEVIEFCVEFIEDLHPIRVPESRHEGRLRGKGTLGRKAIMTVYSNLFRKAHFTVLQQSSLVAPYIEEHLALVRARNIGKSDAWITRHHIDTFPAWLRQHLMGNETINQQLAFLARGPSGSIATFQGYEINGYTFYTRAQDMKSTNQNSVVRIDAMGHNGITGTYYGSIEDIWELDYGPLKVPMFRCQWVRLTSGGVTIDDSGMTTVDLNKVGYSDEPFVLANDVTQVFYVKDMSSKRNKGRGPDEPKSHVVLPARSRLLHQYLEVFSXDRSLLASPSPPLPRASPRRXAVVSRRRLAGVVVAASAAAVSLGXEPNYFLYEQMADRDEEQILYDTIAEGSSQYWNEEEGNKDPNQYLNEEGNVERDAEGNEEEEASGSQPSAGQKRARGQRGAANKLEGRHIITEVDEDGXPSASAEAAKNYVRHSGWVVRDNVPVSTVYWRRTRARGDHESFVPDSEKEMLWTTMFKTFTLLAGTEDKVKRWTLKKMAEXFQSFKGDLYQKYILKGQTPNFDTFPKLRDHWDEYVAYKTGQQGXAMMERNKENAAKKKYHHHLGSGGYSVAMPKWEEMEASLLERGIEPATAKWPDRSKFXYYAHGGTLNPVDGSLVFSDQIREAARRLTDAVEASSQGTFRPDREKDELSLALQTPEHPGRTRGKGVIPXKIGFKEDIHTYRSRMRSKRDTEAKIADLEYRVSSYELSMQEEVARKVDERMAAHRSHDPQPTIPPAMVSPSGNRSSCASTRQVESQSMDAMQTQDETTCPVDDITQRTPCELHIPFKNLSIKVASGMAIPTDPSGTYHCRPILAGYSKVEVELVKGAYEDLELDYPGGDGETHLRDTSHAIILWRKRYIILPGRQAASRAPSPPALPYPPQAPAPSPPHAPALSPPQAPALTPPQAPTPTPPQAPCPAPSKSRAPQAPPPAPTRATKKAKVDAAKNKDPGYDCTQEELDAYVASEVRRXLKPRSLEKKIPIDPSVRNFFRGMSAPAKEAIKQSDYERTLKKASSGKXSKPVPQLGEQPNQEIEPLVTGEDFGIQEFINDTRLTTDQLLRGAPIEKAEVKYMYELGKPLVKPEQLQSLPTQMYKFHQLYMEMSATGREMIGARIKDTDFLQGDDILXINFKGIYELYQLDALDVSIMSCWILMEIQRARRRGVFDTGFIDPRKVNVAMLDQYPQATEDNLVHLLKAQHYKTFILLPYNTEFHWVLLLFDLEACTVNVNDSMDKKESTFDKVFELIDSAWYRFRHLVRGKWREKFNFPFIHMRDNLTHKEFIAAVQEQLMGFINEQILNPKGEFYYNRNTIHMSLASEITTSTTSKLEESVASLHKRHSIDR

SEQ ID NO: 119058 - protein, 2147 aa, Oryza sativa
  Clone ID: PAT_MRT4530_22310C.1.pep
MDRQWMYADRRSKEFIDGVHYFLRVAEANRQRGFICCPCNKCKNQKEYSASRTIHFHLFESGFMPSYNCWTSHGEQGVEMEEDEVEDDNIPDFAQYVGFEGNQTDEEEIAADGNDVADDLGQMLQDAREDCESEKEAHKLDKMLEDHRTSLYPGCEQGHKKLDTTLELLQWKAKNGVSDKAFGDLLKLVKNILPGGNKLPETTYEAKKIVCPLGLEVHKIHACPNDCILYRGEEYENLEACPVCKALRYKIRRDDPGEVDGQLTKKRIPAKVMWYFPIIPRLRRLFRNKGNARMLRWHAEERQQDGMLRHPADGSQWRNIDRKFKEFGKDARNIRFGLSTDGMNPFGEMSSGHSTWPVTMCIYNLPPWLCMKRMYIMMPIIIQGPKQPGNDIDVYLRPLVEDLKQLWKKKGVPVWDEDKQEEFNLRALLFVTINDWPALSNLSGQSNKGYKACTHCMDETESTYLKHCRKVVYMGHRRFLAANHPVRKKGKHFEHKVDHRTKPKHRSGKTVFAMVKDLKVVFGKGPGSQHIESEDGHAAMWKKNSIFWELPYWEFLDVRHAIDVMHLTKNLCVNLLDFLGVYGKSKDTLEARNDLKHMEQRGDLHPEPKEKGSHYLSPASYTHSKAEKESMFECLESIKVPSGYSTNIKRIISTKEKKFTNLKSHDCHVLMTQLLPVVIRGILPDNVRATITKLCAFMNAISQKVIDPDRLEALQNEVVQCLVSFELIFPPSFFNIMTHLLCHLVKEIRILGPMYLHNMFPFERYMGVLKKYVRNRARPEASIAKGYGTEEVIEFCVEFIEDLRPIGVPESRHEGRLRGKGTLRRKAIMTVDNNLFCKAHFTVLQHSSLVAPYIEEHLALVRARNIGKSDAWITRHHIDTFPAWLRQHLMGNESINQQLAFLARGPSRSIATFQGYEINGYTFYTRVQDMKSTNQNSAVRVDAMGHDGTTATYYGAIEDIWELDYGPLKVPLFRCQWVRLTGGGVMIDDSGMTTVDLNKVGYSDEPFVLANDVTQVFFVKDMSSKGKKGRGPDEPKRQVVLPGKRKIVGVEDKTDEDYDQLDGQPPFTVTIDPSILLSNEDTPYSRSDHKEGTIVRRKCFLYQQMADRDEEQILYDTIAEGSNQYWNEEEGNEDPNQYLNEEGNGHVERDVEGNQEEEASGSQPSVGQKRARGQRGAAKKLEGRHIITEVEEDGRPSAPAEAAKNYVRHSGWVVRDNVPVSTVYWRRIRARGDHESFVPDSEKEMLWTTMLETFTLPAGTEDKVKRWTLKKMAEQFQSFKGDLYQKYILKGQTPNFDTFPKLRDHWDEFVAYKTGEQGKAMMERNKENAAKKKYHHHLGSGGYSVAMPKWEQMEASLIERGIEPATANWPERSKFWYYAHGGTLNPADGSLVFGYQIQEAARRLTDAVEASSQGTFRPDRDRDELTLALQTPEHPGRTRGKGVIPWKIGFKEDIHTYRSRMRSKRDTEAKIADLEFRVSSYELNMQEEVARKVDERMAAHRSHDPQPTIPPAMVSPSGNRSSCASTGQVGSQSMDAMQTQDESTCPVDDITQRTPCELHIPLKNLSIKVASGMAIPTDPSGTYHCRPIPAGYSKVEVELVEGAYEDLELDYPGGDGEMHLRDTCHAIILWRRRYIILPGRQAASRAPSPPAPPSPPQDPAPSPPHAPPAPSPPQAPASTPQDPAPTPPRAPTPTPPQAPLPAPSKSRAPPAPPLAHIRATKKAKVDAAKNKDPGYDCTQEELDAYVASEVKRQFKPRSPEKKIPIDPSVRNFFRGMSASVKEAIKLSDYERTLKKASSGKSKPVPQLGEQPNQEIEPLVTGKEMTIEQFITDTGLTTDQLLGVAPIEKAEVKYMYELGKPLVKPELLQSLPTQMYKFHQLYMEMSATGREMIGARIRDTDFLQGDDILWINFRGIYELYQLDALDVSIMSCWILMEIQRARRRRVFDTGFIDPRKVNVAMLDQYPQETEDNLIHLLKAQHYKTFILLPYNTEFHWVFLLIDLEACTVNVYDSMDKKESTFDKVFELIDRAWYRFRHLVRGKWRERLRRKFKFPCAKQKQGTNLCGYYMCEYCHCLADQIITTRELDFIRMRDNLTTHKEFIAAVQEQLMGFINEEILDPKGEFYYDGNTIHRSLASELAASTTTSKS

SEQ ID NO: 119059 - protein, 56 aa, Oryza sativa
  unsure (1)..(56): unsure at all Xaa locations
  Clone ID: PAT_MRT4530_22311C.1.pep
SLQNTSXESLFLLXNIFGNPNKTNILKVPLRTNLLIYFHVSHTNPKLKPITVGLRR

SEQ ID NO: 119060 - protein, 125 aa, Oryza sativa
  unsure (1)..(125): unsure at all Xaa locations
  Clone ID: PAT_MRT4530_22312C.1.pep
AIVASTSPSSRECASTHVSHNTNASSSGIVGANISTNVSVAFSTNTSTDLLRNDSTSANPDASVDLSNDASSSSNAYSSTNLCSDASTDVRANYSAXSNAGASTNLRTDASTDLRTYASADDRTR

SEQ ID NO: 119061 - protein, 769 aa, Oryza sativa
  Clone ID: PAT_MRT4530_22313C.1.pep
TTTAMMRLLLVAVAVAMAAVVVAAEERATYIVHMAKSAMPAEYGDDHGEWYGASLRSVSGAGKMLYAYDTVLHGFSARLTAREARDMAAMDGVLAVNPEARYELHTTRTPEFLGIAGNDGLFPQSGTAGDVVVGVLDTGVWPESRSYDDAGLGEVPSWWKGECMAGTGFNSSACNRKLVGARFFNRGYEAAMGPMDTTRESRSPRDDDGHGTHTSSTAAGAAVSGASLLGFASGTARGMAPRARVAVYKVCWLGGCFSSDILAGMDAAVADGCGVLSLSLGGGAADYARDSVAIGAFAAMEQNVLVSCSAGNAGPGTSTLSNVAPWITTVGAGTLDRDFPAYVSLGNGKNYTGVSLYAGKALPSTPLPIVYAANASNSTAGNLCMPGTLTPEKVAGKIVVCDRGVSARVQKGFVVRDAGGAGMVLSNTATNGEELVADAHLLPAAGVGAKEGAAIKAYVASDPSPTATIVVAGTQVDVRPSPVVAAFSSRGPNMLTPEILKPDIIAPGVNILAAWTGKAGPTGIAADTRRVAFNIISGTSMSCPHVSGLAALLRSAHPEWSPAAVRSALMTTAYSTYAGAGDANPLLDAATGAPATPFDYGAGHVDPASAVDPGLVYDLGTADYVDFLCALNYTSTMIAAVARSKSYGCTEGKAYSVYNLNYPSFAVAYSTASSQAAESSGAAATTVTHRRTLTNVGAAGTYKVSAAAMPGVAVAVEPTELAFTSAGEKKSYTVSFTAKSQPSGTAGFGRLVWSDGKHSVASPMAFTWT

SEQ ID NO: 119062 - protein, 462 aa, Oryza sativa
  unsure (1)..(462): unsure at all Xaa locations
  Clone ID: PAT_MRT4530_22314C.1.pep
STNKPRSRDESPRAAPLTNTYPPPPPPGANPRPTKPHPLAHAVPPIQLFLTPLLLPPATPPLRQRRLIRCHPYPPRLPPRLPPLPLPAPPARPPPPLRRLGPRRCSCRPRTPTRRRRRGGSGTARCACPTSGLFGCLEVSSLTLDESQITDIPQVSQLENNALVQDLFFEKEIKDTIFQMEHNKALSPDEFLAEFYQVFWNFIKSDLVDLFNDFHSGSLPLXSLNFGXLPKCKEALKIQTYRPICLLNVLMXSLKIFTTVATNRISGVAQKVISPTQTAFIQGRNIREVIVILHETIHELHQKKKSGVLLKTDFEKAYDKVKWSFVQQTLKMKGFSQKWCDCIAXFIQGGHVGIKVNDQVEPKFQTYKGFRQRDPLSPIPFNIVVDMLAILIEQKMMVXISRVVPHLVDDGLSILXYADDTIIFLEHDLQKAKNMKLILIAFEKLSGLKTNFHKKSLIIKIG

SEQ ID NO: 119063 - protein, 59 aa, Oryza sativa
  Clone ID: PAT_MRT4530_22315C.1.pep
RWCRRPCSPFLAGHEVGWQIGRRGRQPRRRNPPAVLCSLQPLNRQNPLLPSCWICASRG

SEQ ID NO: 119064 - protein, 235 aa, Oryza sativa
  unsure (1)..(235): unsure at all Xaa locations
  Clone ID: PAT_MRT4530_22316C.1.pep
RGVGHLEVPAGRREGMRHPHLYTPLDLHLPNFVPLXLSQGEIIVPYLGTSIFIVFAIWFISGRCGGKLSKTPRXDRLLMCWWAFTGLAHIMEGTYAFAXHEKKVKVLFSNQNPSFSDEVWKEYSKGDSRYVARDPATVTVEAITAVLEGPGLLLSVYAIARQKSDSHILQFTVCLGHLYSCTYFFLLFSSSLLFSLLSSLFSFRLAAGAAAMAERGSRAVAGCGRSGRRASPAVE

SEQ ID NO: 119065 - protein, 193 aa, Oryza sativa
  unsure (1)..(193): unsure at all Xaa locations
  Clone ID: PAT_MRT4530_22317C.1.pep
EWADKIAEIIREQFGLKPKKNIHTCIGXPYFDWFDRVPLPNRYRXPNFSKFSRQENILIVEHVSRFLTQCGETSSXEAMRVRFFXISLSRSMFIWFSSLLANYIRSWANLVKXFHNYFFSGIQKMKLSDFTSFRQWSDESVPDXIQRFRDVXSQCYSFNLSIAHLEFLAFQGLLGAXLRTFSSQDYVCFSHLM

SEQ ID NO: 119066 - protein, 80 aa, Oryza sativa
  Clone ID: PAT_MRT4530_22318C.1.pep
PKGCFSKKIGPLNGVFGKIPLFFPNTPFFKQALKKNWFSIKIEKLSKWIPCPPSGFFFFFSPPPPPRKARCITTTIVPYY

SEQ ID NO: 119067 - protein, 74 aa, Oryza sativa
  Clone ID: PAT_MRT4530_22319C.1.pep
LHQFSSTYSPSSRCCHFTPTFRVIFRSYPPLLTQQQLHPCLNLPTIKICTNSKDHIKVTVFALKTRLVIYMFQI

SEQ ID NO: 119068 - protein, 174 aa, Oryza sativa
  Clone ID: PAT_MRT4530_2231C.1.pep
MCEGLKLEIKFASVAPPQTKGAAERDEWQNPSSTAARTVGGAVAGDARATGGAVAGGPCCGGAVAGDTHAAGGAVAAGGGWTTARAAGGPCGGGAVVGRLRGGRGGGRRRPRGGMAVAGDPCGGRAVAGDACAAGGRLDDGAPRSETAAGQRPLPMRGLLEACHEALRPDLPKP

SEQ ID NO: 119069 - protein, 653 aa, Oryza sativa
  Clone ID: PAT_MRT4530_22320C.1.pep
MGPRIQQLAAVLLAAVVVVAAARDEPAAAKNYQTQWDTVMSILNCKSDSLIPSYICSVISKSRWGWASDDPDDYTPAADPSPTAARPLRSTADLPKYVDPLPQMARIQGYGINQFGFPVPTNLTIGMYNKTWQFHRDMPPTPVFVYGQSLQTATFPGPTIVARYNVPLYVTWENHLPDAHILPWDPTVPTAIPKNGGVPTVVHLHGAAQAPDSDGHAFAWFTRDFAENGSTWTQKTYTYPNVQPAAGNIWYHDHALGLTRASLLAGLLAAYIVEWPELEMPFNLPSGEFDLHLVIADRKFNVDGTIFMDTVGAVPSVHPQWQPEYFGEVITVNGKAWPFQAVQRRRYRLRILNASNARYLNIRFSNGLPFTVIASDATYLSRPVTVSNLLLSPAEIFDVIVDFSLVVNPNATDIELLNSAPYPFPTGTPANATLDGKVMAFNVSAKWQVGDDMPMQEPENSTVVPEIGVPFAKVTALPPTMKTRYIVLYENMTSNDPNTAKTMNLYINGLRLEDPPTETPISGTTELWHVINLTPDNHPLHLHLAEFQAVQMLQLVDPDTFKSCMLKHNDTFACNLDQHAVGALQPVPEEEKTWKNVVKIPPAYVTSVVVAFRLVHNNMPYPFDATAAPGYVYHCHILDHEDNAMIRPLTLLP

SEQ ID NO: 119070 - protein, 87 aa, Oryza sativa
  unsure (1)..(87): unsure at all Xaa locations
  Clone ID: PAT_MRT4530_22321C.1.pep
MSPAEXXREESVYKAXXGXAERYEEMVEYMERVAXRXGXASGGEELTVEERNXLSXAYKNVIGARRAFVXRIISSIEQKEGRAGTTA

SEQ ID NO: 119071 - protein, 138 aa, Oryza sativa
  unsure (1)..(138): unsure at all Xaa locations
  Clone ID: PAT_MRT4530_22322C.1.pep
PQEKGAREFPPPSPRGGGKPREPPWLGPHQSREPAFFPQNPGRPPGSXGGLPNKGEKQPRGQKKTPGKGGRENFCPPGILGPPSPGFGLEKKATKAGPPNFGRKTEGVGPPVTKPLXKPPQTLKKIKGASPPPLAMVF

SEQ ID NO: 119072 - protein, 2051 aa, Oryza sativa
  Clone ID: PAT_MRT4530_22323C.1.pep
MEEDEVEDDNIPDFAQYVGFEGNQTGEEEIAADGNDVADDLGQMLQDAREDCESEKEAHKLDKMLEDHRTSLYPGCEQGHKKLDTTLELLQWKVKNGVSNKAFGDLLKLVKNILPGGNKLPETTYEAKKIVCPLGLEVHKIHACPNDCILYRGEEYENLEACPVCKALRYKIRRDDPGEVDGQLTKMRFLLRNKGNARMLRWHAEERQQDGMLRHPADGSQWRNIDRKFKEFGKDARNIRFGLSTDGMNPFGEMSSGHSTWPVTMCIYNLPPWLCMKRKYIMMPIIIQGPKQPGNDIDVYLRPLVEDLKQLWKKEGVPVWDEDKQEEFNLQALLFVTINDWPALSNLSGQSNKGYKACTHCMDETESRYLKHCRKVVYMGHRQFLAANHPVRKKGKHFEHKADHRTKPKHRSGKTVFAMVKDLKVVFGKGPGSQHIESEDGHAAMWKKNSIFWELPYWEFLDVRHVIDVMHLTKNLCVNLLGFLGVYGKSKDTLEARNDLKHMEQRGDLHPEPKEKGSHYLSPASYTLSKAEKESMFECLESIKVPSGYSTNIKRIISTKEKKFTNLKSHDCHVLMTQLLPVVIRGILPDNVRATITKLCAFMNAISQKVIDPDRLEALQNEVVQCLVSFELIFPPSFFNIMTHLLCHLVKEIRILGPMYLHNMFPFERYMGVLKKYVRNRARPEASIAKGYGTEEVIEFCVEFIEDLRPIGVPESRHEGRLRGKGTLGRKAIMTVDNNLFRKAHFTVLQHSSLVAPYIEEHLALVRARNIGKSDAWITRHHIDTFPAWLRQHLMGNESINQQLAFLARGPSGSIATFQGYEINGYTFYTRAQDMKSTNQNSAVRVDAMGHDGTTATYYGAIEDIWELDYGPLKVPLFRCQWVRLTGGGVMIDDSGMTTVDLNKVGYSDEPFVLANDVTQVFFVKDMSSKGKKGRGPDEPKRQVVLPGKRKIVGVEDKTDEDYDQLDGQPPFTVTIDPSILLSNEDTPYSRSDHKEGTIVRRKCFLYQQMADRDEEQILYDTIAEGSSQYWNEEEGNEDPNQYLNEEGNVERDAEGNQQGHVERDVEGNQEEEASGSQPSVGQKRARGQRGAAKKLEGRHIITEVEEDGRPSAPAEAAKNYVRHSGWVVRDNVPVSTVYWRRTRARGDHESFVQDSEKEMLWTTMLETFTLPAGTEDKVKRWTLKKMAEQFQSFKGDLYQKYILKGQTPNFDTFPKLRDHWDEFVAYKTGEQGKAMMERNKENAAKKKYHHHLGSGGYSVAMPKWEQMEASLIERGIEPATANWPERSKFWYYAHGGTLNPADGSLVFGYQIQEAVRRLTDAVEASSQGTFRPDRDRDELTLALQTPEHPGRTRGKGVIPWKIGFKEDIHTYRSRIRSKRDTEAKIADLEFRVSSYELNMQEEVARKVDERMAAHRSHDPQPTIPPAMVSPSGNRSSCASTGQVGSQSMDAMQTQDESTCPVDDITQRTPCELHIPFKNLSIKVASGMAIPTDPSGTYHCRPIPAGYSKVEVELVEGAYEDLELDYPGGDGETHLRDTCHAIILWRRRYIILPGRQAASRAPSPPAPPSPPQDPAPSPPHAPPAPSPPQAPASTPQDPAPTPPRAPTPTPPQAPVPAPSKSRAPPAPPLAHTRATKKAKVDAAKNKDPGYDCTQEELDAYVASEVKRQFKPRSPEKKIPIDPSVRNFFRGMSASVKEAIKLSDYEQTLKKASSGKSKPVPQLGEQPNQEIEPLVTGKEMTIEQFITDTGLTTDQLLGVAPIEKAEVKYMYESSLPTQMYKFHQLYMEMSATGREMIGARIRDTDFLQGDDILWINFRGIYELYQLDALDVSIMSCWILMEIQRARRRRVFDTGFIDPRKVNVAMLDQYPQETEDNLVHLLKAQHYKTFILLPYNTEFHWVLLLIDLEACTVNVYDSMDKKESTFDKVFELIDRAWYRFRHLVRGKWRERLRRKFKFPCAKQKQGTNLCGYYVCEYCHCLADQIITTRELDFIRMRDNLTTHKEFIAAVQEQLMGFINEEILDPKGEFYYDGNTIHRSLASELAASTTTSKS

SEQ ID NO: 119073 - protein, 356 aa, Oryza sativa
  Clone ID: PAT_MRT4530_22324C.1.pep
MALVRRESRAQELEFVHRSCGTAGYRPSVVSTSLPHLAATGCGHLLLPFVPVRERLRDAVESAFSCHFDLFIEFTGLIRWCEGTCCAWHFDDNKPYLRQRAFTDVVIYTADNSNTHCVDEVTEGERLTLTLWFTRDSAYDEDPKLLSFLSQTSLNYEPVHQSSYIPLPASDIMYWFAYDHSGFDVRCARVHILGFSFHSSIDEDNKSVAPAEDDPIELLGKPVRLGRGDDVFDKVFANGLHALQVVQFYYWKAPELSAKRKQTSGGSGTVCCPVSQSRGTKLPLPCNHGLEQTIFGSHKNVEIDFEWSDFELAVSMWENYSEELQRKLLTFLPYWLSSEAIFIVSSCSPQVCTEGN

SEQ ID NO: 119074 - protein, 2123 aa, Oryza sativa
  Clone ID: PAT_MRT4530_22325C.1.pep
MAKTDDPSHGSAAYAAGSASSQQETSEYERKRAAAATDQMDRQWMYADRRSKEFIDGVHYFLRVAEANRQRGFICCPCNKCKNQKEYSASRTIHFHLFESGFMPSYNCWTSHGEQGVEMEEDEVEDDNIPDFAQYVGFEGNQTGEEEIAADGNDVADDLGQMLQDAREDCESEKEAHKLDKMLEDHRTSLYPGCEQGHKKLDTTLELLQWKAKNGVSDKAFGDLLKLVKNILPGGNKLPETTYEAKKIVCPLGLEVHKIHACPNDCILYRGEEYENLEACPVYKALRYKIRRDDPGEVDGQLTKKRIPAKVMWYFPIIPRLRRLFRNKGNARMLRWHAEERQQDGMLRHPADGSQWRNIDRKFKEFGKDARNIRFGPKQPGNDIDVYLRPLVKDLKQLWKKKGVPVWDEDKQEEFNLRALLFVTINDWPALSNLSGQSNKGYKACTHCMDETESTYLKHCRKVVYMGHRRFLAANHPVRKKGKHFEHKADHRTKPKHRSGKTVFAMVKDLKVVFGKGPGSQHIESEDGHAAMWKKNSIFWELPYWEFLDVRHAIDVMHLTKNLCVNLLGFLGVYGKSKDTLEARNDLKHMEQRGDLHPEPKEKGSHYLSPASYTLSKAEKESMFECLESIKVPSGYSTNIKRIISTKEKKFINLKSHDCHVLMTQLLPVVIRGILPDNVRATITKLCAFMNAISQKVIDPDRLEALQNEVVQCLVSFELIFPPSFFNIMTHLLCHLVKEIRILGPMYLHNMFPVERYMGVLKKYVRNRARPEASIAKGYGTEEVIEFCVEFIKDLRPIGVPESRHEGRLRGKGTLGRKAIMTVDNNLFRKAHFTVLQHSSLVAPYIEEHLALVRARNIGKSDAWITRHHIDTFPAWLRQHLMGNESINQQLAFLARGPSGSIATFQGYEINGYTFYTRAQDMKSTNQNSAVRVDAMGHDGTTATYYGAIEDIWELDYGPLKVPLFRGMTTVDLNKVGYSDEPFVLANDVTQVFFVKDMSSKGKKGRGPDEPKRQVVLPGKRKIVGVEDKTDEDYDQLDGQPPFTVTIDPSILLSNEDTPYSRSDHKEGTIMADRDQEQILYDTIAEGSSQYWNEEEGNEDPNQYLNEEGNMERDAEGNQQGHVERDVEGNQEEEASGSQPSVGQKRARGQRGAAKKLEGRHIITEVEEDGRPSAPAEAAKNYVRHSGWVVRDNVPVSTVYWRRTRARGDHESFVPDSEKEMLWTTMLETFTLPAGTEDKVKRWTLKKMAEQFQSFKGDLYQKYILKGQTPNFDTFPKLRDHWDEFVAYKTGEQGKAMMERNKENAAKKKYHHHLGSGGYSVAMPKWEQMEASLIERAIEPVTANWPERSKFWYYAHGGTLNPADGSLVFGYQIQEAARRLTDAVEASSQGTFRPDRDRDELTLALQTPEHPGRTRGKWVIPWKIGFKEDIHTYRSRMRSKRDTEAKIADLEFRVSSYELNMQEEVARKVDERMAAHRSHDPQPTIPPAMVSPSGNRSSCASTGQVGSQSMDAMQTQDESTCPVDDITQRTPCELHIPFKNLSIKVASGMAIPTDPSGTYHCRPIPAGYSKVEVELVEGAYEDLELDYPGGDGETHLRDTCHAIILWRRRYIILPGRQAASRAPSPPAPPSPPQDPAPSPPHAPPAPSPPQAPASTPQDPAPTPPRAPTPTPPQAPLPAPSKSRAPPAPPLAHTRATKKAKVDAAKNKDPGYDCTQEELDAYVASEVKRQFKPRSPEKKIPIDPSVRNFFRGMSASVKEAIKLSDYERTLKKASSGKSKPVPQLGEQPNQEIEPLVTGKEMTIEQFITDTGLTTDQLLGVAPIEKAEVKYMYELGKPLVKPELLQSLPTQMYKFHQLYMEMSATGREMIGARIRDTDFLQGDDILWINFRGIYELYQLDALDVSIMSCWILMEIQRARRRRVFDTGFIDPRKVNVAMLDQYPQETEDNLVHLLKAQHYKTFILLPYNTEFHWVLLLIDLEACTVNVYDSMDKKESTFDKVFKLIDRAWYRFRHLVRGKWRERLRRKFKFPCAKQKQGTNLCGYYVCEYCHCLADQIITTRELDFIRMRDNLTTHKEFIAAVQEQLMGFINEEILDPKGEFYYDGNTIHRSLASELAASTTTSKS

SEQ ID NO: 119075 - protein, 342 aa, Oryza sativa
  unsure (1)..(342): unsure at all Xaa locations
  Clone ID: PAT_MRT4530_22326C.1.pep
MGCEKQHFDLRISLCRVSRPLVQRRGPQPFERPHEREAAPGGLVGLADIGDFVGGDGFRRRVAAADWLGKVAAADWLGKDGGKIDGREANRTLAPIYVRSKGKYLMEDKTGFGDSMEASDMDIEDEGNEDGTNESDHENIFNSPATEFASVDEQLVFTVDMYDPRNWDKLDHKARDILVEKGPIREENIEFPLDDNLTHFPYALFSRKMSNEKVHDGKWLAYSKHVDRVICFCCKIFNSRNCKSSLEHDGFRDWRHISERLKEHKASVKHITNMTSWNELRARLRKNETIDKDLQQQITKEKERIRQVLLRIIAIVKFLGKRNLAFRRSNEQFXNHQNGNFL

SEQ ID NO: 119076 - protein, 1078 aa, Oryza sativa
  Clone ID: PAT_MRT4530_22327C.1.pep
MDRQWMYADRRSKEFIDGVHYFLRVAEANRQRGFICCPCNKCKNQKEYSASRTIHFHLFESGFMPSYNCWTSHGEQGVEMEEDEVEDDNIPDFAQYVGFEGNQTGEEEIAADGNDVADDLSQMLQDAREDCESEKEAHKLDKMLEDHRTSLYPGCEQGHKKLDTTLELLQWKAKNRVSDKAFGDLLKLVKNILPGGNKLPETTYEAKKIVCPLGLEVHKIHACPNDCILYRGEEYENLEACPVCKGLRYKIRRDDPGEVDGELTKKRIPAKVMWYFPIIPRLRRLFRNKGNARMLRWHAEERQQDGMLRHPADGSQWRNIDRKFKEFGKDARNIRFGLSTDGMNPFGEMSSGHSTWPVTMCIYNLPPWLCMKRKYIMMPIIIQGPKQPGNDIDVYLRPLVEDLKQLWKKEGVPVWDEDKQEEFNLRALLFVTINDWPALSNLSGQSNKGYKACTHCMDETESTYLKHCRKIVYMGHRRFLAANHPVRKKGKHFEHKADHRTKLKHRSGKTVFAMVKDLKVVFGKGPGSQHIESEDGHAAMWKKNSIFWELPYWEFLDVRHAIDVMHLTKNICVNLLGFLGVYGKSKDTLEARNDLKHMEQRGDLHPEPKEKGSHYLSPASYTLSKAEKESMFECLESIKVPSGYSTNIKRIISTKEKKFTNLKSHDCHVLMTQLLPVVIRGILPDNVRATITKLCAFMNAISQKVIDPDRLEALQNEVVQCLVSFELIFPPSFFNIMTHLLCHLVKEIRILGPMYLHNMFPFERYMGVLKKYVHNRACPEASIAKGYGTEEVIEFCVEFIEDLRPIGVPESRQEGRLRGKGTLERKAIMTVDNNLFRKAHFTVLQHSSLVAPYIEEHLALVRARNIGKSDAWITRHHIDTFPAWLRQLLMGNESINQQLAFLARGPSGSIATFQGYEINGYTFYTRAQDMKSTNQNSAVRVDAIGHDGTTATYYGAIEDIWELDYGPLKVPLFRCQWVRLTGGGVMIDDSGMTTVDLNKVGYSDEPFVLANDVTQVFFVKDMSSKGKKGRGPDDPKRQVVLPVRPRLLHQHLDVFGHETLNFIINITFITTAFTILQE

SEQ ID NO: 119077 - protein, 628 aa, Oryza sativa
  Clone ID: PAT_MRT4530_22328C.1.pep
MPIIIQGPKQPGNDIDVYLRPLVEDLKLLWKKEGVPVWDEDKQEEFNLRALLFVTINDWPALSNLSGQSNKVYKACTHCMDETESTYLKHCRKVVYMGHHRFLAANHPVRKKGKHFEHKVDHRTKPKHRSGKTVFAMVKDLKVVFGKGPGSQPIESEDGHTAMWKKNSIFWELPYWEFLNVRHAIDVMHLTKNLCVNILGFLGVYGKSKDTLEARNDLKHMKQRGDLHPEPKEKGSHYLRPASYTLSKAEKKSMFECLESIEVPSGYSTNIKRIISTKEKKFTNLKSHDCHVLMTQLLPVVIRGILPDNVRATITKLCAFMNAISQKVIDPDRLEALQNDVVQCLVSFELIFPPSFFNIMTHLLCHLVKEISILGPVYLHNMFPFERYMGVLKKYVCNRAHPETSIAKGYGTEEVIEFSVEFIEDHRPIGVPESRHEGRLREKGTLGRKAIMTVDNNLFRKAHFTVLQQSSLVAPYIEEHLALVHARNIDQWVHILHESQNSAVRVDAMGHDGTTGTYYGAIEDIWELDYGPLKVPLFRCQWVRLTGGGVMIDDSGMTTVDLNKVGYSDEPFVVANDVTQVFYVKDMSSKGKKGRGPDEPKRHVVLPGKRKIVGVEDKTTIIFRSNCH

SEQ ID NO: 119078 - protein, 166 aa, Oryza sativa
  Clone ID: PAT_MRT4530_22329C.1.pep
MDASAGSGNASGGAGAGASACCYYSLLGIRKNASATDVRAAYRRLAMKWHPDRCVSDPGEANRRFQRIQEAYSVLSDKGKRAMYDAGLFDPLDDDDQDFSDFMQEMLVMMDNVKNEKPDTLEDLQKMLQDIVSGDGGSRGGGVGGRVPSDGTRRTRVAPYPAQSRR

SEQ ID NO: 119079 - protein, 277 aa, Oryza sativa
  Clone ID: PAT_MRT4530_2232C.1.pep
MAALRPTWSPPHLAVTAAPTSALAFLPLISQRRRLPSPAPARRIQLRSHCTKSPTESEPEHEDDGADDEDAAARSEHPAIIFQERLDKFLDDYRAALGLRTPPDMFRKEKYKIAVIMQKMYSSSSKILNADEKEMVSTVCRKARLALDLASEVMDVAAFGLGTTEISQRTADQMVRTYTTIFCEVANELYHNRVTMENILSFLDALGGLGAITHILVQDTVDKLHNGLLKKKITHDLDALSHKFDKEMNILKDNFKRETRIDGYKVLINMLIFWNRV

SEQ ID NO: 119080 - protein, 74 aa, Oryza sativa
  Clone ID: PAT_MRT4530_22330C.1.pep
FFFFYAKCRVGWLLLDDPYPRTVIVQNNNPTILLLPTSNILYGNSLYYQNHIRFWYALEGWRYIGTPNLVLKPH

SEQ ID NO: 119081 - protein, 2155 aa, Oryza sativa
  unsure (1)..(2155): unsure at all Xaa locations
  Clone ID: PAT_MRT4530_22331C.1.pep
MDRQWMYADRRSKEFIDGVHYFLRVAEANRQRGFICCPCNKCKNQKEYSASRTIHFHLFESGFMPSYNCWTSHGEQGVEMEEDEVEDDNIPDFAQYVGFEGNQTGEEEIAADGNDVADDLGQMLQDAREDCESEKEAHKLDKMLEDHRTSLYPGCEQGHKKLDTTLELLQWKAKNGVSDKAFGDLLKLVKNILPGGNKLPETTYEAKKIVCPLGLEVHKIHACPNDCILYRGEEYENLEACPVCKALRYKIRRDDPGEXVDGQLTKKRIPARVMWYFPIIPRLRRLFRNKGNARMLRWHAEERQQDGMLRHPADGSQXRNIDRKFKEFGKDARNIRFGLCTDGMNPFGEMSSGHSTWPVTMCIYNLPPWLCMKRKYIMMPIIIQGPKQPGNDIDVYLRPLVEDLKQLWKKEGVPVWDEDKQEEFNLRALLFVTINDWPALSNLSGQSNKGYKACTHCKDETESTYLKHCRKVVYMGHRRFLAANHPVRKKGKHFEHKADHRTKPKHRSGKTVFAMVKDLKVVFGNGPGSQPIESEDGHAAMWKKNSIFWELPYWEFLDIRHAIDVMHLTKNLCVNLLGFLGVYGKSKDTLEARNDLKHMEQRGDLHPEPKEKGSHYLSPASYTLSKAEKESMFECLESIKVPSGYSTNIKRIISTKEKKFTNLKSHDCHVLMTQLLPVVIRGILPDNVRATITKLCAFMNAISQKVIDPDRLEALQNEVVQCLISFELIFPPSFFNIMTHLLCHLVKEIRILGPMYLYNMFPFERYMSVLKKYVRNRACPEASIAKGYGTEEVIEFCVEFIEVLRPIRVPESRHEGRLRGKGTLGRKAITTVDNNLFRKAHFTVLQHSSLVAPYIEEHLALVRARNIGKSDAWITRHHIDTFPAWLRQHLMGNESINQQLAFLARGPSGSIATFQGYEINGYTFYTRAQDMKSTNQNSAVRVDAMGHDGTTATYYGAIEDIWELDYGPLKVPLFRCQWVRLTGGGVMIDDSGMTTVDLNKVGYSDEPFVLANDVTQVFFVKDMSSKGKKGRGPDEPKRQVVLPVRPRLLHQHLDVFGRSISLGLSPSPPLSRANPRADAAVSRRRLELVVLAAASASSAVAASLRCFLYQRMADRDEEQILYDTIAEGSSQYWNEEEGNEDPNQYLNEEGNVERDAEGNQQGHVERDVEGNQEEEASGSQPSVGQKRARGXRGAAKKLEGRHIITEVEEDGRPSAPAEAAKNYVRHSGWVVRDNVPVSTVYWRRTRARGDHESFVPDSEKEMLWTTMLETFTLPAGTEDKVKRWTLKKMAEQFQSFKGDLYQKYILKGQTPNFDTFPKLRDHWDEFVAYKTGEQGQAMMERNKENTAKKKYHHHLGSGGYSVAMPKWEEMEASLIERGIEPATANWPERSKFWYYAHGGTLNPADGSLVFGDQIREAARRLTDAVEASSQGTFRPDRDRDELTLALHTPEHPGRTRGKWVIPWKIGFKEDIHTYRSRMRSKRDTEAKIADLEFRVSSYEVNMQEEVARKVDERMAAHRSHDPQPTIPPAMVSPSVNRSSCASTGQVGSQSMDAMQTQDESTCPVDDITQRTPCELHIPFKNLSIKVASGMAIPTDPSGTYHCRPIPAGYSKVEVELVEGAYEDLELDYPGGDGETHLRDTSHAIILWRRRYIILPRRQAASRAPSPPAPPSPPQDPAPSPPHAPPAPSPPQAPASTPPQDPAPTPPRAPTPTPPQAPLPAPSKSRAPPAPPPAHTRATKKAKVDAAKNKDPGYDCTQEELDAYVASEVKRQFKPRSPEKKIPIDPSVRNFFSGMSTPVKEAIKLSDYERTLKKASSGKSKPVPQLGEQPNQEIEPLVTGEDMTREEFIIDTGLTTDQLLGVEPIEKAELKYMYELGKPLVKPELVQSLPTQMYKFHQLYVEMSATGREMIGARIRDPDFLQGDDILXINFKGIYEVYQLDALDVSIMSCWTLMEIQRARRRRVFDTGFIDPRRVNVAMLDQYPQETEDNLVHLLKAQHYKTFILLPYNTEFHWVLLLFDLSACTVNVYDSMDKKESTFDKVFELIDRAWFRFRHLVRDNXRERLRRRFKFPFIRMRDNLTTHKEFIAAVQEQLMGFINEEILDPKGEFYYDGNIIHRSLASELAATTTTLPPRALCLGRERSWTSRRWQNTKVWN

SEQ ID NO: 119082 - protein, 866 aa, Oryza sativa
  Clone ID: PAT_MRT4530_22332C.1.pep
MSSSLVNNSVDPSVNQGVPTSIILVWTQVGEIVFPVYTTVPVSIGPSVIGNENAVAITPDDPTPKDPPAEAENGTSTTSKPEENPSAAKSCPSDKNHEPTRTTSEATRSWCPIHKTRKHTLQACWVFLNAQAEIRACKERGIQRTSSTRDVYCPIHKTKNHDLSSCKILLKAMKTSPPKVQQSQISPRDVNKERGATVISDRFVGVIDVNPHEPSVLHSLEDQGSSSTSTPRDVFAIEGTSASAHADTEAENQVVTPAQHIGAINAILRETSYDPVLNDDLARNAFEEAAAAAHPEQSPAGGANGAPPEQRASPRQATPPPRGTSDLRDHLNGRQEARRAQDNENRSRYRLYSRCRENEERGGHPSENRDRDNRHNHHERDDHEQRMPGDTGRGRRHNDGDDGDRRRDDNDRHPRRTYDRRQPTAPSAGCRAFNRSLRDVRWPKRFRPGAIEKYDGSTDPEEFLQVYSTVLYAAGADDNALANYLPTALKGSARSWLMHLPPYSISSWADLWHQFVANFQGTYKCHAIEDDLHALTHNPGESLRDYVRRFNECRNTIPEITDASVIRTFKTGVRDRYTTQELATRRITTTRRLFEIVDRCAHADDALRRKNDKPKTGGEKKPAKDAPEPSKKKSSKSGKRKAQAEVLTSEYERPPKHPDLQGSDTKRIWCPIHKSDRHKKVAGKATGIGEGQASSTTYSSKQEYKKVEREVCSTWQGAAPKMKWSEQKIKFSDEDHPKAAIISGRYPIVAEPTIWNIKVARVLIDGGNSINLLFASTLDAMGIPRSELTPTDQPFHGITPQSSSKPLGKITLPMTFGQANNFRTEQITFDVAEFDTAYNVIIGRTALVKFMAASFQTFLVQQLKIN

SEQ ID NO: 119083 - protein, 49 aa, Oryza sativa
  Clone ID: PAT_MRT4530_22333C.1.pep
PSHKLLLLSRPQSLIGCALQKLIHFSLVTPSLAPARPTRQPTACQLNLT

SEQ ID NO: 119084 - protein, 1066 aa, Oryza sativa
  unsure (1)..(1066): unsure at all Xaa locations
  Clone ID: PAT_MRT4530_22334C.1.pep
MDRQWMYADRWSKEFIDGVHYFLRVAKANRQKGFICCPCNKCKNQKEYSASRTIHFHLFESGFMPSYNCWTSHGEQGVKMEEDEVEDDNIPDFTQYAGFEGNQTGEEERDADGNNVADDLGQMLQDAKEDCESENGAHKLDKMLEGHRTSLYPGCEQGHKKLDTTLEFLXWKAKNGVSDKAFGDLLKLVKNILPEGNKLPETTYEAKKIVCPLGLEVQKIHACPNDCILYRGEEYENLEACPVCKALRXKFRRDDPGEVDGQLTKKRIPAKVMWYFPIIPRLRRLFRNKGNARMMQWHAEERQQDGMLRHPADGSQWRNIDRKFKDFGKDARNIRFGLSTNGMNPFGEMSSGHSTWPVTMCIYNLPPWLCMKRKYIMMPIIIQGPKQPGNDIDVYLRPLVEDLKLLWKKEGVPMWDEDKQEEFNLRALLFVTINDWPALSNLSGQSNKGYKASTHCMDETESTYLKHCRKVVYMGHRRFLAANHPVRKKGKHFEHKADHRMKPKHRSGKTMFAMVKDLKVVFGKGPGSQPIESEDGHAAMWKKNSIFWELPYWEFLDVRHAIDVMQLTKNLCVNLLGFLGLYGKSKDTLEACNDLKHMEQHGDLHPEPKEKGSHYLSPASYTFSKAEKESMFKCLESIKVPSGYSTNIKRIISTKEKKFTNLKSHDCHVLMTQLLPVVIRGILPDNVRATITKLCAFMNVILQKVIDPDRLEALQNDVVQCLVSFELIFPHSFFNIMTHLLCHLVNEIGILGPVYLHNMFPFERYMGILKKYVRNRARPEASIAKGYGTEEVIEFCVEFIEALRPIGVPESRHEGRLRGKGTLGRKAIMTVDNNLFRKAHFTVLQQSSLVASYIEEHLALVRARNIGKSDAWITRHHIDTFSTWLRQYLMGNETINQQLAFXARGPSGSIXTFQGYEINRYTFYTRAQDMKSTNQNSAVRIDAIGHDGTTGTYYGAIEDIWELDYGPLKVPLFQCQWVRLTGGGVTINDSGMTTVDLNKVGYSDEPFVLVNDVTQVFYVKDMSSKGKKGKGPDEQKHHVVLPVRPRLFHQHLAVFRSRLLLRRYRA

SEQ ID NO: 119085 - protein, 429 aa, Oryza sativa
  Clone ID: PAT_MRT4530_22335C.1.pep
MASTPASTKEFLLQQCWVDSSRRNRLPGLHHGAGLDWSINDRKRERRGYNPGQFHVEGSSHISGEQNVDDIQAREGSYVSARADTEAENQVVTPAQHIGAINAILRETPYDPVLNDDLAQWTERLPESVTNLNNAFEEAAAVAHPEQPPAGGANGAPPEQRASPRQATPPPRGTSDLRDHLNGRREARRAQDNENCSRHRLSSRRRGNEERGGQPSENRDRDNCHNCHEHDDREQRMPGDTGRGRRHNDDDDGDRRRDDNGGRRQDSREPGRHPWNRTLEPSDPSSSSSSSSSSSFRPGAIEKYDGSTDPEEFLQVYSTVLYAAGADDNALANYLPMALKRYARSWLMHLPPYSISSWADLWQQFVANFQGTYKRHAIEDDLHVLTQNPSKSLRDYVRRFNECRNTIPEIIDASVIRVFKTGVRDCYTT

SEQ ID NO: 119086 - protein, 987 aa, Oryza sativa
  Clone ID: PAT_MRT4530_22336C.1.pep
MRRGTSRGTWKGMWRVNQEEEASGSQPSVRQKRARGQRGAAKKLEGRHIITEVEEDGRPSAPAEAAKNYVRHSGWVVRDNVPVSTVYWRRTRARGDHESFVPDSEKEMLWTTMLETFTLPAGTEDKVKRWTLKKMAEQFQSFKGDLYQKYILKGQTSNFDTFPKLRDHWDEFVAYKTGEQGQAMMERNKENAAKKKYHHHLGSGGYSVAMPKWEQMEASLIERGIEPATANWPERSKFWYYAHGGTLNPADGSLVFGYQIQEVARRLTDAVEASSQGTFRPDRDRDELTLALQTPEHPGRTRGKGVIPWKIGFKEDIHTYRSRMRSKRDTEAKIADLEFRVSSYELNMQEEVARKVDECMAAHRSHDPQPTIPPAMVSPSGNRSSCASTGQVGSQSMDAMQTQDESTCPVDDITQRTPCELHIPFKNLSIKVASGMAIPTDPSGTYHCRPIPAGYSKVEVELVEGAYKDLELDYPGGDGETHLRDTCHAIILWRRRYIILPGRQAASRAPSPPAPPSPPQDPAPSPPHAPPAPSPPQAPASTPPQDPAPTPPRAPTPTPPQAPLPAPSKSRAPPAPPLAHTRATKKAKVDADPGYDCTQEELDAYVASEVKRQFKPRSPEKKIPIDPSVRNFFRGMSASVKEAIKLSDYERTLKKASSGKSKPVPQLGEQPNQEIEPLVTGKEMTIEQFITDTGLTTDQLLGVAPIEKAEVKYMYELGKPLVKPELLQSLPTQMYKFHQLYMEMSATGREMIGARIRDTDFLQGDDILWINFRGIYELYQLDALDVSIMSCWILMEIQRARRRRVLDTGFIDPRKVNVAMLDQYPQETEDNLVHLLKAQHYKTFILLPYNTEFHWVLLLIDLEACTVNVYDSMDKKESTFDKVFELIDRAWYRFRHLVRGKWRERLRRKFKFPFIRMRDNLTTHKEFTAAVQEQLMGFINEEILDPKGEFYYDENTIHRSLASELAASTTTSKSRAAAAGGGRRRPS

SEQ ID NO: 119087 - protein, 63 aa, Oryza sativa
  Clone ID: PAT_MRT4530_22337C.1.pep
VQILQSLKTNRLAVLAVMSGIWICVEYRLVFILLNAEIYFQIVMRFENDLLAAMDGNEVHIHT

SEQ ID NO: 119088 - protein, 781 aa, Oryza sativa
  Clone ID: PAT_MRT4530_22338C.1.pep
MEEDEVEDDNILDFAQYAGFEGNQTGEEERDADGNNVADDLGQMLQDAKEDCESEKRAHKLDKMQKNGVSDKAFGDLLKLVKNILPEGNKLPETTYEAKKIVCPIGLEVQKIHACPNDCILYRGEEYENLEACPVCKALRYKIRRDDPGEDDGQLTKKRIPAKVMWYFPIIPRLRRLFRNKWNARMMRWHAEERQQDGMLRHPADGSQWRNIDRKFKDFGKDARNIRFGLSTDGMNPFGEMSSGHSTWPVTMCIYNLPPWLCTKRKYIMMPIIIQGPKQPSNDIDEGVPVWDEDKQEEFNLRALLFITINDWPALSNLSGQSNKGYKACTHCMDETESTYLKHCRKVVYMGHRRFLVANHPVRKKGKHFEHKADHRTKPKHRSGKTVIAMVKDLKELPYWEFLDVRHAIDVMHLTKNLFVNLLGFLSVYGKSKDTLEARNDLKHMEQRGDLHPEPKEKGSHYLSPASYTISKAEKESMFECLESIKIPSGYSTNIKRIISTKEKKFTNLKSYDCHVLMTQLLPVVIRGILPDNVQATITKLCAFMNAISQKVIDPDRLEALQNDVVQCLVSFELIFPPSFFNIMTHLLCHLVKEIGILGPVYLHNMFPFERYMGVLKKYVRNRARPEASIAKGYGTEEVIEFRVEFIEDLRPIGVLESRHEGRLRGKGTLGRKTIMTVDNNLFRKAHFTVLQQSSLVAPYIEEYLALVRARNIGKSDAWITRHHIDTFSTWLRQHLMGNETINQQLAFLATGPSGSIATFQGYEINGSTFYTRAQDMKSTD

SEQ ID NO: 119089 - protein, 69 aa, Oryza sativa
  Clone ID: PAT_MRT4530_22339C.1.pep
FTRRISEVVPAGVHPAYRPCLPWRLVLSIPCSPISYIRYHQLGPHAKPPLSFNLLLFAIVPVTRWVPIP

SEQ ID NO: 119090 - protein, 60 aa, Oryza sativa
  unsure (1)..(60): unsure at all Xaa locations
  Clone ID: PAT_MRT4530_2233C.1.pep
MSAMSAAGGGGGVGKVERLSSIDAQXRQLVPAKCSEDDKLIEYDGLLLDRFLDVLHGLTG

SEQ ID NO: 119091 - protein, 186 aa, Oryza sativa
  Clone ID: PAT_MRT4530_22340C.1.pep
NPSQLLLGIALISVAGSASTQDAHTAATLTSWASSYLSRMPSSQPPNDPSATSSRLPESPSHPPEVSDPPIGSPIASAAINPSTMSSHLPVEGSHRRFRPPPEVFDPPIKTPLIAAVLHLAPMPLPGHYSRLRGVEHLHRASTMDLPQALIPLVIKPAPKSTSIAKYGRKLHRRSKTMTTPRHDIW

SEQ ID NO: 119092 - protein, 1772 aa, Oryza sativa
  Clone ID: PAT_MRT4530_22341C.1.pep
MDRQWIYADRRSKEFIDGVHYFLRVAEANRQRGFICCPCNKCKNQKKYSASRTIHFHLFESGFMPSYNCWTSHGEQGVEMEEDEVEDDNIPDFAQYVGFEGNQTGEEEIAADGNDVADDLGQMLQDAREDCESEKEAHKLDKMLEDHRTSLYPGCEQGHKKLDTTLELLQWKAKNGVSDKTFGDLLKLVKNILPGGNKLPETTYEAKKIVCPLGLEVHKIHACPNDCILYRGEEYENLEACPVCKALRYKIRRDDPGEVDGQLTKKRIPAKVMWYFPIIPRLRHLFRNKGNARMLRWHAEERQQDGMLRHPADGSQWRNIDRKFKEFGKDARNIRFGPKQPGNDIDVYLRPLVEDLKQLWKKEGVPVWDEDKQEEFNLRALLFVTINDWPALSNLSGQSNKGYKACTHCMDETESTYLNHCRKVVYMGHRRFLAANHPVRKKGKHFEHKADHRTKPKHRSGKTVFAMVKDLKVVFGKGPGSQHIESEDGHAAMWKKNSIFWELPYWEFLDVRHAIDVMHLTKNLCVNLLGFLGVYGKSKDTLEARNDLKHMEQRGDLHPEPKEKGSHYLSPASYTLSKAEKESMFECLESIKVPSGYSTNIKRIISTKEKKFTNLKSHDCHVLMTQLLPVVIRGILPDNVRATITKICAFMNGISQKVIDPDRLEALQNEVVQCLVSFELIFPPSFFNIMTHLLCHLVKEIRILGPMYLHNMFPFERYMGVLKKYVRNRARPEASIAKGYGTEEVIEFCVEFIEDLRPIGVPESRHEGRLRGKGTLGRKAITTVDNNLFRKAHFTVLQHTSLVAPYIEEHLALVHARNIGKSDVWITRHHIDTFPAWLRQHLMGNESINQQLAFLARGPSGSIATFQGYEINGYTFYTRAQDMKSTNHNSAVRVDAMGHDGTTATYYGAIEDIWELDYGPLKVPLFRCQWVRLTGGGVMIDDSGMTTVDLNKVGYSDEPFVLANDVTQVFFVKDMSSKGKKGRGPDEPKRQVVLPGKIKIVGVEDKTDEDYDQLDGQPPFTVTIDPSILLSNEDTPYSRSDHKEGTIVRRKYMADRDEEQILYDTIAEGSSQYWNEEEGNEDPNQYLNEEGNVERDAEGNQQGHVEKDVEGNQEEEASGSQPSVGQKRARGQRGAAKKLEGRHIITEVEEDGRPSAPAEAAKNYVRHNDHESFVPDSEKEMLWTTMLETFTLPAGTEDKVKRWTLKKMAEQFQSFKGDLYQKYILKGQTPNFDTFPKLRDHWDEFVAYKTGEQGQAMMERNKENAAKKKYHHHLGSRMWSKRDTEAKIADLEFRVSSYELNMQEEVARKVDERMAAHRSHDPQPTIPPAMVASGMAIPTDPSGTYHCRPIPAGYSKVEVELVEGAYEDLELDYPGGDGETHLRDTCHAIILWRRRYIILPGRQAASRAPSPPAPPSPPQDPAPSPPHAPPAPSPPQAPASTPPQDPAPTPPRAPTPTPPQAPLPAPSKSRAPPAPPPAHTRATKKAKVDAAKNKDPGYDCTQEELDAYVASEVKRQFKPRSPEKKIPIDPQCQELLQGGIYELYQLDALDVSIMSCWILMEIQRARRRRVFDTGFIDPRKVNVAMLDQYPQETEDNLVHLLKAQHYKTFILLPYNIEFHWVLLLIDLEACTVNVYDSMDKKESTFDKVFELIDRAWYRFRHLVRGKWRERLRRKFKFSCAKQKQGTNLCGYYVCEYCHCLADQIITTRELDFIRMRDNLTTHKEFIAAVQEQLMGFINEEILDPKGEFYYDGNTIHRSLASELAASTTTSKS

SEQ ID NO: 119093 - protein, 104 aa, Oryza sativa
  Clone ID: PAT_MRT4530_22342C.1.pep
ICLVSAAAARFLSQLLLHNMQRSKFNSISTSMDEYAVKLLRNSIKGKAMVCQSPSTAPPPNSPARTPPPPPWPPSGNSKSRVSLSQLLPFDSFSLSRNGGRSLK

SEQ ID NO: 119094 - protein, 288 aa, Oryza sativa
  Clone ID: PAT_MRT4530_22343C.1.pep
MRRRLSPPYRACTAAALRRRPSRETPPYALGAAAAEVRRRFLAGNYRIRRRKLLRTPTNAVPSSTPPHTAYKDAPPAARDLATQTTSASVKIRGKNRLNQSLSRVEPLLDAGLFALGFVQPYATKYAAFETIPSCKYLVNTSKQPMGSTRSDFRLIAIDLVASRSRQVACRLLSRRTTRVLCLAISLSNATHRKARATPPKVFESTDRERRSPPTSINPSMRPHVSLSRVAHRKVRATCPKCPTRRLDRQSLPPPSTRAPRLVISLLKAAIDGFGRRQKCSIHRSRLR

SEQ ID NO: 119095 - protein, 2112 aa, Oryza sativa
  unsure (1)..(2112): unsure at all Xaa locations
  Clone ID: PAT_MRT4530_22344C.1.pep
MDRQWMYADRWSKEFIDGVHYFLRVAEANMQKGFICCPCNKCKNQKEYSACRTIHFHLFESGFMPSYNCWTSHGEQGVEMEEDEVEDDNIPDFAQYAGFEXNQTGEEERDADGNNIADDLGQMLQDAMEDCESEKGAHKLDKMLEDHRTSLYPGCEQGHKKLDTTLEFLQWKAKNGVSDKAFGDLLKLVKNILPEGNKLPETTYEAKKIVCPLGLKVQKIHACPNDCILYRGEEYENLEACLVCKALRXKIRRDDPGEVDGQLTKKRIPAKVMWYFPIISRLRRLFRNKGNARMMRWHAEERQQDGMLRHPADGLQWRNIDRKFKDFGKDARNIQFGLSTDGMNPFGEMSSGHSTWPVTICIYNLPPWLCMKRKYIMMPIIIQGPKQPGNDIDVYLRPLVEDLKLLWKKEGVPVWDEDKQKEFNLRALLFVTINDWPALSNLSGQSNKGYKACTHCMDETEITYLKYCRKVVYMGHRRFLAANHPVRKKGKHFEHKADHRTKPKHRSGKTVFAMVKDLKVVFGKGRGSQPIESEDGHAAMWKKNSIFWELSYWEFLDVRHAIDVMHLTNNLCVNLLGFLGVYGKSKDTLEARNDLKHMEQRGDLHPEPKEKGSHYLSLASYTLSKAEKESTFECLESIKVPSGYSTNIKRIISTKEKKFTNLKSHDCHVLMTQLLPVVIRGILPDNVRAIITKLCAFMNAISQKVIDPHRLEALQNDVVQCLVSFELIFPPSFFNIMTHLLCHLVKEIGILGPVYLHNMFPFERYMGVLKKYVRNRARPEASIAKGYGTEEVIEFCVEFIEDLRPIGIPESRHEGRLRGKGTLGKKAIMTLDNNLFRKAHFTVLQQSSLVALYIEEHLALVCTKNIGKSDAWITRHHIDTFSTWLRQHLMGNETINQQLAFLARGPSGSIATFQVYEINGYTFYTRAQDMKSTNQNSAVRIDAMGHDGTTGTYYGAIEDIWELDYGPLKVPLFRCQWVRLTGGGVTIDDSGMTTVDLNKVGYSDEPFVLANDVTQVFYVKDMSSKEKKGKVTDEPKRHVVLPVRPRLLHQHLAVFRSXSASPSPPPCLGQPRADTAVVSRRRLVVLAASAADAAAASLGCFLYAQMADRDEEQILYETIAEGSSQYWNEEGNVERENRYYTIQSQREAASXWNEEGNVERDAEGNDAEEASGSQPSAGQKRARGQRGAAKKIEGRHIITEVDEDDRPSAPAEAARNFVRHSGWVVRDNVPISTVYWRRTRARGDDDSFVPDSEKEMLWTTLLETFTLPAGTDNLVKXWTLKKMAEQFXSFKGDLYKKYILKGLTXNFDVFPKLRDHWDEFVAYKTGQQGQEMMARNKENAAKKKYHHHLGSGGYSVAKPKWEEMEASLLEGGIEPATAKWPDRSKFWYYAHGGTLNPVDGSLVFSDQICEAASRLTDAVVASSQGTFRPDREKDELSLALQTPEHPGQTRGKGVIPXKIGFKEDIHTYRSRMRSKRDTEAKIADLEYRVSSYELSMQEEVARKVDERMAAHRSQDPQPYIHPTMVSTSGNRSSCASTGQVGSQSMDAVQTXDATTCPVDEITQRTPCELHIPFKNLSIKVASGMAIPTDPSGTYHCRPIPAGYSRVEVELVEAAYEDLELDYPGGDGETHLRDTSHAIILWRKRYIILPGRQAASCAPSPPAPPSPPAPSPPAPSPPVPLPRPPAPSPPAPPPPPAAPSPPAPPPPPCPPAPPKTRSCQAPPPARTRATKKAKVDATKNKEPPYDCSQEELDAYAAXEVKRQLKPRSPEKKIPIDPSVKNFFKGMSKTNKEALQISDYDRTLQRAYHKKSKPVPQLGEQPNQEVEPLVTGEDFGITDFIADIGLSVDQLVGGAPIPKAEVAYKFELGKPLVKPEQLESLPTQMYKFHERYMEMSSNSREMFGARIRNPDFLQGDDVLWIHFKDLFDLYQLDALDVSLLSAWILMEIQRARRRRVYDTGFIVPRKINTEMIDKYEKDTEDNLVHLLTQQHFKTYILLPYNTEFHXVLLFFDLDACRVTVYDSMNKEEKIFDMVFKLIDRAWDRFRQLVRGTWKEKLGRRFHFPRIHMRDNLPHKDFITAVQEQLMVFINEEVLNPDGEFYYDGSTIHNVGPSS

SEQ ID NO: 119096 - protein, 131 aa, Oryza sativa
  unsure (1)..(131): unsure at all Xaa locations
  Clone ID: PAT_MRT4530_22345C.1.pep
TNRLISRSRQIXCRLPSRRTTRALRLAVSLSNAAHQKARATPPRVFXSTDRERRSPPASINPSVWPHVSLLRVAHQKVRATCLKCPTHRLDRQSLPPPSTRAPHLVISLLIAAIERFXRRLKCPIPPIKFR

SEQ ID NO: 119097 - protein, 78 aa, Oryza sativa
  unsure (1)..(78): unsure at all Xaa locations
  Clone ID: PAT_MRT4530_22346C.1.pep
PGGEKPPAKKPPGFPPLGLLYPPXCKKSRPNFVTSSRPSWVKPFGRQDSPKKRVQRLLDGGDDPRGPFLLPHPYPFNQ

SEQ ID NO: 119098 - protein, 170 aa, Oryza sativa
  unsure (1)..(170): unsure at all Xaa locations
  Clone ID: PAT_MRT4530_22347C.1.pep
VSPASSASAATIAIHHAPHRQHIKKQHVETTRSYFRLNTINQVTSRSRQVVCRIXSHRTTRALRLAISLSNAAHRKAQTTPPRVFESTDRERXSPLASINPSMRPHVSLSRVAHWKVRATRLKCPIHRLIRQSLPRPSTRAPRLVISLLKAAINGSGRLQKCSIHRSRLR

SEQ ID NO: 119099 - protein, 289 aa, Oryza sativa
  unsure (1)..(289): unsure at all Xaa locations
  Clone ID: PAT_MRT4530_22348C.1.pep
MAKATCISLLVVVALATAASAQLSATFYDTSCPRAMSIIKSAVTAAGCDASVLLSGNEQDAPPNKDSLRGYGVIDSIKAQIEAVCNQTVSCADILTVAARDSVVALGGPTWTVPLGRRDSTGASAALAISDLPPFTASLQELVDAFAKKGLSVTDMVALSGAHTIGQAQCSTFRGRIYNETNIDSAFATQRQANCPRTSGDMNLAPLDTTTANAFDNAYYTNLLSNKGLLHSDQVLFNNGSTDNTGRNFASNAAEFSSAFATAMVNMGNIAPKTGTNGQXRLSCSKVNS

SEQ ID NO: 119100 - protein, 47 aa, Oryza sativa
  Clone ID: PAT_MRT4530_22349C.1.pep
TCLMLAPNPGGKERSQREFRELARPPGFPGFKAPYILANAWALGFPK

SEQ ID NO: 119101 - protein, 82 aa, Oryza sativa
  Clone ID: PAT_MRT4530_2234C.1.pep
ALYSSLDVPQGLGLPQSFARVGPRSPGLVVFMGGVPFAKNAALRFLGSQEGVGYDFLVAPPKVVNGDPIPGPFLPHSKGVVI

SEQ ID NO: 119102 - protein, 151 aa, Oryza sativa
  unsure (1)..(151): unsure at all Xaa locations
  Clone ID: PAT_MRT4530_22350C.1.pep
SSTQLHQHHGSTRSDFRLTXVNLAASRSRQITCRLLSHRTTRVLRLAISLSNAAHRKAQATPPRMFDSTDRERRSPPASINPERXPHVSLLRVAHRKVRATRPKCPTHRLDRQSFLPPSNRAPRLVISLLIAAIERFXRRLKCPIPSIKFR

SEQ ID NO: 119103 - protein, 311 aa, Oryza sativa
  Clone ID: PAT_MRT4530_22351C.1.pep
MAKATCISLLVVVALATAASAQLSATFYDTSCPRAMSIIKSAVTAAVNSEPRMGASLLRLHFHDCFVQGCDASVLLSGNEQDAPPNKDSLRGYGVIDSIKAQIEAVCNQTVSCADILTVAARDSVVALGGPTWTVPLGRRDSTGASAALAISDLPPFTASLQELVDAFAKKGLSVTDMVALSGAHTIGQAQCSTFRGRIYNETNIDSAFATQRQANCPRTSGDMNLAPLDTTTANAFDNAYYTNLLSNKGLLHSDQVLFNNGSTDNTVRNFASNAAAFSSAFATAMVNMGNIAPKTGTNGQIRLSCSKVNS

SEQ ID NO: 119104 - protein, 272 aa, Oryza sativa
  unsure (1)..(272): unsure at all Xaa locations
  Clone ID: PAT_MRT4530_22352C.1.pep
RAAAPLDLGKPPALQEIAAPPWSAVAEDPDADSSAGSRRRRRKLLPELRRKPRRAPRRCAPPAMTPPVARELAAPNHAAHKIRGKISLEPDLSRXDASLDALGLVLPSTAXYAAFEAILPCKYLVKTSXKQPIGSTRSDFRLNAINLVASRSQQVACHLPSRRTTRALRLAVSLSNATHRKAWATPPRVFESTDRERRSPPASINPSVRPHVSLSRVAHRKVRATRPKCLTHRLICQSLPPPSTRAPSLVISLLKAAIDGSGRRQKCSIHRS

SEQ ID NO: 119105 - protein, 155 aa, Oryza sativa
  unsure (1)..(155): unsure at all Xaa locations
  Clone ID: PAT_MRT4530_22353C.1.pep
MQYLSLTPPKQPVGSTRSDFRLNAINLVASRSRQVACRLPSHRTTRALRLAISLSNAAHXKAQATPPRVFXSTDQERRSPPASINPSMGPHVSLLRVAHRKVRATXPKCPTHRLDRQSLPPPSTRAPRLVISLLKAAIXGSDRRLKCSIHRSNSV

SEQ ID NO: 119106 - protein, 156 aa, Oryza sativa
  Clone ID: PAT_MRT4530_22354C.1.pep
MDGVRSGAIWESPDGESSDIFPSLDLTTSTDYLAAVDDGIPEGFEAAPWPRRPPQPRGLLDDLASASASSVLSGGNGQGQSPVVPSLRPPAHPQVRLASPYPQMPSLAVAMGSSGGAARAAATEGEGWKGNFVKSPTEEAKMISKMHKTAKMAKWR

SEQ ID NO: 119107 - protein, 62 aa, Oryza sativa
  Clone ID: PAT_MRT4530_22355C.1.pep
KEKSIYSLNYFIGHLTAIYLFLAYICYLFIFTLLHNGISPFCVPLCKLYFTLKFNRMIDECI

SEQ ID NO: 119108 - protein, 283 aa, Oryza sativa
  unsure (1)..(283): unsure at all Xaa locations
  Clone ID: PAT_MRT4530_22356C.1.pep
SPSPDAPPPPAPHAAALRHRPXQETPPPASGRRVAKVRRRFHAGNRRRKPLLELRRTPPSTTPPTTAKHHLPTTAMTSATDLLSSXIFLIXLETVELDLSRVXEPAPDASLDALGLVLPSTANTPPLKCKYLVNTSXKQPIGSTPSDFRLNAINLVTSQSRQVACRLPSRRTTRALRLAVSLSNVAHRKARATPPRVFESTDRERRSPPASINPSVRPHVSLSRVAHRKVRATRPKCPTHRLDRQSLPPPSTRAPRLVISLLKAAIDGSGRRQKCSIHRSRLR

SEQ ID NO: 119109 - protein, 83 aa, Oryza sativa
  Clone ID: PAT_MRT4530_22357C.1.pep
MGSGPAEAADEAASGGLPSGGGCAAAGLPKRQRQWVGRQRTAGRPPLVQICAVGGEAGRRMGVPVCNPGLRGVANRDYRAIPQ

SEQ ID NO: 119110 - protein, 255 aa, Oryza sativa
  Clone ID: PAT_MRT4530_22358C.1.pep
MPPSAAAAAAMAQSPRSLHTLISFGRGADGVDDDEATPASVDVGDAEGAGLDLDFAFAPPVSAAELAPADDIFAHGRIVPAYPVFDRSLLDLSPGDASTAAPSADTYCAWTPRSAPGSPGRDRFPKSASTGGESSSSSRRWRLRDLVGAGGRSRSDGKDKFAFLHHHAAAPPSSKLKTPPPPQQPQQKKQSAVKTKPAAKKGVVTEMDMATAHRLFYSKASAGGDRRPQQASYLTYRPAFSGLFALGRSQHHTAY

SEQ ID NO: 119111 - protein, 94 aa, Oryza sativa
  Clone ID: PAT_MRT4530_22359C.1.pep
WLPVTFLFINNLFFHHQCCPQLLLVAQQFLFQTIRIVQAFVHQIQMQQFRGVYFGQTQGQAQTLFPFNFPSKSGISPNNKRAPRSIAPVGGVWA

SEQ ID NO: 119112 - protein, 51 aa, Oryza sativa
  Clone ID: PAT_MRT4530_2235C.1.pep
PASGPTGRRGAPLFCPRLSPPRRRCPNPCPFFRPRMVINSPAFFIPLIMCS

SEQ ID NO: 119113 - protein, 68 aa, Oryza sativa
  Clone ID: PAT_MRT4530_22360C.1.pep
LACPRPEVKLLHFQILHIKIQERAKAIGVSSNSKSQEQLATPAESQEPVKLCFLHFLLAKATPVTFLL

SEQ ID NO: 119114 - protein, 151 aa, Oryza sativa
  Clone ID: PAT_MRT4530_22361C.1.pep
MECSSTASVCTTWVTGKNHSTVASLETPLYQQLSSYDRLLTNVDTVFDEDRGFISTILKMVETTKWPIILTSNKKDPPLPHLLAQLVLDFTYPSSAELLSHVDMICKSEGVEITVPQQKHIIDAFLGDIRRTMMLLQFWYQGKQQYSGWVL

SEQ ID NO: 119115 - protein, 129 aa, Oryza sativa
  unsure (1)..(129): unsure at all Xaa locations
  Clone ID: PAT_MRT4530_22362C.1.pep
MSILLILLSPRPGFYNLVMLVFIGVLADKLSRHCIGLXGLHTTGFYWIILLPSCIIISQLYIISSRLPLYCYIRFYIKHIADSSKPYRYWLDQTDWHVRISSSFGPALELSRSPRPVCVFCVNRPPPIS

SEQ ID NO: 119116 - protein, 152 aa, Oryza sativa
  unsure (1)..(152): unsure at all Xaa locations
  Clone ID: PAT_MRT4530_22363C.1.pep
EFNSSTGRRPGEAGGGDPAAGDVAAVAAAADTTLGLLLSALMQHYDPSXRHFLLEKDVPSPWWPERTEAWRSHRRPGCVDGGAPVRSDVVGPEHVLADAELAKVVEDGDHVRCSLSTGFVISFLFFFLPFHDLLDVDGHGALICSLQFEQDL

SEQ ID NO: 119117 - protein, 192 aa, Oryza sativa
  unsure (1)..(192): unsure at all Xaa locations
  Clone ID: PAT_MRT4530_22364C.1.pep
TDAACLLDPSARSCTHGASPVQEHVPKLGMQFLSEQEDYDFYNKYTFKIGFSIKRGIQHLVKXSSTIKQRAFCCSREGTRAEDKREETFNYNRPETRCNCEARMKISLRNXLYRVYEFVAAHIHILAPQDQAHYLRSQRKVIEAHIANAELVKSVGISSKATINLTAKEADGLHNLGFTREHTKNRLYSKRP

SEQ ID NO: 119118 - protein, 40 aa, Oryza sativa
  Clone ID: PAT_MRT4530_22365C.1.pep
MGSIGISSLRIVTTITITPITPITDTQCREWNDNEASLEI

SEQ ID NO: 119119 - protein, 82 aa, Oryza sativa
  Clone ID: PAT_MRT4530_22366C.1.pep
MGDSPWGSYIVTLRYVVRHQMSKKCPTQTIPADRIRCPFIERTWTAGCRCLGIDESPAWISLATGTQPPRAPHRSSWPPGVQ

SEQ ID NO: 119120 - protein, 56 aa, Oryza sativa
  Clone ID: PAT_MRT4530_22367C.1.pep
MAVVAAQNSSGNHVNSGGSKSVGQQERAARVSGETAKTALLPDAAMGVPDLSMRGG

SEQ ID NO: 119121 - protein, 2202 aa, Oryza sativa
  unsure (1)..(2202): unsure at all Xaa locations
  Clone ID: PAT_MRT4530_22369C.1.pep
MVERRAAALAIVALAERRSSFLTENCKSNIKLMRSRKAIKCFLPRWCKLYARCILGGHDAQPEATGDHDGTSFGVQGGDPQSAAPLPPGLSACMDRQWMYADRRSKEFIDGVHYFLRVAEANRQRGFICCPCNKCKNQKEYSASRTIHFHLFESGFMPSYNCWTSHGEQGVEMEEDEVEDDNIPDFAQYVGFEGNQTGEEEIAADGNDVADDLGQMLQDAREDCESEKEAHKLDKMLEDHRTSLYPGCEQGHKKLDTTLELLQWKAKNGVSDKAFGDLLKLVKNILPGGNKLPETTYEAKKIVCPLGLEVHKIHACPNDCILYRGEEYENLEACPVCKALRYKIRRDDPGEVDGQLTKKRIPAKVMWYFPIIPRLRRLFRNKGNARMLRWHAEERQQDGMLRHPADGSQWRNIDRKFKEFGKDARNIRFGLSTDGMNPFGEMSSGHSTWPVTMCIYNLPPWLCMKRKYIMMPIIIQGPKQPGNDIDVYLRPLVEDLKQLWKKEGVPVWDEDKQEEFNLRALLFVTINDWPALSNLSGQSNKGYKACTHCMDETKSTYLKHCRKVVYMGHRRFLAANHPVRKKGKHFEHKADHRTKPKHRSGKTVFAMVKDLKVVFGKGPGSQHIESEDGHAAMWKKNSIFWELPYWEFLDVRHAIDVMHLTKNLCVNLLGFLGVYGKSKDTLEARNDLKHMEQRGDLHPEPKEKGSHYLSPASYTLSKAEKESMFECLESIKVPSGYSTNIKRIISTKEKKFTNLKSHDCHVLMTQLLPVVIRGILPDNVRATITKICAFMNAISQKVIDPDRLEALQNEVVQCLVSFELIFPPSFFNIMTHLLCHLVKEIRILGPMYLHNMFPFERYMGVLKKYVRNRARPEASIAKGYGTEEVIEFCVEFIEDLRPIGVPESRHEGRLRGKGTLGRKAITTVDNNLFRKAHFTVLQHSSLVAPYIEEHLALVRARNIGKSDAWITRHHIDTFPAWLRQHLMGNESINQQLAFLARGPSGSIATFQGYEINGYTFYTRAQDMKSTNQNSAVRVDAMGHDGTTATYYGAIEDIWELDYGPLKVPLFRCQWVRLTGGGVMIDDSGMTTVDLNKVGYSDEPFVLANDVTQVFFVKDMSSKGKKGRGPDEPKRQVVLPGKRKIVGVEDKTDEDYDQLDGQPPFTVTIDPSILLSNEDTPYSRSDHKEGTIMADRDEEQILYDTIAEGSSQYWNEEEGNEDPNQYLNEEGNVERDAEGNQQGHVERDVEGNQEEEASGSQPSVGQKRARGQRGAAKKLEGRHIITEVQEDGRPSAPAEAAKNYVRHSGWVVRDNVPVSTVYWRRTRARGDHESFVPDSEKEMLWTTMLETFTLPAGTEDKVKRWTLKKMAEQFQSFKGDLYQKYILKGQTPNFDTFPKLRDHWDEFVAYKTGEQGQAMMERNKENAAKKKYHHHLGSGGYSVAIPKWEEMEASLIERGIEPATANWPERLKFWYYAHGGTLNPADGSLVFGDQIREAARRLTDAVEASSQGTFRPDRDRDELTLALQTPEHPGRTRGKGVIPWKIGFKEDIHTYRSRMRSKRDTEAKIADLEFRVSSYELNMQEEVARKVDERMAAHRSHDPQPTIPPAMVSPSGNRSSCASTGQVGSQSMDAMQTQDESTCPVDDITQRTPCELHIPFKNLSIKVVSGMAIPTDPSGTYHCRLIPPGYSKVEVELVEGAYEDLELDYPGGDGXPAPSPPHAPPAPSPPQAPASTPPQDPAPTPPRAPTPTPPQAPLPAPSKSRAPPPXAPPPAHTRATKKAKVDAAKNKDPGYDCTQEELDAYVASEVKRQFKPRSPEKKIPIDPSVRNFFRGMSAPVKEAIKLSDYERTLKKASSGKSKPVPQLGEQPNQEIEPLVTGEDMTIEEFIIDTGLTTDQLLGVAPIEKAELKYMYELGKPLVKPELVQSLPTQMYKFHQLYVEMSATGREMIGARIRDPDFLQGDDILWINFKGIYEVYQLDALDVSIMSCWTLMEIQRARRRRVFDTGFIDPRRVNVAMLDQYPQETEDNLAHLLKAQHYKTFILLPYNTEFHWVLLLFDLSACTVNVYDSMDKKESTFDKVFELIDRAWFRFRHLVRGNWRERLRRRFKFPCAKQKQGTNLCGYYVCEYCHCLADQIITTRELDFIRMRDNLTTHKEFIAAVQEQLMGFINEEILDPKGEFYYDGNIIHRSLASELAATTTTSKS

SEQ ID NO: 119122 - protein, 101 aa, Oryza sativa
  Clone ID: PAT_MRT4530_2236C.1.pep
PILKIFFFYRPKSACMHIACWVHPGGPPPSGFFLRRSLLPLLNRFWVTMGSPLALKIGPFFFIKKFFKFFGGKKKKKKKKKKKKKKKKKKIKKHKILKNQK

SEQ ID NO: 119123 - protein, 836 aa, Oryza sativa
  unsure (1)..(836): unsure at all Xaa locations
  Clone ID: PAT_MRT4530_22370C.1.pep
MVKFSKQFEGQLVPEWKHAFVDYSLLKKDLKRMQHDYSPQGTIITTSTPHDHHQQQQSVAAPSSYNLSHCRLLLHKLPAAFFGSNNADHAGAIQVRRRVGRGEVYETEVTPEMETTAATAAREFFARLDAQLNKVNHFYKAKEEEFLHRGHSLRKQMDILLDLKSRSSSSLSGHHRAAAGDDPSISSSSATSGAVTMVSGKLVVREDGDELAEDESTRYVTSATDTDESQHETAVMRDPEELSAEQGLEDSGSLSRQSLGRTVSSCQRKNLKINIPLTTPCRTISALTDLLRDDLVSQPKNKCDSDAGITFTTINKTKLRHAEKMIKGAFIELYKGLGYLTTYRNLNMMAFVKILKKFEKVSGKQVLSVYLRAVESSYFNSSGEALKLMDEVEDVFVRHFAAGNRRKAMKYLKPTQRKESHTVTFFIGXHDGMLRGAVLGLLHHGAHRRNVHAAARLHLHGDRLPCFQHVQPNVPAPVHVRVQHGGVEEGPDQLQLHLRVRGRKRAQVPGRLPRLHRIHGRHRRRHVRAPLPRRQGIPRPGHPRILAPGXFLLLLFCPFNMVYRSTRFQFLRILRNIVFSPLYKVVMVDFFMADQLCSQVPMLRSLEYVACYYISGSYRTQEYGYCINTKHIRDLAYAVSFLPYYWRAMQCARRWFDESDTGHLVNLGKYVSAMLAAGAKVAYEKDRSLGSLSLLVIVSSSATMYQLYWDFVKDWGLLQPNSKNPWLRNDLILKSKSIYYLSMGLNLVLRLAWLQTVIHPNFGSLDSRVTSFFLAALEVIRRGHWNFYRLENEHLNNAGKFRAGSAFREWQLYATEDSDPFLDALTCIKYASQYRK

SEQ ID NO: 119124 - protein, 691 aa, Oryza sativa
  unsure (1)..(691): unsure at all Xaa locations
  Clone ID: PAT_MRT4530_22371C.1.pep
MLETFTLPAGTEDKVKTWTLKKMAEQFQSFKGDLYQKYIMKGQTPNFDTFPKLMDHWDEFVAYKTADGSLVFGDQIREAARRLTDALKASSQGTFRPDREKDELSLALQTPEHLGQTRGKGVIPWKIGFKEDNHTYRSRMRIKRDTEAKIADLEFRVSSYELSLQEEVARKVGSQSMDAMQTQDETTYPVDDITQRTPCELYIPFKNLSIKVASGMAIPTDPLGTYHCRPIPAGYSXGSCTDSSSGSYTDSSSGSSSGTFXKSRAPKAPPPTPTRATKKAKVDAAKNKDPGYDCTQEELDAYVASEVRRQFKPRSLEKKIPIDPSVRNFFRGMSAPAKEAIKLSDYERTLKKASSGKSKLVPQLGEQPNQEIEPLVTGEVFGIQDFINDIGLTTDQLLRDAPIEKAEVKYMCELGKPLLKPELLPSLPTQMYKFHQLYMEMSATGREMIGARIRDTDFLQGDDILLINFKGIYELYQLDALDVSIMSRWILMEIQRAQRRGVFDSGFIDPRKVNVAMLDQYPQATEDNLVHLLKAQHYKTFILLPYNTEFHWVLLLFDLEACTFNVYDSMDKKESTFDKVFELIDRAWYRFRHLVRGKWRERLRQKFKFPCAKQKQGTNLCGYYMCEYCHCLADQIITTRELDEFIAAVQEQLMRFINEQILDPKGEFYYDGNTIHMSLASEIATTTTSKS

SEQ ID NO: 119125 - protein, 1015 aa, Oryza sativa
  unsure (1)..(1015): unsure at all Xaa locations
  Clone ID: PAT_MRT4530_22372C.1.pep
MADRDEEQILYDTIAEGSSQYWNEEEGNEDPNQYLNKEGNVERDAEGNQQGHVERDVEGNQEEEASGSQPSVGQKRAHGQRGAPKKLEGRHIIIKVEEDGRPSAPXAEAAKNYVHHSGWVVQDNVPVSTVYWRTTRARGDHESFVPDSEKEMLWTTMLKTFTLPAGTEDKVKRWTLKKMAEQFQSFKRDLYQKYIPKGQTPNFDTFPKLRDHWDEFVAYKTGKQGXAMMERNKENAAKKKYYHHLGSGGYSVAMPKWEEMEASFIERGIEPATANWPERSKFWYYAHGGTLKPVDGSLVFGDQIREAVRRLTDAVEASSQGTFRPNRDRDELTLTLQTPEHPGRTRGKGVIPWKIGFKEDIHTYRSRMRSKRDTEAKIADLEFRVSSYELRMQEEVARKVDERMAAHRSHDPQPTIPPAMVSPSGNHSSCASTGQVGSQSMDAMQTQDESTCPVDDITQRTPCELHIPYKNLSIKVASGMAIPTDPSGTYHYRPIPAGYSKVEVELVEGAYEDLELDYPGGDGEMHLXDTSHAIILWRRRYIILPGRQAASRAPSPPAPPSPPQDPAPSPPHAPPAPSPPQALAPTPPXDPASTPPRAPTPTPPQAPLPAPSKSRAPLAPPPAHTRATKTANVDTAKNKDPGYDCTQEELXSEVKRQFKPRSPEKKIPIDPSVRNFFRGMSAPVKEAIKLSDYERMLKKASSVKSKPXPQLGEQPNQEIEPLVTGEDMTIEEFIIDTGLTTDQLLGVEPIEKAELKYMYELGKPLVKPELVQSLPTQMYKFHQLYMEMSATGREMIGARIRDPDFLQGDDILWINFKGIYEVYQLDARDVSIMSCWILMEIQRARRRRVFDTGFIDPRRVNVAMLDQYPQETEDNLVHLLKAQHYMTFILLPYNTEFHWVLLLFDLSACIVNVYDSMDKKESTFDKVFELIDRAWYRFRHLVRGNWRERLRRRFKFPFIRMRDNLTTHKEFIVAVQEQLMGFINEEILDPKGEFYYDGNTIHRSLASELAASTTT

SEQ ID NO: 119126 - protein, 860 aa, Oryza sativa
  Clone ID: PAT_MRT4530_22373C.1.pep
MAEQFQSFKGDLYQKYILKGQTLNFDTFPKLRDHWDEFVAYKTGEQGQSMMERNKENTAMKKYHHHLGSGGYSVAMPKWEEMEASLLERGIEPATANWPKRSKFWYYAHGGMLNPADGSLVFDDQIREAARRLTDTVEASSQGTFRPDREKDELSLALQTPEHPGRTRGKGVIPWKIGFKEDIHTYRSRMRSKRDTEAKIADLKFRVSSYELSMQEEVARKVDERMAAHRSHDPQPTIPPTMVSRSGNRSSCASTGQVGSQSMDAMQTQDETTCPVDDITQQTPCELHIPFKNLSIKVASGMAIPTDPSGTYHCRPIPTGYSKVEVELVEGAYEDLELDYLGGDGETHLRDTSHTIILWRKRYIILPGRQAASRAPSPLAPPSPPQAPAKSPPHAPAPSPPQAPAPTPPQAPTPTPPQAPLPAPSKSRAPQAPPPAPTRATKKAKVDTAKNKDPGYDCTQEELDAYMASEVRRQFKPRSPEKKIPIDPSVRNFFRGMSAPATDAIKLSDYERTLKKASSGKSKPVPRLGEQPNQEIEPLVTGEDFGIQDFINDTGLTTDQLLRDAPIEKAEVKYMYELGKPLVKPELLQSLPTQMYKFHQLYMEMSATGREMIGARIRDTDFLQGDDILWINFKGIYELYQLDALDVSIMSCWILMEIQRARRREVFDTGFIDPRKVNVAMLDQYPQATEDNLVHLLKAQHYKTFILLPYNTEFHWVLLLFDLETCTVNVYDSMNKKESTFDKFFELIDRAWYRFRYLCVKQKQGTNLCSYYVCEYCHCLADQIITRRELDFIHMRDNLITHKEFIAAVQEQLMGFINEQILDSKGEFYYDGNTIHRSLASEIATTTTSKSYLARTYNGL

SEQ ID NO: 119127 - protein, 1853 aa, Oryza sativa
  unsure (1)..(1853): unsure at all Xaa locations
  Clone ID: PAT_MRT4530_22374C.1.pep
AAARSSTKGVRRTKSLISRTSHSFAVFLFPVFVVDLQAKANLELKKKKVMDACMDRQWMYADRRSKEFIDGVHYFLRMAEANRHKGFICSCNKCKNQKEYSASRTIHFHLFESGFMPSYNCWTSHGEQGVEMEVDEVEDDNIPDFDQYAGFEGNQTGEEERDADGNDVADDLGQMLXDAKEDCESEKGAHKLDKMLEDHRTSLYPGCEQGHKKLDTTLEFLQWKAKNDVSDKAFGDLLKLVKNILPEGNKLPETTYETMKIVFPLGLEVQKIHAYPNDCILYRGEEYENLEACLVCKALRYKIRRDDPGEVDRQLTKKRIPAKVMWYFPIIPRLRRLFRNKGNARMMRWHAEERQQDGMLRHPADGSQWRNIDRKFKDFGKDARNIRFGLSMDGMNPFGEMSSGHSTWPVTMCIYNXPPWLCMKRKYKMMPIIIQGPKQPGNDIDVYLRPLVEDLKLLWKKEGVPLWDEDKQEKFNLRALLFVTINDWPALSNLSGXSNKGYKACTHCMDKTKSVYGKSKDILEARNDLKHMEQHGDLHPEPKEKGSHYLSPASYTLSKAEKESMFECLESIKVPSGYSXRIISTKEKKFTNLKSHDCHVLMTQLLPVVIRGILPDNVPAIITKLCAFMNAISQKVIDPDRLEALQNDVRYMGVLKKYVRNRARPEASIAKGYGTEEVIEFCMEFIENIRPIGVPESHHEGRLRGKGTLGRKAIMTVDNNLFCKAHFTVLQQSSLVAPYIEEHLALVRARNIGKSDAWITRHHIDTFPAWPRQHLMGNETINQQLAFLARGPSGLITTFQGYEINGYTFNTRAXDMKSTNQNSDVRIDAIGYDGTTGTYYGAIEDIWKLDYGPLKVPLFWCQWVRLTGGGVMIDDSGMTTVDLKKVGYSDEPFVLANDVTQVFYMKDISSKGKKGKGPDEPKRHVVLLGKRKIVGVEDKTDEDYDQLDGQPPFTVTIDPSILLSNEDTPYSRSDHKEGTIYLNEEGNVESDAEGNQEGNVERDVERNQEEEASGSQPSAGQKRARGQRGAVNKLEGRHIITEVDEDGRPSAPAEAAKNYVRHSGWVVRDNVPVSTVYWRRTRARGEHESFVPDSEKEMLWTTMLETFTLPAGTEDKVKRWTLKEMAEQFQSFKGDLYQKYILKGQTPNFDTFPKLRDHWDEFIAYKTGQQGQAMMERNKXNAAKKKYHHHMGSGDYSIAMPKWEEMEASLLERGIEPATAKWPNRSKFWYYAHGGTLNPADGSLVFSDQIREAARRLTDAVKAFSQGTFRPDREKDELSRMRSKRDTEAKIADLEYRVSSYELSMQEEVARKVDERMAAHRSHDPQPTIPPAMVSHSGNHSNCASTGQVASGMAIPTNPSGTYHCRPILAGYSKVEVELVEGAYEDLELDYPGGDGETHLRDTSHAIILWRKRYIILPGRQAASRAPSPPAPPPQAPSPTPPQAPTPTPPQAPRPAPSKSKAPQAPAPAPTRATKKAKLDATKNKDPGYDCTQEELDAYVASEVRRQLKPRSPEKKIPIDPSARNFFRGMSAPAKEAIKLSDYERTLKKASSGKSKPVPQLGEQPNQEIEPLVTGEDFGIQEFINDTGITTDQLLRGAPIKKVEVKYIXELGKPLVKPEQLQSLPTQMYKFHQLYMEMSATGREMIGGRIRDTDFLQGDGILWINFKGIYELYQLDALDVYIMSCWILMEIQRARRWGVFNTGFIDPRKVNVTMLDQYPQATEDNLVHLLKAQHYKTFILLPYNTELNVYDSMDKKESTFDKVFELIDRAWYRFCHLVRGKWRERLRRKFNFPFIPMRDNLITHKEFIAAVQEQLMGFINEQILDPKGEFYYDGNTIHRSLASEITTTTTSKS

SEQ ID NO: 119128 - protein, 77 aa, Oryza sativa
  Clone ID: PAT_MRT4530_22375C.1.pep
MAPDEMASLRRACRASRSHSPQGDDLGAQRGFGGCPWGSGDGQELRSICGFRSLARASHAGKVSGASSVARRESRLV

SEQ ID NO: 119129 - protein, 1690 aa, Oryza sativa
  unsure (1)..(1690): unsure at all Xaa locations
  Clone ID: PAT_MRT4530_22376C.1.pep
YIMMPIIIQDPKQPGNDIDVYXRPLVEDLKLLWKKEGVPVWDEDKQEEFNLRALLFVTINDWPALSNLSGQSNKGYKACTRCMDETESTYLKHRRKVVYMGHRLFLVANHPVQKKGKHFEHKADHRTKSKHRSGKTVFAMVKDLIVVFGKGPGSQPIESEDGHTAMWKKNSIFWELPYXEFLDVRHAIDVMHLTKNLCVNLLGFLGLYGKSKDTLEACNDLKHMKQRKEKGSHYLSLASYTLSKVEKESMFECLESIKVPSGYSTNIKXIISTKEKKFTNLKSHDCHVLMTQLLPVIIRGILPDNIRATITKLCAFINVISQKVIDPDRLEALQNDVVQCLVSFELIFPPSFFNIMTHLLCHLVKEIGILEPVYLHNMFPFERYIGVLKKYVRSRAHPEASIAKGYGTEEVIEFCVEFIEDLHPIGXPESRHEGRLREKKTLGRKAIMTVDNNLFRKSHFTVLQQSSLVAPYIKEHLSLVRARNIGKSDAWITQHHIDTFPTWLRQHLMGNETINQQLAFLARGPSGSITTFQGYEINGYTFYTRAQDMKSTNQNSVVRIDAMGHDGTTGTYYGAIENIWELDYGPLKVPLFRCQWVRLTGGGVTIDDSGMTMVDLNKVGYSDEPFVLASDVTQVFYMKDMSSKGKKGKGTDEPKRHVVLPMRPRLLHQHLEVFSPISASPLPPLPRASPHRXAAVSRRRLVVVVVAASVADAAAASPGKYFLYKQMADRDEEQILYDTIAEGSSQYWNEEEGNEDPNQYLNEEGNVQRDVEGNEEGNVERDAVGNDEEEASGSQPSARQKRARGXRGAAKKLEGRHIITEVDEDGRPSALAEVAKNYVXHNGWVVRDNVPVSTVYWRRTRARGDHESFVPYSEKEMLWTTMLETFTLPTGIENIVKRWTLKKMAEQFQSFKGDLYQKYIMKGQTPNFNTFPKLRDHWDEFVSYKTGQQGQAMMERNKENAAXKKKYHHHLGSGGYSVAMPKWEEMEASLLERGIEPATAKWPDRSKFWYYAHGXGTLNPVDGSLVFSDQIREAASRLTDAVEASSQGTFQPDREKDELSLALQTPEHPGRTRGKGVIPWKIGFKEDIHTYRSRMRSKRDTEAKIADLEYRVSSYELSMQEEVVRKVDERMSAHRSQDPXPYIPPAMVSPSGNRSSCASTGQVGSQSMDAMQTQDETTCPFDEITQRTPCELHIPFKNLSIKVASGMAIPTDPXGTYHCRPIPAGYSKVEVDLVEAAYEDVELDYPRGDGETHLRDTSYAIILWRKRYIILPGRQAASRAPSPPAPPSPPQAPAPSPLLRXPAPSPPQAPAPTPPQAPAPTPPRAPAPTPPQAPRPAPSKSRSHQAPPPARTRATKKAKVDTAENKELGYDCTQEELDAYVAAEVKRQLKPRSPEKKIPIDPSARNFFRGMSAPAKEAIKLSDYERTLKKAYSGKSKPVPXLGEQPNREIEPLVTGEEFGIKEFIFDTVLTTDQLLRGAPILKTEVKYKYELGKPLVKPEQLQSLPTQMYKFHQLYMEMSATGREMIGARIRDTDFLQGKDILWINFKGIYELYQLDALDVSIMSCWILMEIQRARRRGVFDTGFIDPRKVNVSMIDKYPQAIEDNLVHLLKAHHYKTFILLPYNTQFHXVLLLFDLEAYAVNVYDSMDKKESTFDQVFELIDRAWYRFRHLVRGKWKERLRWKFKFPVS

SEQ ID NO: 119130 - protein, 110 aa, Oryza sativa
  unsure (1)..(110): unsure at all Xaa locations
  Clone ID: PAT_MRT4530_22377C.1.pep
MDGESPAAAAAALRLAAVARRWLENPRDSLARSREEGCGDAFNTVVMPGFRVSLAEPGRLVCSFCVPAAFAXDADGRXHAGAMAAAVDNLCAGGVYTADGVHRFTISQAM

SEQ ID NO: 119131 - protein, 49 aa, Oryza sativa
  Clone ID: PAT_MRT4530_22378C.1.pep
TPPLTLNGITTSLSQALQFIQQKDRVHAQMVQSLRSQSFCQATGKYDSL

SEQ ID NO: 119132 - protein, 1148 aa, Oryza sativa
  Clone ID: PAT_MRT4530_22379C.1.pep
MADRDEEQILYDTIAEGSSQYWNEEEGNEDPNQYMNEEGNVERDAEGNQEGHVERDVEGNQEEEASGSQPSVGQKRARGQRGAAKKLEGRHIITEVEENGRPSAPAEAAKNYVRHSGWAVRDNVPVSTVYWRRTRARGDHESFVPDSEKEMLWTTMLETFTLPAGTEDKVKRWTLKKMAEQFQSFKGDLYQKYILKGQTPNFDTFPKLRDHWDEFVAYNTGEQGQAMMERNKENAAKKKYHHHLGSGGYSVAMPKWEEMEASLLERGIKPATANWPERLKFWYYGHGGTLNPADGSLVFGDQIREAARRLTDAVEASSQGTFRPDRERDELSLALQTPEHPGRTRGKGVIPWKIGFKEDIHTYRSRMRRKRDTEAKIADLEFRVSSYELSMQEEVARKADERMAAHRSHDPQPTIPPAMVSPSGNRSSCVSTGQVGSQSMDTMQTQDESTCPVDDITQRTPCELHIPFKNLSIKVASSMAIPTDPSGTYHCRPIPAGYSKVEVELVEGAYEDLELDYPRGDTPSPPQAPAPTPPQAPTPTPPQAPLPAPSKSRAPQAPPPAHTRATKKAKVDAAKNKDSGYDCTQEELDAYVASEVKRQFKPRSPEKKIPIDPSVMNFFRGMSAPAKEAIKLSDYERMLKKASSGKSKPVPQLGEQPNQEIEPLVTGKEMMIEEFITDTGLTTDQLLGVAPIEKAEVKYMYELGKPLVKPELLQSLPTQMYKFHQLYMEMSATGREMIGARIRDTNFLQGDDILWINFKGIYELYQLDALDVSIMSCWILMEIQRARRWGVFDTGFIDPRKVNVAMLDQYPQATEDNLVHLLKAQHYKTFILLPYNTEFHWVLLLFDLSTCTVNCAKQKQGTNLYGYYVCEYCHCLADQIITTRELDFVSPVGVRPVVRSMDRRPPLAVSPRRLRPRPHRAAAAGAAPRPPVACSVQTPPGSIKKATTPMRSSFCALPTSRLEPTPRAKLDFAAAPSPARAAVAAGKENRHVDDEVSLDLTAMAMPTPMPTWTASPLPPPTSPLFERGRLYDLYSARRNERLKRKHGFPAGEEEAEAMAADPCVAVELSKRRGAKKMTGAESVRRSMPAAADFSAAGRAATSTLGLRSSLRSSKEMKKTSAASSSFAGAKSPAAKERRASTRSSARRF

SEQ ID NO: 119133 - protein, 93 aa, Oryza sativa
  Clone ID: PAT_MRT4530_2237C.1.pep
MEKKSSAAPCDITQFQLLIFGIRSNYMQYYSSADNMAPDNLIIALTPKNDRWKIKVKVTRLWDAVNPTMADDFYGIQMIVLDAEGNSIRVKVK

SEQ ID NO: 119134 - protein, 1018 aa, Oryza sativa
  Clone ID: PAT_MRT4530_22380C.1.pep
MAEAVKHHVSYEKKLLSLISNLLSEPRWLAGAMSEHTPPRPSCSPPPTPPRSRSPLVRPSQTPPCHNPAESPPCRGRGRGERQPFAAQPRVVRESSAAVHYPVLTRTNYEECALFMTVNQQAQGLWHAVEPYEDEEIEYRDDRLVLAAILRVVPPEMLRSLSTKRTVKSAWEAIKTVCVGTRRVREANEQLLRREFADARFKDGENIDDFSMRIFGIANSIRTLGGDLPEIDVIAISIETLLDIRDLSIKEVTVRLRSVEKCKAKPKEVVDSGGRLMLTEEQWLARLKNREQGGESSGTTPGAAANNSGKKRGNRRRRGRGQEHPGDKCHNCSKMGHWAKDCRSKAKKAEAHIATKDDDEPTLLMARACLVQRRCPPAEPTSKITPVLAHLDGDPDPADLWYLDTGVTNHMTGARSVFSELNTAVTGSVVTIEGYGTILFACKNGEHRGLTGVYYIPRLTVNLISLGQLDENGCESLGDMVRGLPLIDHVDQVCDSYLAGKQRCAPFPAHAKHFAEHLLDLVHGYLCGPILPAMLGGNHYFLLLVDDVSRYIWLTLLASKDQAPAAIKRFQAAAELESGCKLKVLRTDRGEETASFKEAEQHKSWRHAMMEEMESITHNKTWVLVDPPPSHRPIRLKWVYKVKQDERGVIVKYKARLIAKGYIQQAGIDFEEVFAPVARMESVRLLLAVAAHAGWGVHHMDVKSAFLNGELAEEVQGDAKLIVGVYVDDLIITGANQANIGEFKKEMCNIFKMSDLRLLSYYLGLESAYADKLLYKSGMGDCNSCATPMEIHLKLSKASSSPPVSATSYRSIIGGLRYLVNTRPDIAHAVGYLSRFMEEPHEDHQAAVKHVLRYIGRTRHHGVHYARGKGGWLELHGFSDSDMAGDLDTRRSTSGVLLPRLQSCLLAISETEGGHTIILARLLSDLLDSEPGAPEIMVDNKSAIAITKNPVFHDRSKHIDTRYHFIRECVENGKIVINYIRIEEQLAAVLMKPLGRVPFQELCNGIGIVELKGDGDKN

SEQ ID NO: 119135 - protein, 445 aa, Oryza sativa
  Clone ID: PAT_MRT4530_22381C.1.pep
MADRDEEQILYDTIAEGSSQYWNEEEGNEDPNQYLNEEGNVERDAEGNQEGHVERDVEGNQEEEASGSQPFVGQKRTRGQRGAAKKLEGWHIITEVEEDGRPSAQAEAAKNYVRHSGWVVRDNVPSFKGELYKKYILKGQTPNFDTFPKLRDHWDEFVAYKTGEQGQAMMERNKENAIKKKYHHHLVSGGYSVAMPKWEEMEASLLERGIEPATANWPERSKFWYYAHGGTLNPADGSLVFGDQIREAARRLTDAVEASSQGTFRPDRERDELSLALQTPEHPGRTRGKGVIPWKIGFKKDIHTYRSRMSKRDTEAKIADLEFRVSSYELSMQAEVARKVGSQSMDAMQTQDESTCPVDDITQRTPCELHIPFKNLSIKVASGMAISTDPSSTYHCRPIPAGYSKVKVELVEGAYEDLELDYPGGDVWDPDNSGARTCPYPHSKC

SEQ ID NO: 119136 - protein, 1802 aa, Oryza sativa
  unsure (1)..(1802): unsure at all Xaa locations
  Clone ID: PAT_MRT4530_22382C.1.pep
MDRQWMYADRRSKEFINSVHYFLRVAEANRQRGFICCPYNKCNNQKEYSASRTIHFHLFESGFMPSYNCWTSHGEQGVEMEEDEVEDDNIPDFAQYVGFEGNQTGEEERDADGNDVADDLGQMLQDAKEDCKSEKGAHKLDKMLEDHRTSLYPGCEQGHKKLDTTLEFLQWKVKNRVSDKAFGDLLKLVKNILPEGNKLPETTYEAKKIVCPLGLEVQKIHACPNDCILYRGEEYENLEACPVCKALRYKIRRDDPGEVDGQLTKKRIPAKVMWYFPIIPQLRRLFRNKGNARMMRWHAEERQQDGMLRHPADGSQWRNIDRKFKEFGKDARNIRFGLSTDGMNPFGEMSSGHSTWPVTMCIYNXPPWLCMKRKYIMIPIIIQGPRQPGNDIDVYLRPLVEDLKLLCKKEGVPVWDEDKQEEFNLRALLFVTINDWPALSNLSEQSNKGYKACTHCMDETESVYGKSKDTLEARNDLKHMEQRGDLHPEPKEKGSHYLSLASYTLSKAEKESMFECLESIKVPSGYSTNIKRIISTKEKKFTNLKSHDCHVLMTQLLPVVIRGILPNNVRATITKLCAFMNVISQKVIDPDRLEALQNDVRYMGILKKYVRNRARPESSIAKGYGTEEVIEFCVEFIEDLRPIGVPESRHEGRLRGKGTLGRKAIMTVDNNLFRKAHFMVLQQSSLVAPYIEEHLALVHARNIGKSDAWITRHHIDTFPAWLRQHLMGNESINXQLAFLARGSSGSIATFQEYEINGYTFYTRAQDMKSTNQNSAVRVDAMGHDGTTGTYYGAIEDIWELDYGSLKVPLFRCQWVRLTGGGVMIDDSGMTTVDLNKVGYSDEPFVLANDVTQVFYVKDMSSKGKKGRGPDEPKRHVVLPGKRKIVGVEDKTDDNYDQLDGQPPFTVTIDPSILLSNEDTPYSRSDHKEGTIYFNEEGNVERDAEGNQEGHVERDVEWNQEEEASGSQPSVGQKRACGQRGAAKKLEGRHIITEVDEDERPSAPAEAAKNYVRHSGWVVRDNVPVSMVYWRRTRARGDHESFVPDSEKEMLWTTMLEIFTLPAGTEDKVKRWTLKKMAEQFQSFKGDLYQKYILKGQTLNFDTFPKLRDHWDEFVAYKTGEQGQAMMERNKENAAKKKYHHHLGLGGYSVAMPKWEEMEASLLERGIEPATANWPERSKFWYYAHGGTLNPADGSLVFGDQICSARRLTDAVEASSQGTFRPDRERDDLSRMRSKRDTEAKIADLEFRVSSYELSMQEEVARKVDERMAAHRSHDPQPTIPLAMVSPSGNCSSCASTGQVASGXIPTDPSDTYHCRPIPAGYSKVKVELVEGAYEDLELDYPGGDGETHLRDTSHAIILWRKRYIILPGRQAASRAPSPPAPPPQAPAPTPPQAPAPTPPQAPLPAPSKSTAPQAPPPAHTRATKKTKVDAAKNKDPGYDCTQEELDAYMASEVKRQFKHRSPEKKIPIDPSVRNFFRGMSAPAKEAIKLSDYERTLKKASSGKSKPVPQLGEQPNQEIEPLVTGEDIGMEEFINDTGLTTDQLLGVAPIEKEEVKYMYELGKPLVKPELPQSLPTQMYKFHHLYMEMSAIGREMIGARIRDTDFLQGDDILWINFKGIYELYQLDALDVSIMSCWILMEIQRARRQGVFDTGFIDPRKVNVAMLDQYPQATVDNLVHLLKAQHYKTFILLPYNTYVNVYDSMDKKESTFDKVFELIDRAWYRFRHLVRGNWRERLRRKFKFPFIRMRDNLTTHKEFITAVQEQLMEFINEQILDPKGEFYYDGNTIHRSLASELATTTTSKS

SEQ ID NO: 119137 - protein, 1800 aa, Oryza sativa
  unsure (1)..(1800): unsure at all Xaa locations
  Clone ID: PAT_MRT4530_22383C.1.pep
MENVLMDRQWMYVDRRSKEFIDDVHYFLRVAEANRQXGFICCPYNKCKNQKEYSASRTIHFHLFESGFMPSYNCWTSHAEQGVEMEEDEVEDDNIPDFAQYVGFEGNQTGEEERDADGNDVADDLGQMLQDAKEDCESEKGAHKLDKMLEDHRTSLYPGCEQGHKKLDTTLEFLQWKAKNGVSDKAFGDLLKLIKNILPEGNKLPKTTYEAKKIVCPLGLEVQKIHACPNDCILYRGEEYENLEACPVCKALRYKIRRDDPGEVDGQLTKKKIPAKVMWYFPIIPRLRRLFRNKGNASMMRWHAEERQQDGMLRHPADGSQWRNIDRKFKDFGKDARNIXFGLSTDGMNPFGEMSSGHSTWLVTMCIYNLPXWLCMKRKYIMMPIFIQGPKQPGNDIDVYLRPLVEDLKLLWKKEGVPVWDEDKQEEFNLRALLFVTINDWPALSNLSGQSNKGYKACTHCMDETESVYGKSKDTLEARNDLKHMEQRDDLHPEPKEKGSHYLSPASYTLSKAEKESMFECLESIKVPSRYSTNIKRIISTKEKKFTNLKSHDCHVLMTQLLPVVIRGILPDNVRATITKLCVFMNAISQKVIDPDRLEALQNDVRYMGVLKKYVRNRARPEASIAKGYGTEEVIEFCVEFIEDLRPIGIPESRHEGRLRGKGTLGRKAIMTVDNNLFRKAHFTVLQQSSLVAPYIEEHLALVRARNIGKSDAWITRYHIDTFPAWLQQHLMGNESINQQLAFLVRGPSGSIATFQGYEINGYTFYTRAHDMKSTNQNNAVRVDAMGHDGTTGTYYGGIEDIWELDYGPLKVPLFRCQWVRLTGGGVMIDDSGMTTVDLNKVGYSDEPFVLANDVTQVFYVKDMSSKGKKGRGPDEPKRHVVLPGKRKIVGVEDKTDEDYDQLDGQPPFTVTIDPSILLSNEDTPYSCSDHKDGTIYLNEEGNVERDAEGNXEGHEEEASGSQPSAGQKGARGQRGAAKKLEGRHIITEVDEDGRPSAPAEAAKNYVRHNGWVVRDNVPVSTVYWRRTRARGDHESFVPDSEKEMLWTTMLEIFTLPAGTEDKVKRWTLKKMAEQFQSFKGDLYQKYILKGQTPNFDTFPKLRDHWDEFVAYKTGEQGQAMMERNKENAAKKKYHHHLGSGGYSVAMPKWEEMKASLLERGIEPATANWPERLKFWYYAHGGTLNPADGSLVFGDQIREAARRLTDXVEASSQGTFRPDREKDELSRMRSKRDTEEKIADLEFRVSSYELSMQQEVARKVDERMAAHRSHDPQPTILPAMVSPSGNRSSCASTGQVASGMAIPTDPSDTYHYRLIPAGYFKVEVELVEGAYKDLELDYPGGDGETHLRDTSHAIILWRKRYIILPGQQAVSRAPSPPANPPQAPAPTPPQAPTPTPPQAPLPAPSKSRAPQAPPPAPTRATKKAKVDTAKNKDLGYDCTQEELDAYVASEVKRQFKPRSPEKKIPIDPSVRNFFRGMSAPAKEAIKLSDYERTLKKASSGKSKPVPQLGEXPNQEIEPLVTGEDFGIQEFINDTGLTTDQLLRDAPIEKAEVKYMYELGKPLVKPELLQSLPTQMYKFHQLYMEMSATGRGMIGARIRDTDFLQGDDILWINFKGIYELYQLDALDVSIMSCWILMEIQRARRRGVFDTGFIDPRKVNVAMLDQYPQATEDNLVHLLKAQHYKTFILLPYNIELNVYDSMDKKESTFDKVFKLIDRAWYRFRLLVRGKWRERLRRKFKFPFIRMRDNLITHKEFIAAVQEQLMGFINEQILDPKGEFYYDGNTIHGSLASEVATTTTSKS

SEQ ID NO: 119138 - protein, 104 aa, Oryza sativa
  Clone ID: PAT_MRT4530_22384C.1.pep
MVSVPPRAGSYQARACSCGAKRRHSFGPTSSPIAICHWSLPDLKVLVPSTQKDFLELHYGKGLPSIHPMARDSFAPLPLCWWIPCPPLESSLVCIHGHRYHPKP

SEQ ID NO: 119139 - protein, 88 aa, Oryza sativa
  Clone ID: PAT_MRT4530_22385C.1.pep
RARTPATTRRRRPRPRTGPTPAPAAARRRAAHRGRGWSRTWQDDEEEAFELLGFHHFFSSSFFRPPNRARKESFRARGFIYTRRRGEG

SEQ ID NO: 119140 - protein, 173 aa, Oryza sativa
  Clone ID: PAT_MRT4530_22386C.1.pep
MVKMLNTNIYGYTYFGTEITAELQPGRHLISRTSPMYYGHAGAGGRVKSQANMQQQQARITLVQNATTTDSTPTSVGGTGYTGHRAPGMRPAGAAPCGRKGEKRGADHRGGGGDIRGQRLGSSAASGGAVPRGSDGGVAHPSVVLVPATMTGGWDGECDVGDERAVGVADPAL

SEQ ID NO: 119141 - protein, 79 aa, Oryza sativa
  Clone ID: PAT_MRT4530_22387C.1.pep
SSNTGAFNRILVILGIYVICFRIFEHMLWGVFVKVRGYSCVCVYHVIEKTYTSPSQKFIICQSSILNNSIPIGCMHFIY

SEQ ID NO: 119142 - protein, 68 aa, Oryza sativa
  Clone ID: PAT_MRT4530_22388C.1.pep
PSKADLQRRWTAGPTHGFVAPDPSDGNRHQKPDMWDHSVHSPVHGANGSIIRRPPTHMQWLQRMTETE

SEQ ID NO: 119143 - protein, 214 aa, Oryza sativa
  unsure (1)..(214): unsure at all Xaa locations
  Clone ID: PAT_MRT4530_22389C.1.pep
DVICSSGAGSFSGSSSGXSSSSAYGASGSGSKLHVDSGSSSGSVSASGSGSSNSGAGSGSSSSSWSGSNSGSGTMSGIDAPSSTGTSSTAESNSGSATSVTGANSGSYSSAWSNSNSNSGSTMPSGIGVASNAGSSSGSWSNAGSNTGTLSGAGSSNWSSSTSGSTSSSGLGGGQGVGSRFGSGAQPTFGMGGGGGFGAGYGFGAGAGGWGKHH

SEQ ID NO: 119144 - protein, 214 aa, Oryza sativa
  unsure (1)..(214): unsure at all Xaa locations
  Clone ID: PAT_MRT4530_2238C.1.pep
MRMKTLACCRRRPQDFSIDMDQEPDRVMTYNGLESCIINSSSYDDDSGLSATTGADGCVTTDSVDDEVSSCSSSKDVSSSSFSSQCHPLRKQEEHSLYELDTLSAVHLLPLKGKKPITYTLSRXDIETMKEKFGKLLLGDXASGGARGVCAALASSNAIINLSATIFGELWKLEPLCEEKKVRWRKEMDWLLSTTTYMVELVPTKTKWSRRVHV

SEQ ID NO: 119145 - protein, 314 aa, Oryza sativa
  Clone ID: PAT_MRT4530_22390C.1.pep
MASNKQGGGKQQAAAASPGPDQKDEELDPKFEWLDNANNFLLRLYLTGFKKEDFRVQVDGTGKLTVRGQRPAAGSKHNTRFHKVFQLPSNANIDDITGRFEASVLTITVPKRPAPTSSAPAPTSVQEIKQKAPTAKQEPQPQFDEAPNKKKQQQEEEEEAAKKKQQQLQEEEEATKKKQQEEEEEAAAKKTKKLQEEEAIAKHKPATTTERKQAEPTTAAPLPGHVVDRESLAEKVKRRAEEECAKAAAAAEEKTATALSRWRERVAGELEHLGDMRWAEGVVETARRNKDVIATAVAAFSLGFFVSHKFFCRR

SEQ ID NO: 119146 - protein, 137 aa, Oryza sativa
  unsure (1)..(137): unsure at all Xaa locations
  Clone ID: PAT_MRT4530_22391C.1.pep
MWAAVLRGIYVQRCYHFRFHLFFLLFFFIIFFLFYYFFFFFFYFFSFFFFLLFLFFFFIFLFYFFIFYVLFFFFFFFTLSIFFFFIFLKFFFICLIFLXFLYFFFLFFFLQFIILFNFFYYYFYFFSLNFILFFFFF

SEQ ID NO: 119147 - protein, 352 aa, Oryza sativa
  Clone ID: PAT_MRT4530_22392C.1.pep
MAPAIAKPLLSDLVAQSGQVPSSHIRPVGDRPDLDNVDHESGAGIPVIDLKQLDGPDRRKVVEAIGSACETDGFFMVKNHGIPEEVVEGMLRVAREFFHMPESERLKCYSDDPKKAIRLSTSFNVRTEKVSNWRDFLRLHCYPLESFIDQWPSNPPSFRQVVGTYSREARALALRLLEAISESLGLERGHMVSAMGRQAQHMAVNYYPPCPQPELTYGLPGHKDPNAITLLLQDGVSGLQVQRNGRWVAVNPVPDALVINIGDQIQALSNDRYKSVLHRVIVNSESERISVPTFYCPSPDAVIAPAGALVDGALHPLAYRPFKYQAYYDEFWNMGLQSASCLDRFRPNDQAV

SEQ ID NO: 119148 - protein, 301 aa, Oryza sativa
  Clone ID: PAT_MRT4530_22393C.1.pep
MAHSRGSRKHDGILFKLTKLVVDYRSGENSVDQPEEIPEWTAKPALTPSLQSFIDIIDDLRKRRLSGYEVAVDFVGLDSDTVGRHVGQIMISASSKADDIPIALCNKDATERAAAINALPLTYAIGPLVDHQAATSLKEGVAKEASDAVAGGSVPKKGRIFSSVVRTRWKATSSAPAPTCQGVRRHDYHPGEPDEFSLTSSLTELATTMGEVCKELRVPRGEPEESATGYISWLNRACTQLEGIGKRIDEALKQECRRASRYAGGHVMACIRDHHPQLHLEFLCEGFSHSRRTPAEIDGLV

SEQ ID NO: 119149 - protein, 84 aa, Oryza sativa
  Clone ID: PAT_MRT4530_22394C.1.pep
PLPQRNPSGRPPLRDHTGRTADREAEKRTAMAAAHSRTRGGGGGRKTSEAAAPHSRGEGRRDFFFFFLAEASECSRRRQRPYNT

SEQ ID NO: 119150 - protein, 223 aa, Oryza sativa
  unsure (1)..(223): unsure at all Xaa locations
  Clone ID: PAT_MRT4530_22395C.1.pep
VSFQRPIYFLWAFFFRKVMKDFAVELEELAELVLDLLCENLGLEKGYLKKVFYGSKGPNFGTKVSNYPPCPKPELIKGLRAHTDAGGIILLFQDHKVSGLQLLKDGHWIDVLPMRHSIVINLGDQLEVITNGKYKSVMHRVITQTDGNRMSIASFYNPGNDALIAPAPALVKEDETSQVYPKFVFDDYMKLYAGLKFQAKEPRFQAMKATESSNINLXPIATV

SEQ ID NO: 119151 - protein, 378 aa, Oryza sativa
  unsure (1)..(378): unsure at all Xaa locations
  Clone ID: PAT_MRT4530_22396C.1.pep
MASPDKVGCSPEPLPLDRLLAELAANAERLGRRWEAALRKRGREGARAAGVGLEEGRKADSAAMQLHTPLFYATCALGGLLSTGLTHLAVTPLDLVKCNMQVDPGKYRDISSGFGVLLQEQGLGGFFKGWMATLVGYSSQGACKFGFYEFFKKCYSAIAGPEHAEKWKTFIYLAASASAEMIADVALCPMEAVKVRVQTQPGFARCLTDGFPKIVQSEGXYKGLLPLWGRQVPYRTTSFKXTMVKFACFETIVELVYKHAVPKPKDECSKPLQLAVSFAGGYIAGVFCAAISHPADNLVSFLNNAKGGTMADAVRTLGVWGLLTRGLPLRIIMVGTLTGAQWATYDAFKVFVGLPTSGGFIPSPAATDLRQVDHEKRS

SEQ ID NO: 119152 - protein, 81 aa, Oryza sativa
  Clone ID: PAT_MRT4530_22397C.1.pep
YIVYTYVHTYPSRSHAPLIVQSCLHTYLHTYTHTHVHTYIFKNSKLIKFPVDGISNTTCHLKSDCCLGNGVQGLHTDCSII

SEQ ID NO: 119153 - protein, 66 aa, Oryza sativa
  Clone ID: PAT_MRT4530_22398C.1.pep
YTGLSTLHNNTKLRTNGPLRTASPSRLLFFMREHTPSTATTIIYNLQINIPDKTVHNISKRQLMNP

SEQ ID NO: 119154 - protein, 87 aa, Oryza sativa
  Clone ID: PAT_MRT4530_22399C.1.pep
FFWFFFFFFFFFFFFFFFFFFFFFFGGPQKPKRSKTPGPGTGGRPQKEKKNPKKKNPAFFKIKRARRNKSKIAFKKSPGGGKKPRPK

SEQ ID NO: 119155 - protein, 245 aa, Oryza sativa
  Clone ID: PAT_MRT4530_2239C.1.pep
VRIPGSTTRPAASAASGTSVPEQAQLQLYGLYKIATEGPCTAPQPSALKLKARAKWNAWHKLGAMPTEEAMQKYITVVDELFPNWSMGSSTKRKDEDTTVSASSSKGPMGPVFSSLMYEEEDQGNDSELGDIHVSAREGAIDDIAKHLAAGVEVNMRDSEGRTPLHWAVDRGHLNSVEILVNANADVNAQDNEGQTALHYAVLCEREDIAELLVKHHADVQIKDEDGNTVRELCPSSWSFMNLAN

SEQ ID NO: 119156 - protein, 94 aa, Oryza sativa
  Clone ID: PAT_MRT4530_223C.1.pep
MEAKVVATVLIVLFLTLGGEAAAKICHDHSQTFKGMCFHTSNCIACCTNEGYTGGYCKPFTYRCMCTKDCGGDSPPDDPPPAMPTSPAATTTVA

SEQ ID NO: 119157 - protein, 46 aa, Oryza sativa
  Clone ID: PAT_MRT4530_22400C.1.pep
MQENVSLVFLELGSFFFFFFFFFFFFFFFFFFFFFFFLRDVLSIQN

SEQ ID NO: 119158 - protein, 153 aa, Oryza sativa
  Clone ID: PAT_MRT4530_22401C.1.pep
AKQLPCMHLYHSSCILPWFSSRNTCPVCRYELPTDDAEYERSKQATTNVRDIQVVEENSDEQEVQVTRQMAVGAIEETNTSEHNVRVDEQPSSARRRSGWLFIAAAPVVSLIGFALVLCFTNPARSGRRQLYCRSPSATEVHVGTKKSWWSMF

SEQ ID NO: 119159 - protein, 126 aa, Oryza sativa
  Clone ID: PAT_MRT4530_22402C.1.pep
MDAESLRRMTPSLSEQSSEQLDEASSHPISTIVTPLPVLPLAPSASRTKSPRLVLDHLAKAYRVLETTAQEAPFELNHLYVEMGSAGDKLTQHQGDANEGWADDRREDVMAELENAEDSIISIYGE

SEQ ID NO: 119160 - protein, 143 aa, Oryza sativa
  unsure (1)..(143): unsure at all Xaa locations
  Clone ID: PAT_MRT4530_22403C.1.pep
RFYGMEGDTLLADIQLALPNRCYLLPSGMHKSNTSSCPTITCEEALKRELEYRQKIERSHPHLLVGLNGSPALLNEVGSGSSPDLSMRNSAHDSYMPSPQACFVGSTVQRPPANWYPSKKKLKVLQHPSQALQGPRXNLIPSF

SEQ ID NO: 119161 - protein, 59 aa, Oryza sativa
  Clone ID: PAT_MRT4530_22404C.1.pep
GRVGGRVGANGGSSGYCAYFYLKISFMDYESLNLYYVESYSHLSIGWNRKGANRKSVCI

SEQ ID NO: 119162 - protein, 58 aa, Oryza sativa
  Clone ID: PAT_MRT4530_22405C.1.pep
NPLVNKIQHTFLKEEFAPYIWECILTLPVGCTFGVQFHRSTSKFFIPNKIPDFSSKGP

SEQ ID NO: 119163 - protein, 665 aa, Oryza sativa
  Clone ID: PAT_MRT4530_22406C.1.pep
MAASAAAGGDSGLLLAARRRLPAAALAAGGHRIRLLHAFSAASRRGRHEVACCVRTEPAPRPASPVAVRSRSVHSTENYKKGCEQRLGQLIERLKKEGISPKQWRLGTYQRMMCPKCNGGSTEEPSLSVMIRMDGKNAAWQCFRANCGWKGFVEPDGVLKLSQAKNNTECETDQDGEANLAVNKVYRKICEEDLHLEPLCDELVTYFSERMISPETLRRNSVMQRNWSNKIVIAFTYRRDGVLVGCKYREVSKKFSQVEGEIDKLSMEEAGYRNCVSVPDGAPPKVSSKLPDKDQASRIILATDADPPGQALAEELARRLGKERCWRVNWPKKNENEICKDANEVLMFLGPQALRKVIEDAELYPIRGLFSFKDFFPEIDNYYLGIRGDELGVPTGWKSMDELYKVVPGELTVVTGVPNSGKSWVEIRSVLNGKQGKQLLMVREHARKLLEKRIKKPFFDARYGGSAERMSLDEFEEGKQWLNETFHLIRCEDDCLPSVNWVLELAKAAVLRYGVRGLVIDPYNELDHQRPSNQTETEYVSQMLTKIKRFAQHHSCHVWFVAHPRQLHNWNGGPPNMYDISGSAHFINKCDNGIVIHRNRDPNSGPLDVVQVCVRKVRNKVIGQIGDAFLSYERVSGEFRDADKDTAKKAAVAAANVAKAPQRKG

SEQ ID NO: 119164 - protein, 256 aa, Oryza sativa
  unsure (1)..(256): unsure at all Xaa locations
  Clone ID: PAT_MRT4530_22407C.1.pep
RDGVLVGCKYREVSKKFSQEANTEKILYGLDDIKRARDIIIVEGEIDKLSMEEAGYRNCVSVPDGAPPKVSSKLPDKDQDKKYQYLWNCKEYLDPASRIILATDADPPGQALAEELARRLGKERCWRVNWPKKNENEICKDANEVLMFLGPQALRKVIEDAELYPIRGLFSFKDFFPEIDNYYLGIRGDELGVPTGWKSMDELYKVVPGELTVVTGVPNSGKSEWIDALLCNINDQVGWKXRLCSMENKVREHARK

SEQ ID NO: 119165 - protein, 523 aa, Oryza sativa
  Clone ID: PAT_MRT4530_22408C.1.pep
MGSLDANPAAAYAAFAADVEPFRPLDADDVRSYLHKAVDFVYDYYKSVESLPVLPGVEPGYLLRLLQSAPPSSSAPFDIAMKELREAVVPGMTHWASPNFFAFFPATNSAAAIAGELIASAMNTVGFTWQAAPAATELEVLALDWLAQLLGLPASFMNRTVAGGRGTGGGVILGTTSEAMLVTLVAARDAALRRSGSNGVAGITRLTVYAADQTHSTFFKACRLAGFDPANIRSIPTGAETDYGLDPARLLEAMQADADAGLVPTYVCATVGTTSSNAVDPVGAVADVAARFAAWVHVDAAYAGSACICPEFRHHLDGVERVDSISMSPHKWLMTCLDCTCLYVRDTHRLTGSLETNPEYLKNHASDSGEVTDLKDMQVGVGRRFRGLKLWMVMRTYGAGKLQEHIRSDVAMAKTFEDLVRGDDRFEVVVPRNFALVCFRIRPRKSGAAIAAGEAEAEKANRELMERLNKTGKAYVAHTVVGGRFVLRFAVGSSLQEERHVRSAWELIKKTTTEIVADAGEDK

SEQ ID NO: 119166 - protein, 148 aa, Oryza sativa
  Clone ID: PAT_MRT4530_22409C.1.pep
PTDRGGPQRFSEPMSRIRPTRTYGNWTVDIGPSKIISAAPAPCRREDLGCYLRPNAGRTSKTVEHNIRKLILHMQLLLLLGTAAQHLQRSTFNILFNFWRNSLDVPIKTIERSFAVRKTSELSNVDKRTAQIELYVVLALLSHHRHPP

SEQ ID NO: 119167 - protein, 1311 aa, Oryza sativa
  Clone ID: PAT_MRT4530_2240C.1.pep
MRLNSASSLLLLLKLSHLAIVAALADGAGFTFNGFSAANLSLDGMAAVAPGGLLMLTNGSMVMKGHASYPTPLRFHGSRDGRSAAVMSFSTAFVFAIVGQYADVSSQGMAFFISPSKNLSTALPGHFLGLVNAGDNGNASNHLFAVELDTVLNGEFQDIDDNHVGVDINSLTSIEAATAGYYDDEDMGLFRNLSLISRKAMQVWIDYDGLTMELNVTMAPVEITKPKKPLISTIVNLSAVVTEPAYVGFSSSTGIIFSHHYVLGWSFKMNGTAPPLNISILPALPLMISERRSQVLVIVLPIVSLVLVLASAAMAIAVAKQRAKFAELREDWDVPFGTHRFSYKDLFYATEGFKESQLLGMGGFGKVYMGMLPKSKMMVAVKRISHESRQGMKEFVAEVVSLGRLRHRNVVQLLDYCRRKGELLLVYDYMPMGSLDKYLYDQDKPTLEWARRLQIIKGVASGLLYLHEDWEKVVIHRDIKASNVLLDAEMNGRLGDFGLARLYDHGTEPNTTHVVGTMGYLAPELGHRAKATPYTDVFAFGAFLLEVTCGRRPVEQEAPMVLVDWVLDYWRSGSIMETVDPRLRNGYAEEEVELVLKLGLLCSHPLASARPSMRQVVQYLNGDSDFPELRAAQMGFSMATLLKNKGLNPDAMSYAMTSSSSIGTMSSTLSGGRPISSFLVLTVFHCIKLVAPSASENQFAFEGFAGANLSLDGAAAVTPSGLLKLTNDKHIKGHAFYPTPVSFHLTPNSSATASFSATFVFAIVSEHAELSDHGLAFLVAPSKNLSATTGAQHLGLMNISDNGKASNHVFAVELDTVLSPELHDIDSNHVGIDVNSLQFIQSHTAGYYDDSTGAFMNLTLISRKAMQVWVDYNGQAMVLNVTLAPLGVSKPKKPLLPTGLDLSRVVEDIAYIGFSSATGLSIAYHYVLGWSFSLNGAAPALNPSKLPVLPKLEQRHHRSEILVVVLPIATAALVIGLLLVGFMIVKRWFRHAELREDWKVEFGPQRFSYKDLFDATQGFGSKRLLGIGGFGRVYRGVLSVSNSNSEIAVKRVSHDSRQGVKEFIAEVVSMGRLRHKNLVQLLGYCRRKGELLLVYEYMSNGSLDKHLHDKNNPVLDWNLRFHIIKGIASGLLYLHEEWEQVVVHRDIKANNVLLNNEMNGCLGDFGLARLYDHGTNPRTTHIVACGRRPLEHDLQDNQVVLLDWVLENWNRGQILDVVDPRLSSEYVAEEANLVLKLGLLCLQPLPSARPSMRQVLQYPNGTVLAPEMLPTDLDYDTLMFLQNERVESYAMLEASSLATTVGPGSDLSGGR

SEQ ID NO: 119168 - protein, 1273 aa, Oryza sativa
  Clone ID: PAT_MRT4530_22410C.1.pep
MAMGDGAPTMGGLVARIWDPNPLEATVACLLSSIPSPFFLVPCPIYTNEASPSQPSPCWNGIDGSPESKGDADLGEVQQHSGAVDDILAWALRDGESFPMWSRGRRMPRRSKEKPEPPVIVARESTNTMRSHMMEIADGEDVAEAVADFARRRQSWVASLRQPGEPGSVIELSGPLEILSLSGAFMPPPSLANATGLKALLAGGQGQVIGGNVVGALRARGHVTILAAVVSNVTYECLSPEHDVVDDPGKVPAAVTESHSRMEPLSCTTPEMKMETDAVQLKCDWPMQQSDDTNLRLHRDKQWAVQDKRQVLQRTLTEMHTFIKHAEWWFHKDVFAQVLQDAKDAVNCAEDLLDEINYHELQNKVEGHAILFHVQDYHETKIDKIQGKLEHLVRQMEQLGLYDERQQFIIESINREDDLFGEEQTIFGRQKEMSELIELIVLQENSPTDKQVTEVHAVSDSKRAKLENVSVLPIVGSGGVGKTTLAILVFNERRVRDHFDLLIWICVSDGFDEKKLMKRLAWSVAENEMKTDDLGCLQRILTNGIIHHTRRVLLVLDDVQTDACREDCHGWKNFLAPLKYARSGSMVLVTTRYHRVAERVGTLKHMFLEGLPEETIWEFFRMLTFGSRNSNSNAVLEPIGRSIVARLDGSSLGIKIIGRLLSLKLDAKYWKIILESELWGWPHQEEASIFTALQLSYQYLPFHLKRCFSFCSLYPRGYEFDAETLVDSWVAVGFVMPSRSILAVDIGHVYFNQLVSRSFFQRSPTSSRYVIHDLLHDMAQYVARNDCFMIKSRCGMSRIPPKVRHVSILGNGELSSTDIECLNTYKTLRSIVCIGVGCDIITNSVLETWFDHLTRIRMLRFISCRLKELPCNVGKLIHLRYLDISACDFDKLPTDLFCRLYKLEILDAQNCTLHAVPKDIIKLVNLQRLRLKDDLISQLGRVPEVGKLTLLQNMPYYAVDDKPGRGIQELKNMNHLHGGLEIDGLRNVTSREEVAGAELAKKIYLDTLVLKWHESIRPQKHNSTKEMEVLEALRPSSNIKHLEVKFYMGDGLSPMWLRHDELSSLASLSINSCPNTTTLFLIEPSETGSSRSSSVSFQSLTKLSITWCRSLTSLDNFLQPECLPMIKVIQISNCEELASLPTNNLVHFVHLEDLEICHCWNLNWEPGLALPPSLKSLKLEACGEFSDSTLSCLHNLTALTILNLRFCPSIESISAQIWSGLWSIENLKIVCCQGLVTVGGSESIAGIKNVDIRHCSKLQDLEQPFRSGQADSQ

SEQ ID NO: 119169 - protein, 392 aa, Oryza sativa
  Clone ID: PAT_MRT4530_22411C.1.pep
MPAAKRSASAGSVLALTVAGRRAARARLCLRLAAPLSFLLLLAALLRTQPLPAPPSAPPPSGGPARVAFLFLVRAGVPLDFLWDAFFRNGEEGKFSVYVHSAPGFQLDRTTTGSSYFYGRQLARSVKVAWGEPTMVEAERMLFAAALEDPANQRFVLLSDSCVPLYNFSYIYTYLMASTKSFVDSFVDKTEKRYNPSMSPVILKDKWRKGSQWVALTRRHAEVVVGDKLVLQVFRRHCKMVVTKALLGQKPNYRRLGFGLRRKQISKGSTRMEHDCIPDEHYVQTLFSINGHENELERRTLTYTSWNQSSDPKDKMTWHPMTFEYESASPEQINSIKGIDHVNYQMEHRTEWCQCNTTSVPCFLFARKFSYSAAMHLLEAGTVGPLKSALLA

SEQ ID NO: 119170 - protein, 150 aa, Oryza sativa
  Clone ID: PAT_MRT4530_22412C.1.pep
NVASNAFARFYAFCPSYRPYPLPLLFLFQQQVVRPSREFVRPPPSIVAPPFWPPGSFPFINHPVLPPPCFPPLRVVGPPFPFPALCSVPAIFQPLPLQQVGVVFFCQTPGPGPAFLAFNLPPLCGVFPNYSLAPRSISPVGGVWALIVIV

SEQ ID NO: 119171 - protein, 36 aa, Oryza sativa
  Clone ID: PAT_MRT4530_22413C.1.pep
CLEYLASRLDKSVPIICRVPPLACHRWAMVTPNSNP

SEQ ID NO: 119172 - protein, 293 aa, Oryza sativa
  Clone ID: PAT_MRT4530_22414C.1.pep
MAVYIRLDDAVRARLRGDAGSSASSGSEHEASACLSGLVQAFLETEGAAAGEDGAGPASKGGEGYDSDDGDGPERAAAAAESVRELLDPPVEEDPFRVRLAAAVAAAMEAEPALRRYGAAFRRAVARRLRAAGYDAGVCKSRWEASGGITAGTYEYVDVVAPAARGQKSRYIVDADFRAGLEVARATAEYAVVVAAVPASVVVAREEAVGRAVRVAADAARRSLRSHGLHVPPWRKTRYMLAKWLGPYKRSTATSPSAAGAMPMPAAAAGMDVKCRAVGFFTPPPAAPAARIK

SEQ ID NO: 119173 - protein, 145 aa, Oryza sativa
  Clone ID: PAT_MRT4530_22415C.1.pep
MAVAKRFVLPLMMVVLLLSAVSGSARPMGGDKWVGMATSGDHPLIQFLQNLYLQQLSQPEMYGLFALTNLASTGIDGLGTDGKAAMHVHRNVYINCIDGQKYLTYGTPESQADCIITLFFPSLFCELRRLSLRMCIKRTGRLTST

SEQ ID NO: 119174 - protein, 227 aa, Oryza sativa
  unsure (1)..(227): unsure at all Xaa locations
  Clone ID: PAT_MRT4530_22416C.1.pep
SPEDHGERRQEQAEVRRQCGLRLSAVRRRAVPVLRTLLLRRAWRGGDDDDGEGQCRRLRQRRRRRRGDDSGSSQETRSSARPVSWRGSRRRRPRPRREPSQPPTPATTTTTRPPAEDGGGRGARAVAAARDGVAGGRREARRGDEGHGDRARVGPKPRAGGEAARRAGAGXWRGXRRAVEPGRGDRAARRTGARSPASTAAAAARRAGRRRVVLLRGQRRPPRRRRG

SEQ ID NO: 119175 - protein, 146 aa, Oryza sativa
  Clone ID: PAT_MRT4530_22417C.1.pep
MGRRQLTSSEIRNAIAREPFPISVAVTTTNRGLVRLSRRERGGSRDERRWVLYAADASLLMGKSQIWRDETRQAGHRDEAASRRRGRQQPVIRREMPGLLRHISRSVAPRTNTGMSCHWQRPGIAAGRAEKKKGERKAACRVRGWD

SEQ ID NO: 119176 - protein, 65 aa, Oryza sativa
  unsure (1)..(65): unsure at all Xaa locations
  Clone ID: PAT_MRT4530_22418C.1.pep
LNYNRQKXSSAFTSQPVINACSPPTQVTTSVSQVXCMYPSTSSIRXTASXMNXSPFDLAKHPPPP

SEQ ID NO: 119177 - protein, 72 aa, Oryza sativa
  Clone ID: PAT_MRT4530_22419C.1.pep
GKRAPLPPSLTSIPQFQHKPHPVLCSSLPPASVPPRVQTRLVYGHLLRVLPSLVSLSCSTRVLEYLDLIQQQ

SEQ ID NO: 119178 - protein, 143 aa, Oryza sativa
  Clone ID: PAT_MRT4530_2241C.1.pep
KKKKPRRFPGFFKKKTTHHRSFRGPTLLGPRPRGFLTNSQWEPNKTLLFRDGAYQITSKLKIEKKGGLPGPPKGKGGPKKGQNLGGKARPFFLGALTAGTRGWALGNLGMNRFFFGEPPLRKKPKNFAALVPYQPNLGLARGG

SEQ ID NO: 119179 - protein, 42 aa, Oryza sativa
  Clone ID: PAT_MRT4530_22420C.1.pep
LSLLAPPEPVWNHETSYGSDCHVPTNVNAISKMIDKSNHQTG

SEQ ID NO: 119180 - protein, 40 aa, Oryza sativa
  Clone ID: PAT_MRT4530_22421C.1.pep
CLELPQTLLNLPQRKRSPPERPKHEVAGARGLGWVFRVHP

SEQ ID NO: 119181 - protein, 186 aa, Oryza sativa
  unsure (1)..(186): unsure at all Xaa locations
  Clone ID: PAT_MRT4530_22422C.1.pep
PCRLCGPPAPSSPTSASRRTSASRRLPPXPAPSSPTSASRRLPPRRQRPPSSTTTXPRRRRRLPPLQIRTPPAPSSPTSALPHPSTTTSARRRIPPRCRLPPSTTTSARRRIPHHSQSFDPAAAAVAAAPTGRRGCGGSNSHGRRRCRQPPVRGGPQQEAAVNHEQKKAVVAATYVRRVRLWRQLR

SEQ ID NO: 119182 - protein, 80 aa, Oryza sativa
  unsure (1)..(80): unsure at all Xaa locations
  Clone ID: PAT_MRT4530_22423C.1.pep
GRADSARRGRRHPPPFPLLGXGLNPLPVGWFFGPPPWNTERAPPLQPRFLFFTFPGFPPPPSVMVLMDPVINPFNSPSIS

SEQ ID NO: 119183 - protein, 52 aa, Oryza sativa
  Clone ID: PAT_MRT4530_22424C.1.pep
KFFCLSNESFFFLEVKFPKLKNSAAQNSTNGRLGCPFNKKIHPRSYNFGEQI

SEQ ID NO: 119184 - protein, 168 aa, Oryza sativa
  Clone ID: PAT_MRT4530_22425C.1.pep
MVPPRKIAVTHGAPRSSPGSLLLPHRMGLLAGDLLPSHPQVTSSIPRCCHTLSHSSACPRPYGQIDLFGSLKLGFVVFNKSMKLNFLREEFIWSAALKKGHMDMFAYRPRSAVWLLPLNWTIGMPGILVATVIKANLTLSGMRISSSLFLSRNCIEELPYAELIGAGV

SEQ ID NO: 119185 - protein, 748 aa, Oryza sativa
  Clone ID: PAT_MRT4530_22426C.1.pep
MASSSSSSSHLHAHSLKLGTLAHTFNMNHLLIYYARRGLLDSALKVFDEMPQRNLVSWTAMVSASTGNGAPHLGFRFFVSMIRSGFCPNEFSLATMLTACHSMVAHSSNKLLIALSLHGVAVRAGLDSNPFVGSSLLLMYAKHGRIAAAQRAFAHIRNKDLTCWNAMLEGYVLNGFGHHAIRTVLLMHHSGLAPDRYTYISAVKACSISAQWDLGRQLHCLVIHSMLESNTSVMNSLVDMYFRARQKETAASVFRKIRQKDTVSWNTMISGFAHDEDDKAVFGCLIDMSRIGCKPNEVTFSVLLRLSGAKENESLGLQIVALAYRHGYTDNVLVANAVINMLSRCGLLNRAYGFFCSLTSTNIVTWNEMIAGYGLFSHSEETMKLFRSLVCFGERPDEFTYSAVLSAFQEAQGARDHEQIHATILKQGFASCQFVSTSLIKANVAAFGSVQISLKIIEDAGKMELVSWGVVISAFLKHGLNDEVIFLFNLFRGDSTNKPDEFILATVLNACANAALIRHCRCIHSLVLKTGHSKHFCVASAVVDAYAKCGEITSAESAFTVVSSGTDDAILYNTMLTAYANHGLIHEALNLYEEMTKAKLSPTPATFVAILSACSHLGLVEQGKLVFSTMLSAYGMHPARANYACLVDLLARKGLLDEAKGVIDAMPFQPWPAVWRSLVIGCRIHGNKQLGVLAAEQILRMAPSSDGAYISLSNVYADDGEWQSAEETRRRMVQNHVQKLQGYSRIEM

SEQ ID NO: 119186 - protein, 257 aa, Oryza sativa
  Clone ID: PAT_MRT4530_22427C.1.pep
MAEKPPPSPSSASPGSVKEKIQKLGLLDVNEGNIMTIDPEKFTPDQKKDFEEMMQQARDQFLNSFMQTRKGTLVQKYKIKVVADDPGTSSSKDEEGKQAPDGLAQPSDKGATYGFPANQGDNSQGGVQGGGVNQDDNAAQLQFNNFQDQVDYAVHHALINQSGILTNTLANMVKSMVDGSMAEYQATGPVYLPGGVFPNYRPIITDNQPVVQLIPLNAPSAQPTAPVSAHAPAPTLSASGQVINPRLLVREQPQHAR

SEQ ID NO: 119187 - protein, 45 aa, Oryza sativa
  Clone ID: PAT_MRT4530_22428C.1.pep
LLTQTQHNVERYISNIKSPSAPSSMTRATAGAGDICIVGSCISRS

SEQ ID NO: 119188 - protein, 83 aa, Oryza sativa
  unsure (1)..(83): unsure at all Xaa locations
  Clone ID: PAT_MRT4530_22429C.1.pep
EEGKQAPDGSAQPSDKGATDGFPANQGDNSQGVHGVQGDGSQGIQGDGSQGVQGGGVNQDGNAAQLQFNNFQDXVDYAVHHAL

SEQ ID NO: 119189 - protein, 49 aa, Oryza sativa
  Clone ID: PAT_MRT4530_2242C.1.pep
MPCPRHRHPLSLEPSEGISVHAGSIFSSSSSKPWEGPFLCSDCRDKKDA

SEQ ID NO: 119190 - protein, 63 aa, Oryza sativa
  Clone ID: PAT_MRT4530_22430C.1.pep
GSSSSASSPTSPPAATSLVSSKPSSSYTALFECASLIGRCLPPCSVCQQCVHRLLIIPPALCV

SEQ ID NO: 119191 - protein, 84 aa, Oryza sativa
  Clone ID: PAT_MRT4530_22431C.1.pep
MQRELQLDGLGCSIVEPSDRAGTGLAFDRARRRSTWNSTERGPIDDLLLSVLWRHDVTYASWKRKGSRKPRPRGVGATRKRRAN

SEQ ID NO: 119192 - protein, 88 aa, Oryza sativa
  Clone ID: PAT_MRT4530_22432C.1.pep
RSRRRWRAPDYSFARWVGRLTHAAVAGGIDGARRRRRRAMYSSRGVTSSAPVVVGVVRWSSRQSFSAEMSVWLGLLGAELALPLGTRL

SEQ ID NO: 119193 - protein, 116 aa, Oryza sativa
  unsure (1)..(116): unsure at all Xaa locations
  Clone ID: PAT_MRT4530_22433C.1.pep
EEEAEGEWXMVTAESPLEAAAADDDVEAVESSAAPAARVDEPAVQDEEKEKEEGVEMKKVMEMVAALCERSAQQCAVIGALAERVDALERAVRRVEESDRRRRRNKKLKKEAKANS

SEQ ID NO: 119194 - protein, 56 aa, Oryza sativa
  Clone ID: PAT_MRT4530_22434C.1.pep
QLYFYIYHPKFHNGHHMMISGGLLIINFRNHYNWLKLINNEHRHRGGYSGYWGGTQ

SEQ ID NO: 119195 - protein, 78 aa, Oryza sativa
  Clone ID: PAT_MRT4530_22435C.1.pep
MAVEARRRRQKSKHDLNVHGRGEFLVGKHRQERLKKQSSRMFFSYENGIVLVSQGILERRTKTVQVLHGKVVYCLAML

SEQ ID NO: 119196 - protein, 115 aa, Oryza sativa
  Clone ID: PAT_MRT4530_22436C.1.pep
MATTDTTIAHITDVQDDIKIKSSNLIAKLPLSWPQSKKQDAASPIMGLWACNFVWDPSPSGAHVGCAPSRWIMTLESLWSSSHHYNEPGIRLICTGKINNPRRGVSIAKAQHNNV

SEQ ID NO: 119197 - protein, 165 aa, Oryza sativa
  Clone ID: PAT_MRT4530_22437C.1.pep
MVSSRFVAVLLLVALAPAARGQGGGGGNSSAPAASPPGPFVPRDNILLDCGATGQANDTDGRLWTGNTGSKYLPANLAAAAATAQDPSVPQVPYLTARFSAAPFTYSFPVGAGRKFLRLHFYPANYSNRNAADALFSVSIPDPNITLLSNFSAYQTAFAFNFDYL

SEQ ID NO: 119198 - protein, 119 aa, Oryza sativa
  Clone ID: PAT_MRT4530_22438C.1.pep
PSECQLPSHPPDVEELRGEHADAHWSKAGRRRRRSTTAARGQSVGAGVLRRGVSRRRAYYRRASNSSTGDDTSVRHDQGRASTAAAACTVRCARVEHTSKCKHLQPARPSTRLAGFPHS

SEQ ID NO: 119199 - protein, 572 aa, Oryza sativa
  Clone ID: PAT_MRT4530_22439C.1.pep
MENNQSGQAQDGMADQRFRSWLTEQLNMQQQNAGCSSNPAPAVMQMPALPSHTDYGGIYPNPTEYDGYNWRMCGQKLVQGGCHQKFYYECSQANCGAEKSVTRSADGQIKKTVWVIRPSVAMPRNEEEDGLQSGSSDSGDDDASEARAADMFLQLQLKIPPRITQLTLMFWVTALSSVRIITEVVEKFKVQNVNIVKNASVEKLQEEQAICADISRYVLHNLERLDCSKKVPSSANFRQFLVAICPDYNMVPQAAFEEKFLSFFHNEKMKLKEKIELTPGGVFLSVTKQYVEFKTFVCITVHFIDNEWKMNRKIISYGYGGYPDGADYYVDPRFKLRYLEQCFTQVSSSGCAKLFVLEVRAKIYELFLQYSCNVDWQTGELLNHRSNDLQMDRHGNDSLHGTDKNDIEQGSNGEFRELTSYIEGELYPQNDQFDILKWWKDNASTYPTLARLARDILAIPGSAVSAEYAFNKTGERAAGVIRPSVAMPMNEEEDELQSGLGDSEEDDANEARVDGDDMVQLKISPLKLQLRLMLRVTAVSNVRIIAEGFLAWEGMFRVSIGFYPELDVEEDL

SEQ ID NO: 119200 - protein, 552 aa, Oryza sativa
  unsure (1)..(552): unsure at all Xaa locations
  Clone ID: PAT_MRT4530_2243C.1.pep
MMSGNEIMPVTLDDFEGEDRKSMEEYIKEITQEALMRACNRTRQGVIIKPGPLPKLAPDLVSNDEVIQSIQQQVASIIDSSMIAFKNKLDVMFKDKFDGFLRIKFGPLMDDYTLKDKASITANQPPIEQTNSGTDGAAHLAGPTGPDGRGYPPDTRQGQYNHIAPQTQPIRPPNPPPNQQGPNNMEDMISDIMRNRFGIETRNRSRTYKKPYPDYYDNVPFPRNYRVPEFAKFSGEDGASLMEQRPIDTSSVTCETISVTSMPKTGIVSNPLLISPIDVDKKKGKSVIIGDPRPEIIRINNAKAEDHKVANDESSSFQRTKKPKLTFEMLMAKYEKGLAGQRFDNQNSDSKRPRSSRRKRFGQTPKQSEPLTIPTSYKPPVVMPWYPYPMSLYGYPFMYYMSWMHQPPMSFHQGWEELPRSAPSHSFNSRQDRFPQKNRSGRSKVKKVKKVWVRKETKALEVIAAKEESQDVHVPTGDAVETTLAKEIEADTVTANIGGLTETAGRSNRQSTAGLTDLTGRSDRRLVAGLIGXCGRSDRGALEKNGKIESNI

SEQ ID NO: 119201 - protein, 454 aa, Oryza sativa
  Clone ID: PAT_MRT4530_22440C.1.pep
MAGGGRCSSLLRGFVSLFFLLFIHIGHAGCCFSTGSSTQTLEEDDTGHGADGRGGGGGGSKRRKISPLAFSPSVSSSTVADERSRARRRQVSSLATSVRFYLHRIFSYSSGAKNGAGAPAAEEEDEAVTTTVSSPLAQSSSCLPQRQASSSVVLSTPSSPCASPFLSPLSPQSLSITPAVPSSPHNRQIPQATTRQSSFRSFAARGDVFPCKVCGEVLSKPQQLELHQAMKHSLSELSSLDSSMNIIRMIFLAGWKPAVMPGAGEPPSVRRILRIHHNPRVLTRFEEYRDLVRARAARRCAGAGAAAVEERCVADGNERLRFYCSTMLCTLGAGVCGSPYCCTCSILRHGFAGKQADVDGIATYSSGRAAHASLPDDVEREFAFLQVRRAMLVCRVVAGRVGRGAADDKVAYDSMVPLLPTSSFAAATRGDDDVELLVFNPRAVLPCFVIIYSC

SEQ ID NO: 119202 - protein, 71 aa, Oryza sativa
  Clone ID: PAT_MRT4530_22441C.1.pep
LFSFWSFRGACGACLSQGKFLHFLLGDAGAEGVEGGEALVAVVAGLGRAVQQRKRLLRAHRLRRRRRRRIH

SEQ ID NO: 119203 - protein, 202 aa, Oryza sativa
  Clone ID: PAT_MRT4530_22442C.1.pep
MEDSMQQVTTAAAAAAAAATATATAGGECDCGGGGGVGCLLSGIACCCAAAAFYFVGATELRMARRFTRISDLSAALDSEGALPLVTLRGQVGSETRIVASQSGCQAVIAEQQVRQHCKTKHVTKSAKTKINEKDGEEFLVLRRTKATDGDEYLVVKRTRVKVGTEHRPTKRVRDIDVEQWVHGTNVVSSTKNEVLWYLHWL

SEQ ID NO: 119204 - protein, 121 aa, Oryza sativa
  Clone ID: PAT_MRT4530_22443C.1.pep
MEKSSKMMAVAAVLVLAVVGAAEARNIKAAAAAAAESKDTVVQPTTFPPFDRFGSAVPAFGGMPGSSIPGFSLPGSSGSTPGGLGGFGSMPMFGGLGGGSPGLGGGMPGSPAAADKQAKKP

SEQ ID NO: 119205 - protein, 174 aa, Oryza sativa
  unsure (1)..(174): unsure at all Xaa locations
  Clone ID: PAT_MRT4530_22444C.1.pep
MQLMDVLTAYFYGSLDLEFYMRVPKGHKITNSKGNCNMYSVHMQRSWYGLKQSGRLWFKELSRYLXKRGYSNNYDCPHVFSKKSLNGFCIXISVYVYDLNIIATIEDITMACLNIELXLKDLGKTKFCLGQQLEHLHGGVFMHRSPYTKTVLGNFNMNKCHPLKTPMVVRSIEA

SEQ ID NO: 119206 - protein, 43 aa, Oryza sativa
  Clone ID: PAT_MRT4530_22445C.1.pep
ENGGAIWLPKKAPPTLLQLISSINRPPVYLIIVFSLVYLPFSL

SEQ ID NO: 119207 - protein, 88 aa, Oryza sativa
  Clone ID: PAT_MRT4530_22446C.1.pep
LRRLTADGPDDVVDDVTTGGGSGGANSPANNGAVTKTSAEEQRRRRRSGGDLRLDDGDGAPAVFGSGEGAITSRLPQAGPAYIRHAHH

SEQ ID NO: 119208 - protein, 348 aa, Oryza sativa
  Clone ID: PAT_MRT4530_22447C.1.pep
MVKLVCFVVVVFMAAAAAMAGADRELKVGYYEKTCKDVEKIVNSIVVNSIKDNRGKGAGLVRLLFHDCFVRGCDASVLLEKSEMNRQPEKESPANIGIRGMDVIDAIKAVLEARCPNTVSCADIIAYAARDASRYLSHGGVDFPVPAGRLDGVVSRSRDADAFLPDAAANLTDLVRNFRRKNFTVEELVILSGAHSIGVTHCTSFAGRLTAPDAQINPGYRSLLVSKCGGVSPTPANNHVVVNNVRDEDGAAVARVMPGFAARVRKARDYLDNSYYHNNLAMAVTFHADWALLTGKEARGHVVEYAKNATLWNVDFGDALVKLSKLPMPAGSKGEIRAKCSAVNGYHH

SEQ ID NO: 119209 - protein, 102 aa, Oryza sativa
  Clone ID: PAT_MRT4530_22448C.1.pep
NKKQKTGRKSLLNKHKNIGRQGKAGGTRKNHKQSSWGVEKTNSGQKKLPQKEQPNEKRGIGSIIKKGLGGDPIKTRNATPFLPSPSKRKPPPFKVDSYGALP

SEQ ID NO: 119210 - protein, 77 aa, Oryza sativa
  Clone ID: PAT_MRT4530_22449C.1.pep
EKRLKCSHACMSAPLCLSTTKYFIWFTVTVMAPLYIYIVRKSLTDMRSTCHLEKNTCLHALILKRAIIQVNQQVDFA

SEQ ID NO: 119211 - protein, 972 aa, Oryza sativa
  Clone ID: PAT_MRT4530_2244C.1.pep
MMSGNEIMPVTLDDFEGEDCKSMEEYIKEITQEVLMRACTRTRQGVIIKPGPLPKLAPDLVSNDEDKFDGFLRIKFGPPMDDYMLKDKASITANQPPIDQTNSGTDGAAHLAGPTGPDGRSDHDIAVGPTGQTAGPTGYYHGGQTETQASLTAPLDVGQTGPWAGQTGAIIPIQGIDPMTNASCLYHLRTFDPPVSTAANSPHVPPHVPNAYNDPNRGYPPDTRQGQYNHIAPQTQPIRTPNPPPNQHRPDNMEEIISGIIRDKFGIETRNRAKVYQKSYPDYYDNVPFPRNYRVPEFTKFSAEDSRTTWEHVGQFLAQCGDANSDTFKLRLFSLSLFGTAFTWFTSLPANSIYTWAQLEFHDHFCTGKTELRLSDLTSVKHKYNESVADYIERFRDVKNRCFNLKITNKDLADIAYDGLLDSIKGKLNGQIFLDIDHVLHEALAQESRVDDNSLQASLDENAISCIVEPSNGSDCGNNLCNDAVTSIAKPNVDSDCLTSLDDNAITNIAEPSVGSDCVTSLNNDGIAEPSNGSDCVASLENNAIEDIAELNDGSDCITSSSEIALSPKTELQIGHVDVGKDSDNVLRDSSETESKVTVHTYQRPYPEHIDSVPYPQGFEVPNFTKFTGEGDRTTMEHIGQFIDQCGKASNDDFLKLKLFPLSLSNFASTWYSLLAPNTISTWSQMEREFHDYFKDASLMERRPVDDSSVTCETISVTSMPKTGIVSDPLPVSPIDVDKKKGKSVIIGDTRPKNRIKNAKAEDRKVAKGESSSSQKTKKPKLTFEMLMAKYKKGLAGQQVDNQTSDSKRPRSSRRKRFGQTSKQSEPSTIPTPCKHPIVMPWYPYPMSLYGYPFMYYMPWMLQPPMPCHQGWKQSPRTVPSHSNSRQDRFPQKNQSGESKGKKVWVRKEAKAPEVVAIKEESQDVHVPTGDAVETTQAKEIEADAVTVNIGGLTETAGRSNRQSTAGLTDGP

SEQ ID NO: 119212 - protein, 94 aa, Oryza sativa
  Clone ID: PAT_MRT4530_22450C.1.pep
PLRFFSSSGPPPPSCGPFSSGCSRGGFFFCPLVAPGGLFCNYSFPRSVFSPLSASRSSSGPPGLKVGVLFWSLSYLFLFFPFAFPPLVVSGPVL

SEQ ID NO: 119213 - protein, 601 aa, Oryza sativa
  Clone ID: PAT_MRT4530_22451C.1.pep
MEVGVSLEAGKPAAAPWGMLYYGVPALLVLGALYRAAERCWLGPRRVAGALQGQGLRGTAYRFPAGDLPENARRSKEARAKPMPPCHDIVPRVAPLLQDIVKEYVNTSSYILQKVCACCYVQFTLFIELYLTAQNTELNVGNVCITWFGTTPRVVIAEPELVKDILSNKFGHFEKFTLKSLGKLIALGLASYEGEKWARHRRILNPAFHLEKLKHMLPAFSTCCSEMIDRWDSKLAGSDGPFELDIWQEFQNLTGDVISRTAFGSSFMEGRRIFQLQEEQADRIIKTIQYIYIPGYLYFPTENNRRMKENSREIEGLLRGIIEKRSRAVENGELSGDDLLGLMLKSNMDSGEPSNLRMSTEDVIEECKLFYFAGMETTSVLLTWTLVVLSMHPEWQHRAREEVLSAFGRDKPNFDGLSRLKTASACQNLNIFLHPYLITSGSTHVNLLTMPRYSVYLLQVTMILHEVLRLYPPAVTLSRRTFKEIQIGGITYPAGVGLELPIILIHHNTDVWGKDAHEFKPERFADGISKATKTNQQAFFPFGWGPRICIGQNFAMLEAKMALCVILQNFEFQLSPSYTHAPYASVTLHPQHGAQIILTRL

SEQ ID NO: 119214 - protein, 445 aa, Oryza sativa
  unsure (1)..(445): unsure at all Xaa locations
  Clone ID: PAT_MRT4530_22452C.1.pep
MAKRRRRWRRQRCCSSDPPLAVAAAALLLLLLVVVTAAPVVDAAAAGRHVVQRHLDRINKPGVRSIHSADGDIIDCVPRHKQRALDHPLLANHTVQTQPSQMPASASLLDRRQQLSRRAWQTWHHSGHCPRGTVAVRRTAASDVQRARSLALFGRKKQMRSPLPAPDVVTGNGHELTMHAIGNLRQHAIAYTAAEVYGARATISVWAPEIDEANGFSLSQLWILSGYDRALSSLXSCQYASQVSPELYGDNRPRLFTYWTSDAYEATGCYNALCPGFVQTSSRIAIGASISPVSSVGGPQYDMTLLVWKDPKLGNWWLSYGDGAGGLVGYWPAELFTHLSDHATMVEWGGEVVNTHPPGSAHTATQMGSGHFAAEGFGRAAYFRNLETVDADNSLAAVPLDAIQTMAEDAGCYDIRKAYDDDDGRGGWGAHFYYGGPGHNTASCP

SEQ ID NO: 119215 - protein, 165 aa, Oryza sativa
  Clone ID: PAT_MRT4530_22453C.1.pep
RGRTPPLPHNEERNSRAKPHLLPSCASPLLPGICSPPPPPGRGDGRQQPQVGAVLEQMRLHMATDAGKDIAKKVGLVYQFNIAPKKIGVDEEIFVVDLKKGEVTKGPYEGKPDATFSFTDSDFLSIATGKMNPQIAFIRGAIKIKGSISAAQKFTPDIFPKPSKL

SEQ ID NO: 119216 - protein, 123 aa, Oryza sativa
  Clone ID: PAT_MRT4530_22454C.1.pep
MDGSSLKSAQLLEQMRLHMATDAGKDIAKKVGLVYQFNIAPKKIGVDEEIFVVDLKKGEVTKGPYEGKPDATFSFTDSDFLSIATGKMNPQIAFIRFCAIKIKGSISAAQKFTPDIFPKPSKL

SEQ ID NO: 119217 - protein, 57 aa, Oryza sativa
  Clone ID: PAT_MRT4530_22455C.1.pep
NYKLNYVTTLFFLVLNYILFAKIENTQYLNFMILKIIANYPNSFSFLKNIGYVVIYI

SEQ ID NO: 119218 - protein, 52 aa, Oryza sativa
  Clone ID: PAT_MRT4530_22456C.1.pep
RTWLGVPTRAPFFIPVNMAAPLWSKLSPYAMAHSFGSIYFGRFFRIMLMGAC

SEQ ID NO: 119219 - protein, 173 aa, Oryza sativa
  Clone ID: PAT_MRT4530_22457C.1.pep
MNNFLKGKGDYCVSGSGSRWTGCTAAVYGNERPGSTLSKTDGRDLIGLPRLTGNDDDDVGDDVTTGGGSGAHARRRTTARWRKRRASMRSGRCSDPYRGTNGGGRRRGRSGGDGRLDDDGGLPAILGDDGGVDEDGDGLVNPALSFPSDDDDRSDGVARLDLRQRQRCKSSRC

SEQ ID NO: 119220 - protein, 100 aa, Oryza sativa
  Clone ID: PAT_MRT4530_22458C.1.pep
MPMWKLRQRKRLPAAPISRSARKTGWRGPDRRAFQIASISSCPCPAGSKSTRGKNFSSSSFNSFAHQGSGGKACDAGEADAAAQDSFKPTTPLPRLLHRR

SEQ ID NO: 119221 - protein, 59 aa, Oryza sativa
  Clone ID: PAT_MRT4530_22459C.1.pep
MVRMKYLIYNIWAMFQIWNGCTYEGSYMEQVDPLPAISHLSNLAELYLQKAYDEYDICA

SEQ ID NO: 119222 - protein, 354 aa, Oryza sativa
  Clone ID: PAT_MRT4530_2245C.1.pep
MMSGNDIMPVTLDDFEGEDRKSMEEYIKEITQEVLMRACTRTRQGVIIKPGPRPKLAPDVKNRSDGSKVKKFKKVWVRKEAKAPEVVAAKDESQDVHIPTGDAVETTQAKEIEADAVTANIGGLAETASRSNRQSTAGLTDLTGRGGLTGIARRSDRWYPRSDRLCMAGLTGQTGWSDQHCVADYKTLIFEDVIDERLKTLREMKTLQDAVWLYSLGLLPHLKSRRSGRGTSGCHVVSLGPSRCLVPRPSPNCHVEVCDRPVAGRVQLDGRPCHHVASVSGGVEVGLSPVSGGGRRWVPLKGGPWLSFRAKARIAEKKSESALRSLGTLGGFAISPSEPFPPAKLTKGDLTISR

SEQ ID NO: 119223 - protein, 85 aa, Oryza sativa
  Clone ID: PAT_MRT4530_22460C.1.pep
MVKFLLLGTHTRKRIMVALPLTTSFSFMNFIVIEIHVLPRQNFELAILLPNRQRLTSVERLIHSDRYEDPTTLHCQNPCSIFEEG

SEQ ID NO: 119224 - protein, 53 aa, Oryza sativa
  Clone ID: PAT_MRT4530_22461C.1.pep
MNFLKLLLLLQYSCASCAWGSVEMRFSPDGSTSAMQTCSSNCIPSSSKYTDMI

SEQ ID NO: 119225 - protein, 149 aa, Oryza sativa
  unsure (1)..(149): unsure at all Xaa locations
  Clone ID: PAT_MRT4530_22462C.1.pep
LSSVGPPLGELLSLHDASAIXKKKRXRLHPTXRSLHPHLQSXRXRVXILSGNPTGPGWRGDGGLSGSTPWVLRVVRGLTFVGLWWGRVLFLCALLLFFLGIYCFFNSAKYLKNYYFSNLILKKFGLIFSWGPERKNQNQLNPPGGPSAX

SEQ ID NO: 119226 - protein, 162 aa, Oryza sativa
  Clone ID: PAT_MRT4530_22463C.1.pep
HASAPLAAAPPPAQHVAPAFPNLPRSRRRHLLGLQLLLRRHRPVSVGHHHHHHHRRRRRLLLAGAYAPGDGGAGQDVDSSESTSSTGSAYIGLFVRMLGLDNDPRDREHAVYTIWQYSLGGRKCIDEIMQFHGCVALIVSLLRSDSVRACEAAAGLLRNITS

SEQ ID NO: 119227 - protein, 87 aa, Oryza sativa
  Clone ID: PAT_MRT4530_22464C.1.pep
RKLFGKKKKQLVLHFYQKSPRKVPRQMGWHHKNNDNIDRCYTNMAVFSIILPPLRLLFSSILCICTDSREYTDFFWTSNEYIKFHHP

SEQ ID NO: 119228 - protein, 602 aa, Oryza sativa
  Clone ID: PAT_MRT4530_22465C.1.pep
MSSAAGQDNGDTAGDYIKWMCGAGGRAGGAMANLQRGVGSLVRDIGDPCLNPSPVKGSKMLKPEKWHTCFDNDGKVIGFRKALKFIVLGGVDPTIRAEVWEFLLGCYALSSTSEYRRKLRAVRREKYQILVRQCQSMHPSIGTGELAYAVGSKLMDVRTMSKETHIAEEVSTSQQTSQNTAGSLVEDSDYGPGGAQQSQKRESCSKSAELVGFNVHNDTSLYDSSNFIVSSTEVNNCSKDSQDYNDMGEPRYDTETFDDYPSLPVTNFFSTDGVGSNGVDKNHCSFSVPEDRLRHRDERMHSFQINNNIDLIIESNSCSSDVFRASNSDSAIFHSDAYKQDRWLDDNGYNREVIDSLRISDAPEADFVDGTKSNSVVASKDRVSEWLWTLHRIVVDVVRTDSHLDFYGESRNMARMSDILAVYAWVDPSTGYCQGMSDLLSPFVVLYEDDADAFWCFEMLLRRMRENFQMEGPTGVMKQLQALWKIMEITDVELFEHLSTIGAESLHFAFRMLLVLFRRELSFEESLSMWEMMWAADFNEDVILHLEENCLEPLLVDMRNDLSCEMFNDNMLKINVKRCVRMAIKLRKKYIYKGICTYAQYT

SEQ ID NO: 119229 - protein, 672 aa, Oryza sativa
  Clone ID: PAT_MRT4530_22466C.1.pep
MPRKERDSESSRRRRRRRQRSRSPSDSEEASDSSGSPRRSRSRNRRKSRRRDTPSSSDASDSQASDSGSDSGGRVRRRSGSRKKGEVTEEQIVEYMAKKAQKKAEKVAKKMKANAVSGYSNDSNPFGDPNLTEKFVWRKKIERDVSQGQKVDISVKGEKKKQRERMAEIEKVKKRREERAIEKAQHEEEMALLARERARAEFQDWEKKEEEFHFDQSKVRSEIRLREGRTKPIDVLLKNLNFSEEFDVELNEPYLVFKGLTVKEMEELRDDIKMHLDLDRESQINVKYWEALMVVCDWELGEARKRDALDRARVRGEEPPPDVLAEERGLHASIEGDVKDLLEGKTSTELEEMQSQIESQMRSGTAKVVEYWEAILKRLHIYKAKACLREIHASILRKHLHRLEHPDSIEQDKESEDEIDAKEKDATHIDDDDDDDDEDDKRYSPEPIAEQTESHLDEEDGSFSPELMHGNEDEDAIDPEEDKAELDRKREAVVMEHQKKVQQAIAVKTRVPDEMEMKAMKAMGAMEEGDAVFGSGAEVNLDSQVYWWHDKYRPRKPKYFNRVHTGYEWNKYNQTHYDHDNPPPKIVQGYKFNIFYPDLVDKSKAPTYTIEKDGSTGETCLIRFHAGPPYEDIAFRIVNKEWEYSHKKGFKCTFERGILHLYFNFKRYRYRR

SEQ ID NO: 119230 - protein, 42 aa, Oryza sativa
  Clone ID: PAT_MRT4530_22467C.1.pep
MGLEVLGKEKVQEMRAAVAHASDFPALPLALVWDVLRANIFD

SEQ ID NO: 119231 - protein, 609 aa, Oryza sativa
  Clone ID: PAT_MRT4530_22468C.1.pep
METELHLAAGYCAATGVYRSGHPPQFAAAAALSFPEYILPHMLLPGRRARPAFVDASTGAALSFAGLRALSLRVARALAAAGLRRGRVALLLSPNSLHFPALSLAVLSLGAVLSAANPLLTPDELARQADDAKPFLALVTGELAPKLRSIAPDVKLVLVEQLLADVAAEVDDDETLDLPAANIGRDDAALLFYSSGTTGRSKGVVSTHGNAIAMAASLERAWGGGGGGGEKPQQYDDHDEAYGCVLPMFHMFGFSSFVMGTAALGATAVVVPGRFSVEKTMAAVEEYGVTRLLVVPPMVVKMVAAAAGDGEPSRRRLRLRQVVSSGAPLQREHMARFRSCFPAVNLGQCYGLTETTGIVTMCDLQHNDNGIDKVEMPPSSTDMTFVAVAATTTEVKERSTGGGGGGGGVSIGRLMPDVEAKIVDPDSGELLPPRRTGELWVRGPSTMRGYLNNEEATALALVAAAGSVSVSGGGERWLRTGDLCYVDSRGLVYVVDRVKELIKCNAYQVAPAELEDVLATHPDIHDAAVAPYPDKEAGEIPMAYVVKKQGSGHLQEDEVISFVQNKVAPYKKIRKVVFVDSIPRSPSGKILRRQLKNLLQGSILHRSRM

SEQ ID NO: 119232 - protein, 55 aa, Oryza sativa
  Clone ID: PAT_MRT4530_22469C.1.pep
MVLCEMRPMTTNERWRIWTLTWLMTISTLGTSMLNTLVLVADQRNTLIGTWRMKL

SEQ ID NO: 119233 - protein, 352 aa, Oryza sativa
  Clone ID: PAT_MRT4530_2246C.1.pep
MARAAGLRALVGIEAAGRGRRVAASPSPGGTPAASRGLPGWPGFCGVGCGSSSSSSFAPPRMQARRAAGSAARTRSPSQSNGWITGGSASEDGRLSWGYSSFKGRRPSMEDRFSIKMTTINEQTVSLFGVFDGHGGSLAAEYLKEHLFENLVNHPELLRDTKLAISQTFLKTDADFLESVSSNPFRDDGSTAVTAILVGNHLYVGNVGDSRVVALKAGKAVPLSEDHKPNRKDEQKRIEDAGGIVVFDDTWRVNGLLAMSRAFGNRALKHYVKAEPDIQEKVVDESLEYLILATDGLWDVMRNEEAVSLLKAQDGPKAAAMKLTEVAHSRLTLDNITCIVLQFHHGKSTNSN

SEQ ID NO: 119234 - protein, 54 aa, Oryza sativa
  Clone ID: PAT_MRT4530_22470C.1.pep
ACISREYKARTASCLVEKKGNNRIRVQRMYFSRVGTVTHEFTTEKNPTTAYMYA

SEQ ID NO: 119235 - protein, 84 aa, Oryza sativa
  unsure (1)..(84): unsure at all Xaa locations
  Clone ID: PAT_MRT4530_22471C.1.pep
ILXFWGXXXFXXXXXXFFLVPVDRFRVVRSSVPSCRSIFSCLTAHSESGKPSRVPVVEAVQSQKKKAGLFFFLLYRPLQITCSM

SEQ ID NO: 119236 - protein, 125 aa, Oryza sativa
  Clone ID: PAT_MRT4530_22472C.1.pep
TLYGFCEQWSNRKPSSARASPPPMFMDTGNPNWGWSWAERWMAAARAWESQTTPANSGRAAAAVKGGGSGRRVPMSVQIPTSTPALARFTRPPSCPSPSTPTPRSPWRTSAVPPSSPGASPFPEV

SEQ ID NO: 119237 - protein, 1062 aa, Oryza sativa
  Clone ID: PAT_MRT4530_22473C.1.pep
MLQMLGLRGSPSAGDAGGDAPLRNGGEGGGGPGRPLRLVFCDEKGKFVMDPEAVAALQLVKGPVGVVSVCGRARQGKSFVLNQLLGRSSGFQVAPTHRPCTKGLWMWSAPLKRTGLDGTEYNLVLLDTEGIDAYDQTGTYSIQIFSLAVLLSSMFIYNQMGGIDEAALDRLSLVTEMTKHIRVRASGGRSTASELGHFSPVFVWLLRDFYLDLTEDNRKITPRDYLELALRPVQGGGRDVSSKNAIRESIRALFPDRECITLVRPVNNEKDLQRLDQLPLNNFRPEFRSGLDALTKFVFDRTRPKQLGASTLTGPVLSGLTQSFLDAINTGAVPTISSSWQSVEEAECRRAYDSAIDTYNSSFDRRKPAEEDAMREAHEDALKKAVSVFNASAVGAGLARSKFEKLLQTSLKKAFEDYKRNTFLEADLQCSNRIQSMESKIRTACNRPDAKLDDIVRLIDGLLTEYESKSYGPGKWKKLATFLQQCLAGPVLYLFRRQIEHIDAERNSLRLKCSSNDDKLALLRKQLEASEGHRAEYLRRYEESINDKQKISRDYSGRIAELQTKSSKLEERCVSLSSALDNAKRESVDWKNKYDHNLLQQKADESKLKSQIASLESRVNISEGRLSAVREQAESAQEEASEWKRKYEVAVSEAKTALQRAAVAQERTNKKVQEREDALRAELASQLSEKEEEIARLNTKINQTEIHATNLISRLEATEAKLKNHESDSLALKEEIRSLTVSLESFRTEAQSREKEVKILEQEKNHLQEKYLTECKRFDEADSRCKEAEREAKRATELADVARAEAVASQKDKGEAQRLAMERLALIERMERQVEGLEREKNKMLEEIERVGQSEKDAVCKVSSLEQRVDEREKEIDEMMQRSNQQRSSTVQVLESLLETEREACAEANRRAEALSLQLQATQSKLDMLQQELTSVRFNETALDSKLKASHARRLRGEATESVHDMDIDDDNTGRRRKRSKSTTSPFKSNHTEDGGSVFVGEDTNNGSQQAQETETEDYTKFTVLKLKQELTKHGFGAQLLQLKNPNKKDIVALYEKHVVGK

SEQ ID NO: 119238 - protein, 180 aa, Oryza sativa
  Clone ID: PAT_MRT4530_22474C.1.pep
MQQQHLMQMNQGMMGGYASPTTVTTDLIQQYLDENKQLILAILDNQNNGKVEECARNQAKLQHNLMYLAAIADSQPPQTAAMSQYPSNLMMQSGARYMPQQSAQMMAPQSLMAARSSMMYAQPALSPLQQQQQQQAAAAHGQLGMGSGGTTTLSVNVRGDNSGAHSGDGEYLKGTEEEGS

SEQ ID NO: 119239 - protein, 258 aa, Oryza sativa
  Clone ID: PAT_MRT4530_22475C.1.pep
MQMNQGMMGGYASPTTVTTDLIQQKDIPYKIWSLFMLVRNWECRLACAVLECHRFNLETVQYLDENKQLILAILDNQNNGKVEECARNQAKLQHNLMYLAAIADSQPPQTAAMSQYPSNLMMQSGARYMPQQSAQMMAPQSLMAARSSMMYAQPALSPLQQQQQQQAAAAHGQLGMGSGGTTSGFSILHGEASMGGGGGGGGAGNSMMNAGVFSDFGRGGGGGGKEGSTSLSVDVRGANSGAQSGDGEYLKGTEEEGS

SEQ ID NO: 119240 - protein, 119 aa, Oryza sativa
  unsure (1)..(119): unsure at all Xaa locations
  Clone ID: PAT_MRT4530_22476C.1.pep
MEEVISTSKKGGYPAAKNAFVPIXSGDHADDLRENPTTAXWPLAPTLPRRSSQERDPQELIRQTLNNPLDDWFIKVGNFTHLLAXATTSTLTSGMAPSFPTRSLTTEIKSPDMSHESLH

SEQ ID NO: 119241 - protein, 97 aa, Oryza sativa
  Clone ID: PAT_MRT4530_22477C.1.pep
FFFFFKQHLSTLSFSRASSHISNPPPKVSSLVVFHSLYAASLVLQFTFTLQVSLSALPFASHPWVSLVCLPICGAAARPPVLFSPGCSLQAFGLASL

SEQ ID NO: 119242 - protein, 378 aa, Oryza sativa
  unsure (1)..(378): unsure at all Xaa locations
  Clone ID: PAT_MRT4530_22478C.1.pep
YNGRSIRRKKIGHTTEWRRQPLILLSFYPLNTVALYLTRVFPLLRRTHASPPPPPPPHPAIAASHHPPPLAAAPPPSPSPSADAAFPPPPPPDAAPPXPPTPAATPPPTSATPPPXPPKQGRAMKSRSPCAPPLARRSSPTCASTLPPSTLKPITSPWSPRSSPHTXPPPHPPKNPPXDGPCWPSPRPSTPXPPSPSPSPSRAFTMNCAPPPPPPAXTSRARPTSPPPPRRPRAPPSCSPGSSTSPAAPPPPSSRRCSPPPPRPESPTPPRGTPPPPRAPPRQPGTCTACCAPPPPPPSPPGKPAPRGAAPAGLATRAAAQRRSGVRAPAPPRPRPGGPRAPPPCAKTRRPCRRSPWPPAASGRARRPPRPRQLRPRG

SEQ ID NO: 119243 - protein, 353 aa, Oryza sativa
  Clone ID: PAT_MRT4530_22479C.1.pep
MRDFSCFGDGAVSLAASAAAAGAGAALDRSLQAATATVYKAALSSRKEILVRVMWTRTVAGAAPGGATGLAVAVDEASRSSPSPAAGSASAATPRRSAVALASSPQFLHKKRGTRSFVTEAGTVVAIYWDTTDAKHPAAGSSSPEPTRDYYLAVVADGEIEEEMEEEEVEQRKRCRFRADGAEHEVAVVCRGEEWGTRDGEVAVSIDGKKVVEARRVKWNFRGNRTAVLGDGAVVEVMWDVHDWWFAGGGGGGAQFMVKARDGDGDGDGGRVWMDEAASIADDIPPSLTRITHPGPMITFTNHEVSILHYIPEPQDINEPLISNKQRYIVTALSVNRFRPPGEYELHLYNSHT

SEQ ID NO: 119244 - protein, 1737 aa, Oryza sativa
  Clone ID: PAT_MRT4530_2247C.1.pep
MEVAFMPGKMYKRLILCQLIFLGHDLASFTIAEEQFIYSGFSQANLSLDGTATITPEGLLQLTNGTFNLKGHALYPAPLQFRRHPTGDVQSFSLTFIFSILSAIPDKGADGMAFFISTNKSFSNALPAQYLGILNDQNNGNTSNHIFAVELDTIQNSEFQDISDNHVGININSLHSVQSRDAGFYDDKNGVFKNLTLVSRDVMQVWVEYDAGSTQIDVTLAPIKVAKPTLPLVSAIYNLSTVLPGTAYIGFSSATGVINSRYYVLGWSFSMGGTASGIDIRKLPKLPHVGPRPRSKVLKIIMPATIAASIFVAGALLVLLVRRKLTYTELREDWETEFGPNRFSYKDLFLATEGFKNKNLLGTGGFGKVYKGILPTNKLEVAVKRLSHESRQGTKEFITEIVSIGRLRHRNLVQLLGYCRRKGELLLVYDYMPNGSLDKYLYSEDKLSLDWNKRFHIIKGVASCLLYLHEECESVVIHRDIKASNVLLDSELNGRLGDFGLAKSYDHGSDPQTTRVVGTMGYLAPELVRTATVPPAAAAADEGVAIGHSTGGSRQALLPPAGEADKAAARWNRLARRRVEAGFLVKHEAIMLLHVKLICLLLLAGASLAACTAGDGNDDDHQFVYSGFTGSNLTLDGAAVITRTGLLELTNGTLRQKAHAIHPAPFRLRGGSSSSSTATATATATATATRSFSASFVFAILCPDADACGHGIVFFVAPANHSFSGAFPSQYIGLFNGSSDGDAGNHLVGVELDTDQNNEFRDIDGNHIGVDINSLTSINSTSAGYYDDNDGGNSGDHGFHNLTLASHGEAMQVWVDYNGTAKQITVAMAPLKMAKPSKPLLSSTYDLSTVFVADEPYMVGFSSATGSFNSRHYVLGWSFAMDGPAPAIDIDKLPKLPRFAPKHKPKMVEIIPPLATATFIVALGTVSVLLIRRRMRYTELREDWEVEFGPHRFSYKDLFRATDGFKSMNLVGVGGFGRVYKGVLQSSKLEIAVKRVSHDSKQGMKEFIAEVVSIGRLQHRNLVQLLGYCRRKGELLLVYEYMANGSLDKHLYSEGDKRVLDWDQRLQIIKGIASGLLYLHEEWEKVIVHRDIKTSNVLLDSEMNSRLGDFGLARLYDRGADPLTTHVVGTIGYLAPELGRSSKATPLTDIFAFGIFILEVTCGRRPIMQVPEGEQHVLVDWVLEHWHKGSITEIVDTKLHGNYNVDERNNWQKQVHRTAPFMKIALSFLLHILLFHGFNLVLAVSASDDQFVFSGFSGANVTLDGTATVTAGGLLELTNGTTQLKGHAFFPAPLSFRGSLNGTVQSFSASFVFAILTSYPNLSCHGIAFVVAPSNNLSTALAAQYMGLTNIDNNGNASNHIFAAEIDTMQNVEFQDINNNHIGVDINGLHSVESHYAGYYDKNGSFHNMNLISGDVMQAWVDYDGDIAQINITIGPIDMSKPGRSLISTTYNLSDVLMEPSFIGFSSATGPINSRHYILGWSFGMNKPAPNIDIAKLPKLPRLAPKPQSKVLRYAELREDWEDEFGPHRFAYKDLLHATDGFSDKHILGAGGFGRVYKGILPKSKLEVAVKRVSHESRQGMKEFVAEVASIGRIRHRNLVQLLGYCRRKGELLLVYDYMSNGSLDRYLHYEGNKPVLDWVQKFQIIKDVASGLLYLHEKWDKVVIHRDIKASNVLLDKEMNARLGDFGLARLYDHGTDAHTTHMVGTMGYLAPELIHTGKASTLTDVFAFGTFLLEM

SEQ ID NO: 119245 - protein, 391 aa, Oryza sativa
  Clone ID: PAT_MRT4530_22480C.1.pep
MRDFSCFGDGAVSLAASAAAAGAGAALDRSLQAATATVYKAALSSRKEILVRVMWTRTVAGAAPGGATGLAVAVDEASRSSPSPAAGSASAATPRRSAVALASSPQFLHKKRGTRSFVTEAGTVVAIYWDTTDAKYPAAGSSSPEPTRDYYLAVVADGELAVLLGGGEAARELARRFAAAPRRALLSRREQLRAAPASPAAMAAAAVAHSTRCRFRADGAEHEVAVVCRGEEWGTRDGEVAVSIDGKKVVEARRVKWNFRGNRTAVLGDGAVVEVMWDVHDWWFAGGGGGGAQFMVKARDGDGDGDGGRVWMDEAASIADDIPPSLTRITHPGPMITFTNHEVSILHYIPEPQDINEPLISNKQRYIVTALSVNRFRPPGEYELHLYNSHT

SEQ ID NO: 119246 - protein, 55 aa, Oryza sativa
  Clone ID: PAT_MRT4530_22481C.1.pep
KDIFPHIEGLLLLFNHLTGTWNNSLGLSLENRDLNNRKYLGWPKMACFGHGLPLV

SEQ ID NO: 119247 - protein, 59 aa, Oryza sativa
  Clone ID: PAT_MRT4530_22482C.1.pep
MRAVTREIIETMPTFTRHRVKRGLYRSTNNLLCSLDKPYTTECFVMPWALSKMEHDTLT

SEQ ID NO: 119248 - protein, 120 aa, Oryza sativa
  unsure (1)..(120): unsure at all Xaa locations
  Clone ID: PAT_MRT4530_22483C.1.pep
WRGRQSAAAAACRSSRTTTTHTTQRLASRRHQRPALRRRRRPSGGGPRAAXGREKQWEDEGNSGGREKQWEDEGNGGGRKKHAGAATXSTLTLEMVIAMAAWAGGGSVILVLKKGLRKLP

SEQ ID NO: 119249 - protein, 44 aa, Oryza sativa
  Clone ID: PAT_MRT4530_22484C.1.pep
MARVAAVSVLRAPPSARTTMLADALVPLDGIHWMRRCPAGFKHR

SEQ ID NO: 119250 - protein, 62 aa, Oryza sativa
  unsure (1)..(62): unsure at all Xaa locations
  Clone ID: PAT_MRT4530_22485C.1.pep
FFFFFFHAITTILFRLXATCSYTRHQVSAXPSIRVTRXXFPKNSNSLSCNSPLFYDVLVXDH

SEQ ID NO: 119251 - protein, 209 aa, Oryza sativa
  Clone ID: PAT_MRT4530_22486C.1.pep
MEAAEAAQHGMAHGGAGKAAEGGAADGGRGRSARNGTDRQEAAERRGQMGMGGRLVAGVDEWERLRLGLMEEQQRRGYLRRDPAARARRHARCSCVRVCSWLLLMLVLLIVALTAFAPVVYLVFKPRQSDYTLQSANLLVGLSALRRRCASRSASCCAASPPLPAYPRRSAPTALAHRRPHRRARRPRRPLPSPHRRAPCHAAPPRPPP

SEQ ID NO: 119252 - protein, 52 aa, Oryza sativa
  unsure (1)..(52): unsure at all Xaa locations
  Clone ID: PAT_MRT4530_22487C.1.pep
MRECIXIHIGQAGIQXGNACWELYCLEHXIQPXGQMPGDXXVGGGDDAFNTL

SEQ ID NO: 119253 - protein, 234 aa, Oryza sativa
  Clone ID: PAT_MRT4530_22488C.1.pep
MEAEQAPQLAVLRTGAAARVDWGGRRRGAGGGTAGASAGAGARAAAEGRRCQRERQRKAAIDSIWSLVKEIREKGILIKSNESQIQKKNGNKEDGAAGLPATVLASSAGRPPRPPAWPAATPTRPANRRARSHGGGLPARPLAAPRRPAAAAPVGRRCSRPAVATTRSAAAQRGEGEEREGKGERKGMEGERKGWRSNERGGDREECAIISELVARSGYSLLPVGINNGTKDHL

SEQ ID NO: 119254 - protein, 84 aa, Oryza sativa
  Clone ID: PAT_MRT4530_22489C.1.pep
MQFEDGGDVHVGAGEGEDGGRVTVDELTRCLRCGISANATPHMRRGPEGRRTLCNACGIAWAKGKVRKVIDSDTPMDNAMFAQM

SEQ ID NO: 119255 - protein, 952 aa, Oryza sativa
  Clone ID: PAT_MRT4530_2248C.1.pep
MTKPSSKTEVEPSNVMPVTLDDFEGEDRKAMEEYINELTREALMRATTRTRQGVIIKPGPRPKLAPDVVSNDEVSQSIQQQIASTIDSSMANFKDRLDVMFKDKIDGFLRSRLDSFMDDYTLKDKAYTTVDQSPIDPMGSKTDGTAFTVGPTGPDGRSDRNIAVGPTNQTAGQTGYYPRGQTGPQAGPTAHNDTGQTGPSAGQTGAIVPIQGIDPMTNASYLYHFRTFDPPVSTATSNPQVPPHIPNAYNDVSRGYPPDTRQGQYNHIAPQTQPIRPPNPPPNPQGPNSMEDMISDIMRNRFRIETRNRARAYKKPYPDYYDNVPFPRNYRVPEFAKFSGEDVRHKYNESVADYIKRFIDVKNRCFNLKITDKDLANIAYDGLLDSIKEKLNGQIFLDIDHVLHEALAQESRVNDNSLQASLDENAISCIAEPSNGSDCGNNLCNDAVTSIAEPNVDSDCLTSLDDNAITNIAEPSVGSDCVTSLDNDGIAEPSNGSDCVASLENNAIEDIAELNDGSDCITSSSEIALSPKTELQIGHVDVGKDSDNVLRDSSEIESKVAVHTYQRPYPEHIDSVPYPQGFEVLNFTKFIGEDARTTMEHNGQFIDQCGKAGNDDLLKLKLFPLSLSNFASTWYSLLAPNSISTWSQMEHEFHGYFKDASLMEQRPIDTSSVTCETISVTSMAKIEIVSDPLPINSIDVDKKKGTSVIIGDPRPKNRIKNAKAEDRKVAKDESSSSQKTKKLKLTFEMLMAKYKKGLAGQRVDNQTSDSKRPRSSRRKRFGQTSKQSEPSTIPTPYKPPVVMPWYLYSMSLYGYPFMYYMPWMPQPPMPYYQGWKESPRTVLNHSSNPRQDRFPQKNRSGGSKVKKVKKVKKVWVRKEANAPEVIAMKEESQDVYVPTGDAVETTQAKEIEDDTVTVNIGGLTGTAGRSNRQSTRSLTDLTGRSDRAQRLA

SEQ ID NO: 119256 - protein, 320 aa, Oryza sativa
  Clone ID: PAT_MRT4530_22490C.1.pep
MADDSSNLVLSDAAGRVLWRTNVTAGGVNSSGAVAVLVNSGNLVLRLPDDTALWQTFEHPSDVFMAGMKLGIDYRSHSGMRIVSWKGAGDPSPGSFSFGVDPERPLQAKIWNGSRVHWRSSMWTGYMVDSNYQKGGSSAIYTAVVYTDDEIYASFTLSAGAPPMHYLMSYSGDLHLQSWSNVSSAWVTNARFPRRDCSLFGYCGAFGYCGNSTGGGGGAGRRLDVPLPRREAARCGDGFAEFPDMKLPDGYALVGNMNAGECAAACRRNCSCVAYAYADLSRSTRRDPTRCLMWGGELLDMEKVNESWGDLGETLYLRMA

SEQ ID NO: 119257 - protein, 87 aa, Oryza sativa
  unsure (1)..(87): unsure at all Xaa locations
  Clone ID: PAT_MRT4530_22491C.1.pep
GGALRSARSGRRGGGVGGATVEGDAAAAGRLHEARRWGPPLLQIXREGRWRQRRQWRWCRGGGDGGCVAAAAPSSPSDDGGGSGDGK

SEQ ID NO: 119258 - protein, 894 aa, Oryza sativa
  Clone ID: PAT_MRT4530_22492C.1.pep
MEYAGCTCTQAATAIFLFLLSLPLAASDDRLAVGKTLSPGATLVSDGGAFAMGFFSPSNSSGLYLGIWYNNVPKLTVVWVADQLAPITDHPSSSKLAMADDSSNLVLSDAAGRVLWRTNVTAGGVNSSGAVAVLVNSGNLVLRLPDDTALWQTFEHPSDVFMAGMKLGIDYRSHSGMRIVSWKGAGDPSPGSFSFGVDPERPLQAKIWNGSRVHWRSSMWTGYMVDSNYQKGGSSAIYTAVVYTDDEIYASFTLSAGAPPMHYLMSYSGDLHLQSWSNVSSAWVTNARFPRRDCSLFGYCGAFGYCGNSTGGGGGAGGGVSTCHCLEGFEPASGADWSRGDFSLGCRRKEAARCGDGFAEFPDMKLPDGYALVGNMNAGECAAACRRNCSCVAYAYADLSRSTRRDPTRCLMWGGELLDMEKVNESWGDLGETLYLRMAGAGRGSKRSAVKFALPIVLASILIPTCILICVPKFKEEMIVKHDGKNNKKRALRVLSVSDEFGKEIPAQDLDFPFVEYNEIATATENFSDAAMNGKGGFGKVYKGVIGGREVAIKRLSRCSEQGVVEFRNEVLLIAKLQHRNLVRLVGCSIEGDEKLLIYEFMANKSLDASLFNSERKSSLNWSTRFKIIKGVARGLLYLHQDSRLTVIHRDLKASNILLDAEMNPKISDFGMARIFGDNQQNGITRRVVGTYGYMAPEYAMGGIFSMKSDVYSFGVLLLEIVSGSRISSTDFIEDFPNLSIYAWNLWNEGKAKNMIDPSIVASCLLDEPISKALMMSSKCANSRMMKKKRCIPFSMNWTLEPSQTVLRLFIDSEMLMMMMMMTMDLHKLFFGPLTDDETLMLMKALHKLFFGPSLSDDDHVDKLRHGDDEVTMKASSDGELVMIKANSDSELVM

SEQ ID NO: 119259 - protein, 178 aa, Oryza sativa
  Clone ID: PAT_MRT4530_22493C.1.pep
SFISLKTYINRSIPSSSPCSQCKETKQDRLVKGGWTREEDEVLRQMVRHHGDRKWAEIAKSLPGRVGKQCRERWTNHLHPDIKKDIWTEEEDRMLIEAHQTYGNSWSAIAKQLPGRSENTIKNHWNATKRSLNSKRRLRKKNSEQTVPGQPSLLESYIRSCQHMLPTSRTTGTQPSEA

SEQ ID NO: 119260 - protein, 305 aa, Oryza sativa
  unsure (1)..(305): unsure at all Xaa locations
  Clone ID: PAT_MRT4530_22494C.1.pep
MEGEVVEEEEEEEVTAAPAPAAMVAAAEFGLTAEVMAVLPEDPFEQLDVARKITSIALASRLGRLEAEGARLRAQLAERDAAAEDLSERVEQLDAALAVATGRLRRAEEEKLEVFKKTLMQSLQEDEDPANTTPKARVSETXISPLQHLLEVSEESSHVEPDVPRPPRPHVFLPSYNSTPRVTPPDSPPRSFASISPPRRHSISITSRNLFDDRSSAYSGHSSVTSPFDAGSHTGRTRVDGKEFFRQVRNRLSYEQFSAFLANVKELNSHKQTREDTLRKADEIFGPDNKDLYTIFEGLITRNIH

SEQ ID NO: 119261 - protein, 144 aa, Oryza sativa
  Clone ID: PAT_MRT4530_22495C.1.pep
VRRLNRDVAKLEVFKKTLMQSLQEDEDPANTTPKARVSETSNFSSATSVGDEDSAFPVSKSSQLSETASSVSEESSHVEPDVPRPPRPHVFLPSYNSTPRVTPPDSPPRSFASISPPRRHSISITSRNLFDDRSSAYSGHSSVT

SEQ ID NO: 119262 - protein, 47 aa, Oryza sativa
  Clone ID: PAT_MRT4530_22496C.1.pep
VGTDSVLSVCVMLHYLSNFVNYSHFLMACCYHVINSKPKGSGNWKKN

SEQ ID NO: 119263 - protein, 574 aa, Oryza sativa
  Clone ID: PAT_MRT4530_22497C.1.pep
MALNAFAQPVTNYLIKRYNMKPNAATNVANVFSGTYSFSPVVGAFVADAFCGRFWTLLFGAVAAFVAMVVITLSATIRQLKPPSCSDVARQAGTCAGPSGLHRAVLYIGMALLVVATGGANPTSLPFGADQFDHDDASSGSSSNEADERRRRAEEPAGLKRFYNWYYVVTMMASFMALTFIAYIQDKVSWGLGFGIPTALVAATFAVFLAGTPLYVRVPAEGSIFSSVARVVVASCRKRRLTLPHPRDARQQEAVLYNPPVVVAAGTGTSRVFKLPLTLQLSFLNKAAIVTADADEIRPDGSPARPWSLCSVQQVEEVKCLVKIVPVWISGVMWFISVAELTNYTFLQALTMDLHMGRSFTIPPVSIAAIFNLAIVLFVPVYDLLVARAAQRVTGVEGGITVLQRQGVGVAISGLALVVAAVVERRRRASALDNGGTSPMSVFVLAPQLAVMGVSAAFNMIGQMEFYNTEFPDQMRTLANAAFYCAQGASSYLATAVVNVVNARTRRRGGGQGWVAEDINAGKLDHFYYAMAVFAAINFVYFLVCSYFYRYKGEPEVAAEDSPPATPEAVLLKH

SEQ ID NO: 119264 - protein, 134 aa, Oryza sativa
  Clone ID: PAT_MRT4530_22498C.1.pep
IRFLRSSQNDLEYKLKPNFFYLLESAYRVQFLGSATNFSFKIIWSSDAQPKQHFHGWLILRQKALTAENLLIRHWPCYWICSLCESAFKDTDNLFWDCPFTRQVWNSASAYLGFSNASTKQLIPEWLTYLYSSI

SEQ ID NO: 119265 - protein, 31 aa, Oryza sativa
  Clone ID: PAT_MRT4530_22499C.1.pep
NAYIWREITIMDVWTTLCSQSLSEQKGNLQV

SEQ ID NO: 119266 - protein, 94 aa, Oryza sativa
  unsure (1)..(94): unsure at all Xaa locations
  Clone ID: PAT_MRT4530_2249C.1.pep
ARSSSGPPARCFSTGXRXXPSPXPVCSSSPRCRLVXGCRRVSPRAXPPRPXARSSXPTAAXSXVAAITAVASPVAGCRRPPLPSRLALRPRRGW

SEQ ID NO: 119267 - protein, 100 aa, Oryza sativa
  Clone ID: PAT_MRT4530_224C.1.pep
MEDNATFAARQLSKLGASPHSLEMKVSAYSFHRYHTNQTLRHYGMAAAHGLGKEPGRGSGADRARSRVQSGKGGDTAGKEEGNACATTGGSGGAARGGGG

SEQ ID NO: 119268 - protein, 74 aa, Oryza sativa
  unsure (1)..(74): unsure at all Xaa locations
  Clone ID: PAT_MRT4530_22500C.1.pep
GAKPKRRIAWLRFCIKFECLLWHAREEDRKGNRKVGKQKKKKKKKKKKKKKKKKKKKKKKKKKKKKKKKKXRKV

SEQ ID NO: 119269 - protein, 88 aa, Oryza sativa
  Clone ID: PAT_MRT4530_22501C.1.pep
WIENNEERSAAVFARSAGRPALAGAGADDGPVKKRAVRVRVRDRVGKIMSSISRAIHLTSRDVVKHSGFRVAACHQAVSSLKYMFLRH

SEQ ID NO: 119270 - protein, 75 aa, Oryza sativa
  unsure (1)..(75): unsure at all Xaa locations
  Clone ID: PAT_MRT4530_22502C.1.pep
MDGYLNYLSLEYDSVWDTKPSWCQPWTILLSGAVAIAENEVEXHLNCQAYTEMIAERRRKVASGAEDTYGMEKSQ

SEQ ID NO: 119271 - protein, 146 aa, Oryza sativa
  Clone ID: PAT_MRT4530_22503C.1.pep
MKYVILFSVVLAAVGVWFQLQTNNKHPSEYLKEDFSTPPPWFLLKAVQLVDSITKKFSIVPPLFQVLDDVLIFEKSQLVHTSAILAIPDLIGDQVLSNIDLADRLAPASADKKKVQMNLCRFLRALAAYGYFEEVSSDRSRFDYCD

SEQ ID NO: 119272 - protein, 260 aa, Oryza sativa
  Clone ID: PAT_MRT4530_22504C.1.pep
MPDIQLGCHTIRSHGTSVARLHMYDWIILLFLAVVDGLLNIIEPFHRFVGRDMMTDLRYPLKGNTIPFWAVPKFDNVTTNVICHGEKSVIKEGHKSFPSGHSSWSFAGLGFLAWYLAGKLKAFDRKGHIAKLCIVFLPLLVASLVAVSRVDDYWHHWQDVFAGGIIGLTVSSFCYLQFFPYPFDADAVWPHAYFQQLADTQSNGIANSYNMGPTDIEIADEGHGAISLRDTSPILDTMESGDRLIIESSLQLGAGRYMLT

SEQ ID NO: 119273 - protein, 105 aa, Oryza sativa
  unsure (1)..(105): unsure at all Xaa locations
  Clone ID: PAT_MRT4530_22505C.1.pep
FKLVYICIFSTGMLENRCHELSILERSRNEHSXRIPCVTAPCPAAGGGLVGXLARERTGFTVASRATGHQDGGPAELFSFKWTTLLMLIATLLMLIRSLSVTRIV

SEQ ID NO: 119274 - protein, 222 aa, Oryza sativa
  unsure (1)..(222): unsure at all Xaa locations
  Clone ID: PAT_MRT4530_22506C.1.pep
MPDIQLGCHTIRSHGTSVARLHMYDWIILLFLAVVDGLLNIIEPFHRFVGRDMMTDLRYPLKGNTIPFWAVPLIAIVLPWVVFGGIYFKKKNVYDLHHGILGILYSVLITAVITDAIKDGVGRPRPDFFWRCFPDGIPKFDNVTTNVICHGEKSVIKEGHKSFPSGHSSWSFAGLGFLAWHLAGKLKAFDRKXHIAKLCIVFLPLLVAPLVAVSRVDDYWHH

SEQ ID NO: 119275 - protein, 146 aa, Oryza sativa
  Clone ID: PAT_MRT4530_22507C.1.pep
FKSSSDPVKEQAAAAVRSLVKGCTKIQNDLREGNCIKLLTDCIASESDNVRIHAVGALMELARENPKNQDAIGAAGAIQPLVNCLHSENKVLQYLAEGAIWALARKSSKRKKEFKAAGAVEALQQLRNSSNEQVRKGADWAIEVLA

SEQ ID NO: 119276 - protein, 37 aa, Oryza sativa
  Clone ID: PAT_MRT4530_22508C.1.pep
FTEHVLLAPHAHLSLSSAILLCYLFPLIFKLMLYRFQ

SEQ ID NO: 119277 - protein, 63 aa, Oryza sativa
  Clone ID: PAT_MRT4530_22509C.1.pep
MAGKFSRYFVLFMLNQAQILNCVPDFDEEHSVMQKRDLILKIRDGLLKAEVAVRPTILYGYSN

SEQ ID NO: 119278 - protein, 103 aa, Oryza sativa
  Clone ID: PAT_MRT4530_2250C.1.pep
MIKSVSSPWDYANVVDGDREGDRGFIQERHQLYIGLRALMGRGIPAPTLPDTRRGVGALPPIPSTCGRAPSSTHSAATWQPSVGPGATQPLGPEGCNGIPRDP

SEQ ID NO: 119279 - protein, 80 aa, Oryza sativa
  Clone ID: PAT_MRT4530_22510C.1.pep
GRVGGRVGGRVGGRVGGRVGNDPCKFLYSIYMLIVVTMPHVSLFHMPLRCCLLSCRLCESWKVRIVCGSPACLCIYGVLV

SEQ ID NO: 119280 - protein, 130 aa, Oryza sativa
  Clone ID: PAT_MRT4530_22511C.1.pep
MASCATPSITFFFNSSYSSLKSLVAIPLFGKLGLQLIAREQQLLLPFLTMTLVYEASLAGQCRCKEREQQLLLTRAEWKAKFEERKSNEAYGSNAKKYHSRFDKSKIDCRKCGKFGHFTNECEESKKKVM

SEQ ID NO: 119281 - protein, 565 aa, Oryza sativa
  unsure (1)..(565): unsure at all Xaa locations
  Clone ID: PAT_MRT4530_22512C.1.pep
MDRSWMYDIHRSXREGVTEFVNFADNDRKNTMSKYMLCPYVDCKNEKMFEESSWVHSHLISRGFMDHYKCWRKHGDQETHDVATDEVPDIVNNATARDVMFVPSPLGGDTIYLDXKLSNMLRDVEDPYHNERDFEKFSKSVVDSEMSLYVGCKPKHTKLSAVLKLMKLKTSNGWSTKVLHXLLELLKDLLPEGNKILXMTYEAKQVLCPLGLEVRRLHACRNNCILYYKQYADLDACPICEASRYKXDLSEGEGRKSNRGGSAKVVWYLPIAERMNIMFANLKQAKLVRWHAKERKVDGKLRHLVYSIQWRTIDRIYPKFAKDPRNMHLAMCTYDINIFSDLSSRHSIXPVLVNYNLPPWLCFKRKYIMPAMLVQRLTXPGNDIDMFIEPIINDLERLWXRTWDASRWECFSLQVLLFCTINDYTTLGILSGXTVIGWRACXSECMDETKSQXLKHSCKMVYMGHMRFLLRYHPYRNMWKNFSGHREVASPPQDQTGLQVHDLVWIIIIPSXKKQGLSEGNHQRFCKEKKASSTKDKSMWKKKSIFWXPYLEHLEVRHCIDLWMV

SEQ ID NO: 119282 - protein, 87 aa, Oryza sativa
  Clone ID: PAT_MRT4530_22513C.1.pep
NAYPRSWNAEDPDEALMYGHRRRHRCPRQPLRHRSSTARPRPGLTNRTFCMLSVIFASQPSCAPPKPPLLFAKKDQANYQLLWRTRG

SEQ ID NO: 119283 - protein, 68 aa, Oryza sativa
  Clone ID: PAT_MRT4530_22514C.1.pep
MAATLKLRILAAAATAAVVASSLVGVATATEAPAPGPSGASAGAAATNAAPAVALGTLAAAAVGYLFC

SEQ ID NO: 119284 - protein, 108 aa, Oryza sativa
  Clone ID: PAT_MRT4530_22515C.1.pep
ANKELCIIAYTPRTIKQARKKRCEEKKYPQIQAYNYLQKIQAYSKTADHSSRSLLASINSGWILRSSIPPLQERPQPTLPLPPSARRRHRSPAHGRCRRRRSLRHQRR

SEQ ID NO: 119285 - protein, 544 aa, Oryza sativa
  Clone ID: PAT_MRT4530_22516C.1.pep
MDLGKSTSTSATLKKLQEDGALPGRGNAEREAGGTDPQPILGCMVAIEDYVVCGFLPPPSEFLLLAYIGVEPFLDLFRFYYELRWMESNRVSGSVGFRLRDGMKSRYVPFQCPSSRSKWRNRWFYLEIKDSNPVLVVPEEQLDKIPVWTAKPPLAPSLQSFIDIIDNLRERGLSGYEVVADFVGLSSEIVERRVGQVMISGPTTASDIPVPLCEKGAAERDEAINVAASLKEKVVKEASDAATTSGGKAPTKARKFSSVLGHRRKAETPSASDTSPPPARRQRIVTIGEKEARAKAARAKAGGTSSASPATASTDVVPVVGSREVTPSGPVSDPAGGRGLPETVLSWEELQAKMRRLLEAGARGIGREISEARAETAAANACAERLVRELAEAREDLTKMRELVAGNERQRKGLEVCMSELGDNLSEIRGSLRVTYTGLHQLARECGVESTIPVNPDEFSLTSSLAELATAIGEIPSKHTARIAEETSNGIFTGACHVLACVRLSRPELDLREILDQGAASDTRREVMEEVSDLGESVLPLFEE

SEQ ID NO: 119286 - protein, 360 aa, Oryza sativa
  Clone ID: PAT_MRT4530_22517C.1.pep
MDAGNNAIAAASFAIVVLVAAAASSLAAAVPAVYVLGDSLADVGNNNHLLTLLKADFPHNGIDYPGGKATGRFSNGKNFPDFLAENLGLATSPPYLAISSSSSANYVNGVNFASGGAGVFNSTNKDQCISFDKQIEYYSKVQASLVQSLGEAQAASHLAKSLFAITIGSNDIIGYVRSSAAAKATNPMEQFVDALIQSLTGQLQRLYDLGARRVLFLGTGPVGCCPSLRELSADRGCSGEANDASARYNAAAASLLRGMAERRAGLRYAVFDSSAALLRYIERPAAYGFAEARAACCGLGDMNAKIGCTPVSFYCANRTGYVFWDFYHPTEATARMLTAVAFDGSPPLVFPVNIRQLAAM

SEQ ID NO: 119287 - protein, 341 aa, Oryza sativa
  unsure (1)..(341): unsure at all Xaa locations
  Clone ID: PAT_MRT4530_22518C.1.pep
GFVYSRVNKPRGXARGPGPREWGPRGSPTVHGGPGARGXTPAGAVGPTRQPHPRAWAADGRAPHGSRGARPKATSPARPTGGGAPAPRWSPPATTGATERRPRERREHGAKRRSSAHHGSTATTGTAAEAEEGAGAARDDEDDGAPMVGGRNRGADEVGEDAAKPKGAMPKREEVRGDDGGEPELGGDGGERGRRRGHDSDWESERXAAETEERSTVIDYIGTGAREGGRGGRKPARRSRAPLMXPANFAGLNPSESEGERXGKEGKKRKGITGSDFPLFIARGXAGCGGIRGGAGARARRGRCLRRARGGEARWPAGERRERERTGPSRPKKGRGEKKTF

SEQ ID NO: 119288 - protein, 813 aa, Oryza sativa
  Clone ID: PAT_MRT4530_22519C.1.pep
MDLGKSASTSATLKKLQEDGALPGREKAEREAGGTNPQPLLGRMVAIEDYVVCGFLPPPSEFLLLVFNFYGLSLLHLNPNSIAFLSVFVHLYEAYIGVEPFLDLFRFYYELRWMESNRVSGCVGFRLRDGMKSRYVPFQCPSSRSKWRNRWFYLEVKDSDPVLVVPEEQPDKIPVWTAKPPLTPSLESFIDIIDDLRERGLSGYEVVADFVGRRIQPLQARAHPAYNYSGADDATRVSPRGLSGEVVGRRVSQVMISGPTTASDIPAPLCEREAAERDEAINVAASLKEKVIQEASDAATTSGGKAPTKTRKFSSVLGNRRKAETPLASDVSPPPARRQRIVTIREKEARSKAARGKSGETSGASPVTASTDVVPVVGSREATPNGPVGDPVEGCGLSEAVLTWEERHVEMRRLLKAGACGVGREVSEARAETAAANARAELLVRELAEAREDLTKMRELVAGNERQRKGLEDRMSELGDNLSEIRGSLRVTYTGLHQLAEECGVKSSIPANPDEFSLTSSLAELATAMGEIPSRHVARIAEETSNGIYTGACHVLACVKLSCPELDLREILDQGAASDARKEVMEEVGDLGEDADDEDVRQRGQPESLAIIPVLEFELHASHDVEDQTPDAEVEVTTTASNLEDALATQNRRIQYWKTKFEVAELERAMLAVKNEKAVETLRGREVWFSSYLQSCCTTMARGVPGVRVVRGDPKESAAGYISWLNGACAQLNGIGKRIDEALKQECRRASRYAGGHMLACLRDHRPRLDLEFLREGFLHSRRNPAEIDHLARSMSPLAEKIFQSMDWRWPSW

SEQ ID NO: 119289 - protein, 160 aa, Oryza sativa
  unsure (1)..(160): unsure at all Xaa locations
  Clone ID: PAT_MRT4530_2251C.1.pep
MAAGVLGRCGRTWRAAGWMNSDDGVTDLQVSATTSPYKEVLATARRQSACKFLQLQLCKTATASDNLEGLMWEEINDPMEAEIEAEMEAQIEAELLAHVLPQGADAEEHGNVDLVQQGDHRXRPSGSMSTTPSAGKAMVAQGRSCGTARCSRRSQISATG

SEQ ID NO: 119290 - protein, 792 aa, Oryza sativa
  Clone ID: PAT_MRT4530_22520C.1.pep
MDLGKSASTSATLKKLQEDGALPGREKAEREAGGTNPQPILGRMVTIEDYVVCGFLPPPSEFLLLVLNFYGLSLLHLNPNSIAFLSVFVHLCEAYIGVEPFLDLFRFYYELRWMESNRVSGCVGFRLRDGMKSRYVPFQCPSSLSKWRNRWFYLEIKDSNPVLVIPEEQPDKIPVWTAKPPLTPSLQSFIDIIDDLRERGLSGYEVVADFVGLSGEAVERRVGQVMISGPTTASDIPAPLCEKGATERDEAINVAAPLKEKVVKEASDAATTSGGEAPTKARKFSSVLGHRRKAATPSASDASPPPPRRQRIVTIGEKEARAKAAWAKFGGTSSASPTTVSTDVVPVVGSREATPSGPVSDPAGGRSLPEAVLTWEELQVEMGRLLEAGARGIGREISEARAETAAANARAERLVRELAKAREDLAKMRELVAGNERHRKGLEDRMSELGDNLSEIRGSLQVTYTGLHQLARECGVKSTIPVNPDEFSLTSSLAELATAMGEIPSKHMARIAEETSNGIYTGACHVLACVKLSRPELDLCEILDQGVASDTRKEVMEEVSDLGESVLPLFEEDADDEDVQQRGQPESLAIIPVFEFEPHVSHDVEDQTLDVEVEMTTTTSSLEDALATQDRRIQYWKTKFEVAELERTMLVMKKEQAVETLRGREVWFASYLKSCCTSMARVCRELRVVRSDPEESAARYISLLNGACAQLDGIDKCIDEALKQECRRASRYAGGHVLACLRDHRPRLDLEFLHEGFARSRRTPAEIDHLARSMSPLAEKVFQSMDWHWPSW

SEQ ID NO: 119291 - protein, 761 aa, Oryza sativa
  unsure (1)..(761): unsure at all Xaa locations
  Clone ID: PAT_MRT4530_22521C.1.pep
FLPPPSEFLLLVLNFYGLSLLHLNPNSIAFLSVFVHLCEAYIGVEPFLDLFRFYYELRWMESNRVSGCVGFRLRDGMKSHYVPFQCPSSRNKWRNRWFYLEIKDSNPVLVVPEEQPDKIPVWTAKPSLTPSLQPFIDIIDDLREQGLLGYEVVADFIGRRIQPLQARAHPAYDYSGPDDATXVSPRGLSSEAVEQCVGQVMISGPTTASDIPAPLCEXATERDEAINVAASLKEKVVKEASDAATTSDGKAPTKARKFSYVLGHRRKAATPSASDASPPPPRRXRIVTIGEKEARAKAARAKSRGTSSASPATVSTDVVPVVGSREATPSGPVSDPAEGRSLAEAVLTXEELQVEMGRLLEAGARGTGREISEARVETAVANARAERLVRELAEACEDLTKMRELVAGNERQRKGLEDRMSELGDNLSEIRGSLRVTYTGLHQLAEECGVKSTIPVNPDEFLLTSSLAELATVIGEIPSKHSARIAEETSNGIYTGACHILACVRLSRPELDLRDILDQGAASDTRKEVMEEVSDLGEDAGDEDVQQRGXPESLAIIPVLEFEPRVSHDVEDQTLDVEVEMGTTTSNLEDALATQDRRIQYXKTKFEVAELSRTMLAVKKEQAMETLRGREGMRGXRVVRNTPEESAXGYISWLNGACAQLDGIGRRIDEALXQECRRASRYAGGHVLACLRDHRPRLDLEFLHEGFARSRRTPAEIDHLARSMTPLAEKVFQYGLSSLKDLTRPYRFWASPAEDPLGSSE

SEQ ID NO: 119292 - protein, 126 aa, Oryza sativa
  Clone ID: PAT_MRT4530_22522C.1.pep
WAALFLGPPYKKPLFFLFLFTNPPGPIFVRAPLFSLGYQTPGRFLCSRWHPSRLWFFPPPLFTFGQKVLPVSPPIFFFNRPPLELAPLSLRGFNPSFFVVPPLFLWGEPTPVGASEKKGPIKTINV

SEQ ID NO: 119293 - protein, 71 aa, Oryza sativa
  Clone ID: PAT_MRT4530_22523C.1.pep
MEEAVNGNDLAWLFQEAVLNLKRNANEGIVVKAIVAACDSSAGYTRYFEACYPVISSKAGEGRDLLSVHML

SEQ ID NO: 119294 - protein, 294 aa, Oryza sativa
  Clone ID: PAT_MRT4530_22524C.1.pep
MAAQASSKRGMLLPREAVLYDDEPSMPLEILGYHGNGVGGGGCVDADYYYSWSGSSSSSSSSVLSFDQAAVGGSGGGCARQLAFHPGGDDDDCAMWMDAAAGAMVENTSVVAGGGNNYCHRLQFHGGAAGFGLASPGSSVVDNGLEIHESNVSKPPPPAAKKRACPSGEARAAGKKQCRKGSKPNKAASASSPSPSPSPSPSPNKEQPQSAAAKVRRERISERLKVLQDLVPNGTKVDLVTMLEKAINYVKFLQLQVKVLATDEFWPAQGGKAPELSQVKDALDAILSSQHPNK

SEQ ID NO: 119295 - protein, 84 aa, Oryza sativa
  Clone ID: PAT_MRT4530_22525C.1.pep
MERSLLAAVLLGVLAVAFPGAAAAVGTQPGAMAKASREPSPHVSLSCAPLFLCRRGAVHREAASTAQRCGRYRQGSPCRCLRRY

SEQ ID NO: 119296 - protein, 45 aa, Oryza sativa
  unsure (1)..(45): unsure at all Xaa locations
  Clone ID: PAT_MRT4530_22526C.1.pep
KGPXLTQPPRWIKPGLKLVCTGFVSWGIRYIRFLWIGNDFVKTQN

SEQ ID NO: 119297 - protein, 250 aa, Oryza sativa
  Clone ID: PAT_MRT4530_22527C.1.pep
MAVATSFATLAIARPAAERALLASKTPSPLLSIRTGTGTARLPSSAVFGGFTPALSAAHSRARFVSSATADPKEVDLQSKITNKVYFDISIGNPVGKNVGRVVIGLYGDDVPQTAENFRALCTGEKGFGYKGSSFHRVIKDFMIQGGDFDKGNGTGGKSIYGRTFKDENFKLVHTGPGVVSMANAGPNTNGSQFFICTVKTPWLDGRHVVFGQVIEGMDIVKMIESQETDRGDRPKKKVVISECGELPVV

SEQ ID NO: 119298 - protein, 397 aa, Oryza sativa
  Clone ID: PAT_MRT4530_22528C.1.pep
MASSSDVDLADRFDMSGPTHMMKEKIIHWDKEEHRRCVAACLVKGAYVVENDLNRRRMWGKELAPAWWENFGFRTVDVINDDVIDDNDQIVTGTIYEHETPPGGGEPRHPLSPRYVVAFRGTMTWHPKAFVDLYLDLQVLFNTLQDSQRFRLAKAAVQKLVDTIHKGTGVCDHAVGGRCVVWLVGHSLGASVALEVGRVMMTEQGYNLPTFLFNPPQVSPAPVINLLHPNEKAKRHLHAASSLLKVGLGKIMNSHEEHMEKLFERLSPWTPELYVHESHPICQGYIDYFEQRQLVQERFRGIGNSAMKLSYRDMFFSVLGKNKERPHLLPSALLWKNSRVDDDVEDHKKLSKCKMLQEQLHQYKKLAFNAHSLEHWWKPDNELSLTKTQYMYSYPSA

SEQ ID NO: 119299 - protein, 108 aa, Oryza sativa
  Clone ID: PAT_MRT4530_22529C.1.pep
MPPIVMFRSGGERWSCAGRQGEAAAKEAAPSLAPLPTPFLDRIPPPLWEEANGSGTGLRRSGGLAVRVGAPKRRLRRLAPSRGDIAPLTTPLPTASCHRRGRKRVEVA

SEQ ID NO: 119300 - protein, 73 aa, Oryza sativa
  Clone ID: PAT_MRT4530_2252C.1.pep
MSMRKLIRLTVILALLVAAVAVSQCAAAEAAAAAGGMMRPRPPRRAAADWHVAAVSASPPANVTANLGADVLL

SEQ ID NO: 119301 - protein, 86 aa, Oryza sativa
  Clone ID: PAT_MRT4530_22530C.1.pep
REWGGNTIIRQVADRHQLLDTRPSRGIRLRTCFALRRRLSELRKDRKARKYDLSSRKDIVSGDAQLGKDVIEVADKKFADREIAQC

SEQ ID NO: 119302 - protein, 120 aa, Oryza sativa
  Clone ID: PAT_MRT4530_22531C.1.pep
HATSTRFLPRRWHDAVGRGVVSGAMSPRDGARRRSLRFGAPTRTAKPPLLLRPVPLPFASSHNGGGIRSRNGVGSGARDGADRRAAGERLLVFFAASRSRTRFFCCSLPLPPSAAPALAT

SEQ ID NO: 119303 - protein, 82 aa, Oryza sativa
  unsure (1)..(82): unsure at all Xaa locations
  Clone ID: PAT_MRT4530_22532C.1.pep
FIFLGCFFHVSEPDIHINASHQSQGSAVTIISHPRFLQGQYQSSASKAMSINLNTKAAVTQCHLSSQWXTXQSQPPASQHSR

SEQ ID NO: 119304 - protein, 351 aa, Oryza sativa
  unsure (1)..(351): unsure at all Xaa locations
  Clone ID: PAT_MRT4530_22533C.1.pep
MPQGVNDTAIVLILKKKEPKDLKDYRPISLCNVIYKDVIALAQSAFIPGRMITDNAIIAFECFHAINRCKSVESQFCAYKLDLTKAYDRVDWRYPEGALLKVGFCSQWVQLLMTCVTSVSYAVRFNGSMLESFKLTRGLRQGDPLSPYLFLFVADGLSMALSEAERSGRLQPLKVCRRAPGISHLLFADDSLLFFKSNMEQTNVVKSALTLYEQSTSQLLSPAKCSLMFGKHCGDALQSDIRSLLHVQHTSFEDKYLGLPTPMGRLKAGRYQSLKERFEKRLTDWNEKYLSMGGKEVLIKSVLQAIPTYVMSVFKLPAGLCEEYMQLIRKFWWGXDRQKRKVHWISWQQLI

SEQ ID NO: 119305 - protein, 173 aa, Oryza sativa
  unsure (1)..(173): unsure at all Xaa locations
  Clone ID: PAT_MRT4530_22534C.1.pep
ASLPRILPSSSSLPSLSLPLLLPLSILLSGTGGRHGWRRVGASRSRRHGFHFYSPHKSLLLSLFSLFLSLSHPFSPFCRRQVASAGAALGGKGRLQQKKRVRDLDAAKXHQEPLPGSAAVGSKGEDGDVVVVAVASPGSNSFGQRRPSRHSPPRSSTVSRRRCGRRRMEAAPA

SEQ ID NO: 119306 - protein, 110 aa, Oryza sativa
  Clone ID: PAT_MRT4530_22535C.1.pep
MRPLLQDVIVPAQSAFIPGQMFTDNALIAFECFHAINRCKSVESQFCAYKLDLTKAYAVRFNGSMLESFKPTRGLRQGDPLSPYLFLFVADGLSTALSEAERSGRLQPLK
